(19) United States
(12) Patent Application Publication
(10) Pub. No.: US 2024/0033347 A1
(43) Pub. Date: Feb. 1, 2024

(54) ONCOLYTIC VACCINIA VIRUSES AND RECOMBINANT VIRUSES AND METHODS OF USE THEREOF

(71) Applicant: ViroMissile, Inc., La Jolla, CA (US)

(72) Inventor: Nanhai George CHEN, San Diego, CA (US)

(73) Assignee: ViroMissile, Inc., La Jolla, CA (US)

(21) Appl. No.: 18/349,083

(22) Filed: Jul. 7, 2023

Related U.S. Application Data
(60) Provisional application No. 63/368,029, filed on Jul. 8, 2022.

(51) Int. Cl. A61K 39/285; A61K 45/06; A61K 31/451; A61P 35/00; A61K 9/00

(52) U.S. Cl. CPC A61K 39/285; A61K 45/06; A61K 31/451; A61P 35/00; A61K 9/0019; A61K 2039/54

(57) ABSTRACT

Provided herein are clonal strains of a vaccinia virus that exhibits enhanced anti-tumor properties and/or reduced immunogenicity, and recombinant vaccinia virus derived from the same. Also provided herein are recombinant oncolytic virus strains that include an inactivating mutation in one or more viral genes, and/or one of more heterologous nucleic acids each encoding one or more heterologous gene products. The viruses, e.g., vaccinia viruses, provided herein, including recombinant vaccinia viruses, can be used as an oncolytic virus therapy, e.g., an oncolytic vaccinia virus therapy, for treating cancer. Also provided herein are pharmaceutical compositions and methods and uses of the viruses, e.g., vaccinia viruses, for treating cancer, as well as nucleic acids encoding the viruses.

### CROSS-REFERENCE TO RELATED APPLICATION

[0001] This application claims priority to U.S. Provisional Application No. 63/368,029, filed Jul. 8, 2022, entitled “ONCOLYTIC VACCINIA VIRUSES AND RECOMBINANT VIRUSES AND METHODS OF USE THEREOF,” the contents of which are incorporated by reference in their entirety for all purposes.

### INCORPORATION BY REFERENCE OF SEQUENCE LISTING

[0002] The present application is being filed along with a Sequence Listing in electronic format. The Sequence Listing is provided as a file entitled 773192000100SeqList.xml, created Jul. 7, 2023, which is 6,262,578 bytes in size. The information in the electronic format of the Sequence Listing is incorporated by reference in its entirety.

### FIELD

[0003] The present disclosure provides clonal strains of a vaccinia virus that exhibits enhanced anti-tumor properties and/or reduced immunogenicity, and recombinant vaccinia virus derived from the same. The vaccinia viruses of the disclosure, including recombinant vaccinia viruses, can be used as an oncolytic vaccinia virus therapy for treating cancer. The present disclosure also provides pharmaceutical compositions and methods and uses of the vaccinia viruses for treating cancer.

### BACKGROUND

[0004] Vaccinia is an oncolytic virus and accumulates in tumors. In some cases, oncolytic viruses (OVs) are viruses that replicate selectively or more efficiently in cancer cells than in non-cancer cells. Oncolytic vaccinia viruses include recombinant viruses that are engineered from a native virus by gene disruptions or gene additions so as to improve its anti-tumor properties, such as tumor selectivity or preferential replication in tumor cells, host tropism, surface attachment, lysis, and spread. Among such recombinant vaccinia viruses are attenuated viruses that are modified in one or more viral genes that results in loss or reduced expression of a viral gene or inactivation of a viral protein. However, the effectiveness of oncolytic viruses is hindered by the strong immune response induced by the virus. Immune factors such as antibodies neutralize the virus by binding to it directly and preventing a successful infection of the cells or by marking it for destruction either by complement or by other immune cells. Thus, there still exists a need for improved oncolytic vaccinia viruses that have reduced ability to induce antiviral defenses and have enhanced anti-tumor activities.

### SUMMARY

[0005] Provided herein is a recombinant oncolytic vaccinia virus, comprising: an inactivating mutation of B2R; a heterologous nucleic acid encoding interferon regulatory factor 3 (IRF3); and at least one heterologous nucleic acid encoding one or more cytokine and/or chemokine.

[0006] In some embodiments, the at least one heterologous nucleic acid encoding one or more cytokine and/or chemokine comprises a heterologous nucleic acid encoding chemokine ligand 9 (CXCL9) and/or IL-12. In some of any such embodiments, the at least one heterologous nucleic acid encoding one or more cytokine and/or chemokine is a heterologous nucleic acid encoding chemokine ligand 9 (CXCL9). In some of any such embodiments, the at least one heterologous nucleic acid encoding one or more cytokine and/or chemokine is a heterologous nucleic acid encoding IL-12. In some of any embodiments, the at least one heterologous nucleic acid encoding one or more cytokine and/or chemokine is a heterologous nucleic acid encoding CXCL9 and IL-12. In some embodiments, the at least one heterologous nucleic acid encoding one or more cytokine and/or chemokine is a heterologous nucleic acid encoding CXCL9 and a heterologous nucleic acid encoding IL-12.

[0007] In some of any embodiments: the CXCL9 is human CXCL9. In some embodiments, the CXCL9 comprises the amino acid sequence set forth in SEQ ID NO: 99, or an amino acid sequence that has at least 95%, 96%, 97%, 98%, or 99% sequence identity to the amino acid sequence of SEQ ID NO: 99. In some embodiments, the amino acid sequence of CXCL9 is set forth in SEQ ID NO: 99. In some of any embodiments, the CXCL9 is mouse CXCL9. In some embodiments, the CXCL9 comprises the amino acid sequence set forth in SEQ ID NO: 106, or an amino acid sequence that has at least 95%, 96%, 97%, 98%, or 99% sequence identity to the amino acid sequence of SEQ ID NO: 106. In some embodiments, the amino acid sequence of CXCL9 is set forth in SEQ ID NO: 106.

[0008] In some of any embodiments: the IL-12 is a human single-chain IL-12. In some embodiments, the single-chain IL-12 is composed of human IL-12A (p35) and human IL-12B (p40) subunits, optionally separated by a linker. In some embodiments, the single-chain IL-12 comprises the amino acid sequence set forth in SEQ ID NO: 103, or an amino acid sequence that has at least 95%, 96%, 97%, 98%, or 99% sequence identity to the amino acid sequence of SEQ ID NO: 103. In some embodiments, the amino acid sequence the single-chain IL-12 is set forth in SEQ ID NO:103. In some of any embodiments, the IL-12 is a mouse single-chain IL-12. In some embodiments, the single-chain IL-12 is composed of mouse IL-12A (p35) and mouse IL-12B (p40) subunits, optionally separated by a linker. In some embodiments, the single-chain IL-12 comprises the amino acid sequence set forth in SEQ ID NO: 102, or an amino acid sequence that has at least 95%, 96%, 97%, 98%, or 99% sequence identity to the amino acid sequence of SEQ ID NO: 102. In some embodiments, the amino acid sequence the single-chain IL-12 is set forth in SEQ ID NO:102.

[0009] In some of any embodiments, the at least one heterologous nucleic acid encoding one or more cytokine and/or chemokine comprises a heterologous nucleic acid encoding IL-2. In some embodiments, the IL-2 comprises an amino acid sequence set forth in any one of SEQ ID NOs: 98, 100, 101, 104, and 105, or an amino acid sequence that has at least 95%, 96%, 97%, 98%, or 99% sequence identity to the amino acid sequence of any one of SEQ ID NOs: 98, 100, 101, 104, and 105. In some embodiments, the IL-2 is set forth in SEQ ID NO:105. In some embodiments, the IL-2 is a superkine of the sequence set forth in SEQ ID NO: 105 or a sequence that has at least 95%, 96%, 97%, 98%, or 99% sequence identity to SEQ ID NO: 105.

[0010] In some of any embodiments, the IL-2 is an IL-2 superkine. In some embodiments, the IL-2 superkine is H9, H9T, MDNA11, or MDNA11T. In some of any embodiments, the H9 IL-2 superkine comprises the amino acid sequence of SEQ ID NO: 100, or comprises an amino acid sequence that has at least 95%, 96%, 97%, 98%, or 99% sequence identity to the amino acid sequence of SEQ ID NO: 100. In some of any embodiments, the H9T IL-2 superkine comprises the amino acid sequence of SEQ ID NO: 104, or comprises an amino acid sequence that has at least 95%, 96%, 97%, 98%, or 99% sequence identity to the amino acid sequence of SEQ ID NO: 104. In some of any embodiments, the MDNA11 IL-2 superkine comprises the amino acid sequence of SEQ ID NO: 101, or comprises an amino acid sequence that has at least 95%, 96%, 97%, 98%, or 99% sequence identity to the amino acid sequence of SEQ ID NO: 101. In some of any embodiments, the MDNA11T IL-2 superkine comprises the amino acid sequence of SEQ ID NO: 98, or comprises an amino acid sequence that has at least 95%, 96%, 97%, 98%, or 99% sequence identity to the amino acid sequence of SEQ ID NO: 98. In some of any embodiments, the IL-2 superkine is MDNA11T, and the MDNA11T comprises the amino acid sequence set forth in SEQ ID NO: 98, or an amino acid sequence that has at least 95%, 96%, 97%, 98%, or 99% sequence identity to the amino acid sequence set forth in SEQ ID NO: 98.

[0011] In some of any embodiments, the recombinant oncolytic virus further comprises one or more heterologous gene product selected from the group consisting of a complement inhibitor, a T cell or NK cell evader, an immune stimulating protein, an anti-angiogenic protein, an interferon regulatory factor, an apoptosis inducible protein or a combination of any of the foregoing.

[0012] In some of any embodiments, the inactivating mutation of B2R is a deletion of all or a portion of the B2R gene loci. In some of any embodiments, said deletion is sufficient to render the encoded B2R gene product non-functional. In some embodiments, the inactivating mutation of B2R is one or more amino acid substitutions in the encoded gene product. In some of any embodiments, the inactivating mutation of B2R is characterized by insertion of the heterologous nucleic acid into the B2R gene loci, such as in place of the deletion of all or a portion of the B2R gene loci. In some embodiments, the heterologous nucleic acid encodes IRF3 or the cytokine and/or chemokine. In some of any embodiments, the inactivating mutation of B2R is by insertion of the heterologous nucleic acid encoding IRF3 and/or by insertion of at least one of the at least one heterologous nucleic acid encoding one or more cytokine and/or chemokine into the B2R gene loci. In some of any embodiments, the inactivating mutation of B2R is characterized by insertion of the heterologous nucleic acid encoding chemokine ligand 9 (CXCL9) and/or IL-12 into the B2R gene loci.

[0013] In some of any embodiments, the heterologous nucleic acid encoding IRF3 is inserted into the hemagglutinin (HA), J2R (thymidine kinase), F14.5L, A56R (hemagglutinin), vaccinia growth factor (VGF), A35R, A49R, A55R, B14R, C4L, C6L, C16L, NIL/N2L, E2L/E3L, K1L/K2L, K7L, superoxide dismutase locus, 7.5K, C2L-F3L, C4L-F1L, C7-K1L, B13R+B14R, A26L, or I4L gene loci in the genome of the virus. In some of any embodiments, the at least one of the at least one heterologous nucleic acid encoding one or more cytokine and/or chemokine is inserted into the HA, J2R, F14.5L, A56R, vaccinia growth factor, A35R, A49R, A55R, B14R, C4L, C6L, C16L, NIL/N2L, E2L/E3L, K1L/K2L, K7L, superoxide dismutase locus, 7.5K, C2L-F3L, C4L-F1L, C7-K1L, B13R+B14R, A26L, or I4L gene loci in the genome of the virus. In some of any such embodiments, the insertion is in place of a deletion of all or a portion of the respective gene loci.

[0014] In some of any embodiments, the nucleic acid genome of the recombinant oncolytic vaccinia virus is modified from a parental vaccinia virus that has a nucleic acid genome that has at least 99% sequence identity to the nucleic acid sequence set forth in SEQ ID NO: 1. In some embodiments, the nucleic acid genome of the recombinant oncolytic vaccinia virus is modified from a parental vaccinia virus that has the nucleic acid genome set forth in SEQ ID NO:1.

[0015] In some of any embodiments, the nucleic acid genome of the parental vaccinia virus is characterized by one or more of: (i) a variant 017 open reading frame (ORF) encoding an amino acid sequence that has at least 95% sequence identity to SEQ ID NO: 57 and comprises a polar uncharged amino acid at position 66, optionally a threonine (T) at position 66; (ii) a variant 038 (K5L) ORF comprising a nucleotide insertion to effect a frameshift mutation, wherein the 038 (K5L) gene product is altered; (iii) a variant 059 (E2L) ORF encoding an amino acid sequence that is at least 95% sequence identity to SEQ ID NO:60 and comprises a hydrophobic amino acid other than leucine at position 419, optionally a phenylalanine (F) at position 419; (iv) a variant 104 (H4L) ORF encoding an amino acid sequence having at least 95% sequence identity to SEQ ID NO:61 and comprises a negatively charged amino acid at position 591, optionally aspartic acid (D) at position 591; and (v) a variant 182 (A56R) ORF comprising deletion of two nucleotides to effect a frameshift mutation, wherein the 182 (A56R) ORF gene product is altered.

[0016] In some of any embodiments, the nucleic acid genome of the parental virus is characterized by one or more of: (i) a guanine (G) at the position corresponding to position 7770 of SEQ ID NO: 1; (ii) a thymine (T) at the position corresponding to position 15261 of SEQ ID NO: 1; (iii) a G at the position corresponding to position 32136 of SEQ ID NO: 1; (iv) a G at the position corresponding to position 49455 of SEQ ID NO: 1; (v) a cytosine (C) at the position corresponding to position 92969 of SEQ ID NO: 1; (vi) the nucleic acid sequence CACTTATATAT at the positions corresponding to positions 106870 to 106880 of SEQ ID NO: 1; (vii) the nucleic acid sequence GTTTTCATTA at the positions corresponding to positions 111267 to 111276 of SEQ ID NO: 1; (viii) an adenine (A) at the position corresponding to position 162715 of SEQ ID NO: 1; (ix) the nucleic acid sequence TACAGACACC at the positions corresponding to positions 165844 to 185853 of SEQ ID NO: 1; and (x) a C at the position corresponding to position 187805 of SEQ ID NO: 1.

[0017] In some of any embodiments, the nucleic acid genome of the recombinant oncolytic vaccinia virus has at least 85%, 86%, 87%, 88%, 89%, 90%, 91%, 92%, 93%, 94%, 95%, 96%, 97%, 98%, or 99% sequence identity to the nucleic acid sequence set forth in SEQ ID NO: 1. In some of anyembodiments, the nucleic acid genome of the recombinant oncolytic vaccinia virus has at least 95%, 96%, 97%, 98%, or 99% sequence identity to the nucleic acid sequence set forth in SEQ ID NO: 1. In some of any embodiments, the nucleic acid genome of the recombinant oncolytic vaccinia virus has at least 95% sequence identity to the nucleic acid sequence set forth in SEQ ID NO: 1. In some of any embodiments, the nucleic acid genome of the recombinant oncolytic vaccinia virus has at least 96% sequence identity to the nucleic acid sequence set forth in SEQ ID NO: 1. In some of any embodiments, the nucleic acid genome of the recombinant oncolytic vaccinia virus has at least 97% sequence identity to the nucleic acid sequence set forth in SEQ ID NO: 1. In some of any embodiments, the nucleic acid genome of the recombinant oncolytic vaccinia virus has at least 98% sequence identity to the nucleic acid sequence set forth in SEQ ID NO: 1. In some of any embodiments, the nucleic acid genome of the recombinant oncolytic vaccinia virus has at least 99% sequence identity to the nucleic acid sequence set forth in SEQ ID NO: 1.

[0018] In some of any embodiments: the heterologous nucleic acid encoding IRF3 is inserted into the J2R (thymidine kinase) gene locus in the genome of the virus; and the at least one heterologous nucleic acid encoding one or more cytokine and/or chemokine comprises a heterologous nucleic acid encoding CXCL9 and IL-12, wherein the heterologous nucleic acid encoding CXCL9 and IL-12 is inserted into the A56R gene locus in the genome of the virus.

[0019] In some of any embodiments, the nucleic acid genome of the recombinant oncolytic vaccinia virus comprises the nucleic acid sequence of SEQ ID NO: 85, or a nucleic acid sequence that has at least 95%, 96%, 97%, 98%, or 99% sequence identity to the nucleic acid sequence set forth in SEQ ID NO: In some embodiments, the nucleic acid genome of the recombinant oncolytic vaccinia virus is set forth in SEQ ID NO: 85.

[0020] In some of any embodiments, the heterologous nucleic acid encoding IRF3 is inserted into the B2R (viral cGAMP-specific nuclease) gene locus in the genome of the virus; and the at least one heterologous nucleic acid encoding one or more cytokine and/or chemokine comprises a heterologous nucleic acid encoding CXCL9 and IL-12, wherein the heterologous nucleic acid encoding CXCL9 and IL-12 is inserted into the A56R gene locus in the genome of the virus.

[0021] In some of any embodiments, the recombinant oncolytic vaccinia virus further comprises a heterologous nucleic acid encoding an apoptosis-inducible protein. In some of embodiments, the apoptosis-inducible protein is an inducible death effector domain (iDED). In some of any embodiments, the iDED comprises the amino acid sequence set forth in SEQ ID NO:27 or a sequence of amino acids that has at least 85%, 90%, 91%, 92%, 93%, 94%, 95%, 96%, 97%, 98%, or 99% sequence identity to the amino acid sequence set forth in SEQ ID NO:27. In some embodiments, the iDED is set forth in SEQ ID NO:27. In some of any embodiments, the heterologous nucleic acid encoding an iDED is inserted into or in place of the J2R gene locus in the genome of the virus.

[0022] In some of any embodiments, the nucleic acid genome of the recombinant oncolytic vaccinia virus comprises the nucleic acid sequence of SEQ ID NO: 86, or a nucleic acid sequence that has at least 95%, 96%, 97%, 98%, or 99% sequence identity to the nucleic acid sequence set forth in SEQ ID NO: 86. In some embodiments, the nucleic acid genome of the recombinant oncolytic vaccinia virus is set forth in SEQ ID NO: 86.

[0023] In some of any embodiments, the recombinant oncolytic vaccinia virus further comprises a heterologous nucleic acid encoding one or more T cell or NK cell evader proteins. In some embodiments, the one or more T cell or NK cell evader proteins comprises a set of proteins encoded by Cowpox virus ORFs 012, 203 and 018 (CPXV012-203-018). In some embodiments, the set of proteins encoded by CPXV012-203-018 comprises: (i) the amino acid sequence set forth in SEQ ID NO: 20 (CPXV012) or an amino acid sequence that has at least 85%, 90%, 91%, 92%, 93%, 94%, 95%, 96%, 97%, 98%, or 99% sequence identity to the amino acid sequence set forth in SEQ ID NO: 20, (ii) the amino acid sequence set forth in SEQ ID NO: 21 (CPXV0203) or an amino acid sequence that has at least 85%, 90%, 91%, 92%, 93%, 94%, 95%, 96%, 97%, 98%, or 99% sequence identity to the amino acid sequence set forth in SEQ ID NO: 21, and (iii) the amino acid sequence set forth in SEQ ID NO: 22 (CPXV018) or an amino acid sequence that has at least 85%, 90%, 91%, 92%, 93%, 94%, 95%, 96%, 97%, 98%, or 99% sequence identity to the amino acid sequence set forth in SEQ ID NO: 22.

[0024] In some of any embodiments, the recombinant oncolytic vaccinia virus further comprises a heterologous nucleic acid encoding a complement inhibitor. In some embodiments, the complement inhibitor is Borrelia burgdorferi complement regulatory-acquiring surface protein-2 (CRASP-2). In some embodiments, the heterologous nucleic acid encoding CRASP-2 is fused with a viral membrane gene, optionally F14.5L, to produce a fusion gene encoding a fusion protein. In some of any embodiments, the fusion protein comprises the CRASP-2 fused to a viral membrane protein encoded by the viral membrane gene. In some of any embodiments, the viral membrane protein is F14.5L. In some embodiments, the fusion is at the C-terminus of F14.5L.

[0025] In some of any embodiments, the nucleic acid genome of the recombinant oncolytic vaccinia virus comprises the nucleic acid sequence of SEQ ID NO: 90, or a nucleic acid sequence that has at least 95%, 96%, 97%, 98%, or 99% sequence identity to the nucleic acid sequence set forth in SEQ ID NO: In some embodiments, the nucleic acid genome of the recombinant oncolytic vaccinia virus is set forth in SEQ ID NO: 90.

[0026] In some of any embodiments, the heterologous nucleic acid encoding IRF3 is inserted into or in place of the B2R (viral cGAMP-specific nuclease) gene locus in the genome of the virus; and the at least one heterologous nucleic acid encoding one or more cytokine and/or chemokine comprises a heterologous nucleic acid encoding IL-2, wherein the IL-2 is an IL-2 superkine that is MDNA11T.

[0027] In some of any embodiments, the recombinant oncolytic vaccinia virus further comprises a heterologous nucleic acid encoding an immune stimulating protein, and/or a heterologous nucleic acid encoding one or more anti-angiogenic protein. In some embodiments, the immune stimulating protein is recombinant LIGHT. In some embodiments, the recombinant LIGHT comprises the amino acid sequence set forth in SEQ ID NO: 30, or an amino acid sequence that has at least 85%, 90%, 91%, 92%, 93%, 94%, 95%, 96%, 97%, 98%, or 99% sequence identity to the amino acid sequence set forth in SEQ ID NO:30. In some embodiments, the recombinant LIGHT has the sequence set forth in SEQ ID NO:30.

[0028] In some of any embodiments, the one or more anti-angiogenic protein comprises a VEGF inhibitor, an angiopoietin inhibitor, versikine, or a fusion protein of any two or more of the foregoing. In some of any embodiments, the one or more anti-angiogenic protein comprises an anti-VEGF antibody and/or an anti-Ang2 antibody. In some of any embodiments, the one or more anti-angiogenic protein is a bispecific anti-VEGF/anti-Ang2 antibody. In some embodiments, the bispecific anti-VEGF/anti-Ang2 antibody comprises the amino acid sequence set forth in SEQ ID NO: 23, or an amino acid sequence that has at least 85%, 90%, 91%, 92%, 93%, 94%, 95%, 96%, 97%, 98%, or 99% sequence identity to the sequence set forth in SEQ ID NO:23. In some embodiments, the bispecific anti-VEGF/anti-Ang2 antibody has the sequence set forth in SEQ ID NO:23.

[0029] In some of any embodiments, the nucleic acid genome of the recombinant oncolytic vaccinia virus comprises the nucleic acid sequence of SEQ ID NO: 88, or a nucleic acid sequence that has at least 95%, 96%, 97%, 98%, or 99% sequence identity to the nucleic acid sequence set forth in SEQ ID NO: 88. In some embodiments, the nucleic acid genome of the recombinant oncolytic vaccinia virus is set forth in SEQ ID NO: 88.

[0030] In some of any embodiments, one or more of the heterologous nucleic acid encoding any of the above heterologous gene products (e.g., IRF3, cytokine, chemokine or other heterologous gene product) is operably linked to a promoter. In some embodiments each of the one or more heterologous nucleic acid encoding a heterologous gene product is operably linked to a promoter. In some embodiments, the promoter is selected from the group consisting of 7.5E, 7.5E/L, SSE, 11KL, SSL, SSEL, mH5, and LEO. In some of any embodiments, each heterologous nucleic acid encoding a heterologous gene product is independently operably linked to a promoter, optionally wherein each heterologous nucleic acid encoding a heterologous gene product is independently operably linked to a promoter selected from the group consisting of 7.5E, 7.5E/L, SSE, 11KL, SSL, SSEL, mH5, and LEO. In some of any embodiments, the promoter is a poxviral promoter or is a variant or derivative thereof. In some of any embodiments, the promoter is a vaccinia virus promoter. In some of any embodiments, the promoter is selected from the group consisting of 7.5E, 7.5E/L, SSE, 11KL, SSL, SSEL, mH5, and LEO. In some of any embodiments, the promoter has the sequence of amino acids set forth in any one of SEQ ID NOS: 29, 53, 55, 68, 69, 70, 71, or 72. In some of any embodiments, the promoter is synthetic strong early promoter (SSE). In some of any embodiments, the promoter comprises the sequence set forth in SEQ ID NO:29. In some of any embodiments, the promoter is a strong early/late promoter (SEL). In some of any embodiments, the promoter comprises the sequence set forth in SEQ ID NO:55. In some of any embodiments, the promoter is mH5. In some of any embodiments, the mH5 promoter comprises the sequence set forth in SEQ ID NO: 53.

[0031] Also provided herein is a recombinant oncolytic virus, comprising: an inactivating mutation of at least one viral gene; and at least one heterologous nucleic acid encoding one or more heterologous gene product, wherein the one or more heterologous gene product is or comprises an immune modulating protein, a complement inhibitor, a T cell or NK cell evader, an anti-angiogenic protein, an interferon regulatory factor, or an apoptosis inducible protein, or a combination of any of the foregoing.

[0032] In some of any embodiments, the oncolytic virus is a vaccinia virus, a herpes simplex virus, vesicular stomatitis virus (VSV), a Maraba virus (MARAV), a measles virus (MV), adenovirus, myxoma virus, orf virus, parvovirus, raccoonpox virus, coxsackievirus, reovirus, Newcastle disease virus, Seneca valley virus, Semliki Forest virus, mumps virus, influenza virus, echovirus, and a poliovirus (PV).

[0033] In some of any embodiments, the oncolytic virus is a vaccinia virus. In some of any embodiments, the nucleic acid genome of the recombinant oncolytic vaccinia virus is modified from a parental vaccinia virus that has a nucleic acid genome that has at least 99% sequence identity to the nucleic acid sequence set forth in SEQ ID NO: 1. In some of any embodiments, the nucleic acid genome of the recombinant oncolytic vaccinia virus is modified from a parental vaccinia virus that has a nucleic acid genome that has the nucleic acid genome set forth in SEQ ID NO:1.

[0034] Also provided herein is a recombinant oncolytic virus, comprising at least one heterologous nucleic acid encoding one or more heterologous gene product, wherein the one or more heterologous gene product is or comprises a complement inhibitor, a T cell or NK cell evader, an immune modulating protein, an anti-angiogenic protein, an interferon regulatory factor, an apoptosis inducible protein, or a combination of any of the foregoing.

[0035] Also provided herein is a recombinant oncolytic virus, comprising: a nucleic acid genome that is modified from a parental vaccinia virus genome that has at least 99% sequence identity with the nucleic acid sequence set forth in SEQ ID NO: 1; and comprises at least one heterologous nucleic acid encoding one or more heterologous gene product inserted in the genome. Also provided herein is a recombinant oncolytic virus, comprising: a nucleic acid genome that is modified from a parental vaccinia virus genome that has the nucleic acid sequence set forth in SEQ ID NO: 1; and comprises at least one heterologous nucleic acid encoding one or more heterologous gene product inserted in the genome.

[0036] In some of any embodiments, the nucleic acid genome of the parental vaccinia virus is characterized by one or more of: (i) a variant 017 open reading frame (ORF) encoding an amino acid sequence that has at least 95% sequence identity to SEQ ID NO: 57 and comprises a polar uncharged amino acid at position 66, optionally a threonine (T) at position 66; (ii) a variant 038 (K5L) ORF comprising a nucleotide insertion to effect a frame shift mutation, wherein the 038 (K5L) gene product is altered; (iii) a variant 059 (E2L) ORF encoding an amino acid sequence that is at least 95% sequence identity to SEQ ID NO:60 and comprises a hydrophobic amino acid other than leucine at position 419, optionally a phenylalanine (F) at position 419; (iv) a variant 104 (H4L) ORF encoding an amino acid sequence having at least 95% sequence identity to SEQ ID NO:61 and comprises a negatively charged amino acid at position 591, optionally aspartic acid (D) at position 591; and (v) a variant 182 (A56R) ORF comprising deletion of two nucleotides to effect a frameshift mutation, wherein the 182 (A56R) ORF gene product is altered.

[0037] In some of any embodiments, the parental vaccinia virus genome is characterized by one or more of: (i) a guanine (G) at the position corresponding to position 7770 of SEQ ID NO: 1; (ii) a thymine (T) at the position corresponding to position 15261 of SEQ ID NO: 1; (iii) a G at the position corresponding to position 32136 of SEQ ID NO: 1; (iv) a G at the position corresponding to position 49455 of SEQ ID NO: 1; (v) a cytosine© at the position corresponding to position 92969 of SEQ ID NO: 1; (vi) the nucleic acid sequence CACTTATATAT at the positions corresponding to positions 106870 to 106880 of SEQ ID NO: 1; (vii) the nucleic acid sequence GTTTTCATTA at the positions corresponding to positions 111267 to 111276 of SEQ ID NO: 1; (viii) an adenine (A) at the position corresponding to position 162715 of SEQ ID NO: 1; (ix) the nucleic acid sequence TACAGACACC at the positions corresponding to positions 165844 to 185853 of SEQ ID NO: 1; and (x) a C at the position corresponding to position 187805 of SEQ ID NO: 1.

[0038] In some of any embodiments, the nucleic acid genome of the recombinant oncolytic vaccinia virus has at least 85%, 86%, 87%, 88%, 89%, 90%, 91%, 92%, 93%, 94%, 95%, 96%, 97%, 98%, or 99% sequence identity to the nucleic acid sequence set forth in SEQ ID NO: 1. In some of any embodiments, the nucleic acid genome of the recombinant oncolytic vaccinia virus has at least 95%, 96%, 97%, 98%, or 99% sequence identity to the nucleic acid sequence set forth in SEQ ID NO: 1. In some of any of embodiments, the nucleic acid genome of the recombinant oncolytic vaccinia virus has at least 95% sequence identity to the nucleic acid sequence set forth in SEQ ID NO: 1. In some of any embodiments, the nucleic acid genome of the recombinant oncolytic vaccinia virus has at least 96% sequence identity to the nucleic acid sequence set forth in SEQ ID NO: 1. In some of any embodiments, the nucleic acid genome of the recombinant oncolytic vaccinia virus has at least 97% sequence identity to the nucleic acid sequence set forth in SEQ ID NO: 1. In some of any embodiments, the nucleic acid genome of the recombinant oncolytic vaccinia virus has at least 98% sequence identity to the nucleic acid sequence set forth in SEQ ID NO: 1. In some of any embodiments, the nucleic acid genome of the recombinant oncolytic vaccinia virus has at least 99% sequence identity to the nucleic acid sequence set forth in SEQ ID NO: 1.

[0039] In some of any embodiments, the recombinant oncolytic virus is a recombinant oncolytic vaccinia virus, and wherein the nucleic acid genome of the recombinant oncolytic vaccinia virus is characterized by one or more of: (i) a variant 017 open reading frame (ORF) encoding an amino acid sequence that has at least 95% sequence identity to SEQ ID NO: 57 and comprises a polar uncharged amino acid at position 66, optionally a threonine (T) at position 66; (ii) a variant 038 (K5L) ORF comprising a nucleotide insertion to effect a frame shift mutation, wherein the 038 (K5L) gene product is altered; (iii) a variant 059 (E2L) ORF encoding an amino acid sequence that is at least 95% sequence identity to SEQ ID NO:60 and comprises a hydrophobic amino acid other than leucine at position 419, optionally a phenylalanine (F) at position 419; (iv) a variant 104 (H4L) ORF encoding an amino acid sequence having at least 95% sequence identity to SEQ ID NO:61 and comprises a negatively charged amino acid at position 591, optionally aspartic acid (D) at position 591; and (v) a variant 182 (A56R) ORF comprising deletion of two nucleotides to effect a frame shift mutation, wherein the 182 (A56R) ORF gene product is altered.

[0040] In some of any embodiments, the recombinant oncolytic virus is a recombinant oncolytic vaccinia virus, and wherein the nucleic acid genome of the recombinant oncolytic vaccinia virus is characterized by one or more of: (i) a guanine (G) at the position corresponding to position 7770 of SEQ ID NO: 1; (ii) a thymine (T) at the position corresponding to position 15261 of SEQ ID NO: 1; (iii) a G at the position corresponding to position 32136 of SEQ ID NO: 1; (iv) a G at the position corresponding to position 49455 of SEQ ID NO: 1; (v) a cytosine (C) at the position corresponding to position 92969 of SEQ ID NO: 1; (vi) the nucleic acid sequence CACTTATATAT at the positions corresponding to positions 106870 to 106880 of SEQ ID NO: 1; (vii) the nucleic acid sequence GTTTTCATTA at the positions corresponding to positions 111267 to 111276 of SEQ ID NO: 1; (viii) an adenine (A) at the position corresponding to position 162715 of SEQ ID NO: 1; (ix) the nucleic acid sequence TACAGACACC at the positions corresponding to positions 165844 to 185853 of SEQ ID NO: 1; and (x) a C at the position corresponding to position 187805 of SEQ ID NO: 1.

[0041] In some of any embodiments, at least one of the at least one heterologous nucleic acid encoding the one or more heterologous gene product is inserted into a non-essential gene or region in the genome of the virus. In some of any such embodiments, the insertion is in place of a deletion of all or a portion of the gene or region.

[0042] In some of any embodiments, at least one of the at least one heterologous nucleic acid encoding the one or more heterologous gene product is inserted into the hemagglutinin (HA), J2R (thymidine kinase), F14.5L, A56R (hemagglutinin), B2R, vaccinia growth factor (VGF), A35R, A49R, A55R, B14R, C4L, C6L, C16L, NIL/N2L, E2L/E3L, K1L/K2L, K7L, superoxide dismutase locus, 7.5K, C2L-F3L, C4L-F1L, C7-K1L, B13R+B14R, A26L, or I4L gene loci in the genome of the virus. In some of any embodiments, each of the at least one heterologous nucleic acid encoding the one or more heterologous gene product that is inserted into a non-essential gene or region in the genome of the virus is each independently inserted into the hemagglutinin (HA), J2R (thymidine kinase), F14.5L, A56R (hemagglutinin), B2R, vaccinia growth factor (VGF), A35R, A49R, A55R, B14R, C4L, C6L, C16L, NIL/N2L, E2L/E3L, K1L/K2L, K7L, superoxide dismutase locus, 7.5K, C2L-F3L, C4L-F1L, C7-K1L, B13R+B14R, A26L, or I4L gene loci in the genome of the virus. In some of any embodiments, the at least one viral gene comprises one or more viral genes selected from the group consisting of hemagglutinin (HA), J2R (thymidine kinase), F14.5L, A56R (hemagglutinin), B2R, vaccinia growth factor (VGF), A35R, A49R, A55R, B14R, C4L, C6L, C16L, NIL/N2L, E2L/E3L, K1L/K2L, K7L, superoxide dismutase locus, 7.5K, C2L-F3L, C4L-F1L, C7-K1L, B13R+B14R, A26L, and I4L, and any combination thereof. In some of any such embodiments, the insertion is in place of a deletion of all or a portion of the respective gene loci.

[0043] In some of any embodiments, the at least one viral gene loci into which at least one of the at least one heterologous nucleic acid is inserted is or comprises: (i) B2R; (ii) A35R; (iii) A35R and J2R; (iv) J2R; (v) B2R and J2R; (vi) A35R, B2R, and J2R; (vii) B2R, J2R, and A56R; or (viii) A35R, B2R, J2R, and A56R.

[0044] In some of any embodiments, the inactivating mutation of one or more of the at least one viral gene is, independently, by: insertion of at least one of the at least one heterologous nucleic acid encoding one or more heterologous gene product; a deletion of all or a portion of the at least one viral gene; and/or one or more nucleic acid substitutions in the at least one viral gene. In some of any embodiments, the inactivating mutation of one or more of the at least one viral gene is by insertion of at least one of the at least one heterologous nucleic acid encoding one or more heterologous gene product and a deletion of all or a portion of the at least one viral gene, in which the insertion is in place of the deletion of all or a portion of the viral gene.

[0045] In some of any embodiments, the inactivating mutation is a deletion of all or a portion of the at least one viral gene. In some of any embodiments: the deletion of the at least one viral gene is deletion of the entire gene ORF of a viral gene. In some of any embodiments: the deletion is sufficient to render the encoded viral gene product non-functional. In some of any embodiments, the inactivating mutation of one or more of the at least one viral gene is characterized by insertion of at least one of the at least one heterologous nucleic acid encoding one or more heterologous gene product into the viral gene loci. In some of any embodiments, the at least one viral gene comprises B2R. In some of any embodiments, the at least one viral gene comprises J2R. In some of any embodiments, the at least one viral gene comprises A35R. In some of any embodiments, the at least one viral gene comprises A56R. In some of any embodiments, the at least one viral gene comprises B2R, J2R, and A35R. In some of any embodiments, the at least one viral gene comprises B2R, J2R, A35R, and A56R. In some of any embodiments, the at least one viral gene comprises B2R, J2R, and A56R.

[0046] In some of any embodiments: at least one heterologous nucleic acid encoding the one or more heterologous gene product is inserted into or in place of F14.5L; and/or at least one heterologous nucleic acid encoding the one or more heterologous gene product is inserted into or in place of A35R; and/or at least one heterologous nucleic acid encoding the one or more heterologous gene product is inserted into or in place of J2R.

[0047] In some of any embodiments, the at least one heterologous nucleic acid encoding one or more heterologous gene product comprises one or more heterologous nucleic acid each encoding one or more immune modulating proteins. In some of any embodiments, the inactivating mutation of one or more of the at least one viral gene is by insertion of one or more heterologous nucleic acid each encoding one or more immune modulating proteins. In some of any embodiments, the one or more immune modulating proteins comprises one or more immune stimulating proteins. In some of any embodiments, the one or more immune modulating proteins comprises one or more cytokines and/or chemokines. In some of any embodiments, the one or more immune modulating proteins comprises one or more interferon regulatory factors. In some embodiments, the interferon regulatory factor is IRF3. In some of any embodiments, the one or more interferon regulatory factors is or comprises interferon regulatory factor 3 (IRF3). In some of any embodiments, the one or more immune modulating proteins comprises interferon regulatory factor 3 (IRF3) and one or more cytokines and/or chemokines.

[0048] In some of any embodiments, the one or more immune modulating proteins comprises one or more immune modulating proteins selected from the group consisting of LIGHT, IRF3, IL-2, IL-12, and CXCL9. In some of any embodiments: the CXCL9 is human CXCL9. In some of any embodiments: the CXCL9 is human CXCL9 and comprises the amino acid sequence set forth in SEQ ID NO: 99, or an amino acid sequence that has at least 95%, 96%, 97%, 98%, or 99% sequence identity to the amino acid sequence of SEQ ID NO: 99. In some of any embodiments, the CXCL9 is mouse CXCL9. In some of any embodiments, the CXCL9 is mouse CXCL9 and comprises the amino acid sequence set forth in SEQ ID NO: 106, or an amino acid sequence that has at least 95%, 96%, 97%, 98%, or 99% sequence identity to the amino acid sequence of SEQ ID NO: 106.

[0049] In some of any embodiments: the IL-12 is a human single-chain IL-12. In some of any embodiments: the IL-12 is a human single-chain IL-12 and comprises the amino acid sequence set forth in SEQ ID NO: 103, or an amino acid sequence that has at least 95%, 96%, 97%, 98%, or 99% sequence identity to the amino acid sequence of SEQ ID NO: 103. In some of any embodiments, the IL-12 is a mouse single-chain IL-12. In some of any embodiments, the IL-12 is a mouse single-chain IL-12 and comprises the amino acid sequence set forth in SEQ ID NO: 102, or an amino acid sequence that has at least 95%, 96%, 97%, 98%, or 99% sequence identity to the amino acid sequence of SEQ ID NO: 102.

[0050] In some of any embodiments, the one or more immune modulating proteins comprises IRF3. In some of any embodiments, the IRF3 is a human IRF3 (hIRF3). In some of any embodiments, the hIRF3 comprises the amino acid sequence set forth in SEQ ID NO: 51, or an amino acid sequence that has at least 95%, 96%, 97%, 98%, or 99% sequence identity to the amino acid sequence set forth in SEQ ID NO: 51. In some of any embodiments, the IRF3 is a mouse IRF3 (mIRF3). In some of any embodiments, the mIRF3 comprises the amino acid sequence set forth in SEQ ID NO: 52, or an amino acid sequence that has at least 95%, 96%, 97%, 98%, or 99% sequence identity to the amino acid sequence set forth in SEQ ID NO: 52.

[0051] In some of any embodiments, the nucleic acid genome of the recombinant oncolytic virus comprises the nucleic acid sequence set forth in any one of SEQ ID NOs: 49, 50, 80, 82, and 84-93, or a nucleic acid sequence that has at least 95%, 96%, 97%, 98%, or 99% sequence identity to the nucleic acid sequence set forth in any one of SEQ ID NOs: 49, 50, 80, 82, and 84-93.

[0052] In some of any embodiments, the one or more immune modulating proteins comprises IRF3 and one or more immune modulating proteins selected from the group consisting of LIGHT, IL-2, IL-12, and CXCL9. In some of any embodiments, the one or more immune modulating proteins comprises IL-2. In some of any embodiments, the one or more immune modulating proteins comprises IL-12. In some of any embodiments, the one or more immune modulating proteins comprises LIGHT. In some of any embodiments, the one or more immune modulating proteins comprises CXCL9. In some of any embodiments, the one or more immune modulating proteins is or comprises: (i) IRF3; (ii) LIGHT; (iii) IRF3 and LIGHT; (iv) IRF3 and IL-2; (v) IRF3, CXCL9, and IL-12; (vi) IRF3, LIGHT, and IL-2; (vii) IRF3 and CXCL9; or (viii) IRF3, CXCL9, and IL-2.

[0053] In some of any embodiments, the IL-2 is a human IL-2. In some of any embodiments, the IL-2 is an IL-2 superkine. In some of any embodiments, the IL-2 superkine is H9, H9T, MDNA11, or MDNA11T. In some of any embodiments: the H9 IL-2 superkine comprises the amino acid sequence of SEQ ID NO: 100, or comprises an amino acid sequence that has at least 95%, 96%, 97%, 98%, or 99% sequence identity to the amino acid sequence of SEQ ID NO: 100. In some of any embodiments, the H9T IL-2 superkine comprises the amino acid sequence of SEQ ID NO: 104, or comprises an amino acid sequence that has at least 95%, 96%, 97%, 98%, or 99% sequence identity to the amino acid sequence of SEQ ID NO: 104. In some of any embodiments, the MDNA11 IL-2 superkine comprises the amino acid sequence of SEQ ID NO: 101, or comprises an amino acid sequence that has at least 95%, 96%, 97%, 98%, or 99% sequence identity to the amino acid sequence of SEQ ID NO: 101. In some of any embodiments, the MDNA11T IL-2 superkine comprises the amino acid sequence of SEQ ID NO: 98, or comprises an amino acid sequence that has at least 95%, 96%, 97%, 98%, or 99% sequence identity to the amino acid sequence of SEQ ID NO: 98. In some of any embodiments, the IL-2 superkine is MDNA11 or MDNA11T. In some of any embodiments, the IL-2 superkine is MDNA11T, and the MDNA11T comprises the amino acid sequence set forth in SEQ ID NO: 98, or an amino acid sequence that has at least 95%, 96%, 97%, 98%, or 99% sequence identity to the amino acid sequence set forth in SEQ ID NO: 98.

[0054] In some of any embodiments, the LIGHT is recombinant LIGHT. In some embodiments, the recombinant LIGHT is a human LIGHT protein or is a mutant thereof. In some of any embodiments, the recombinant LIGHT comprises an amino acid sequence that has at least 95%, 96%, 97%, 98%, or 99% sequence identity to the amino acid sequence set forth in SEQ ID NO: 30. In some of any embodiments, the recombinant LIGHT is human LIGHT mutant (hmLIGHT) that is a human LIGHT mutant that binds human and mouse LTβR and HVEM. In some of any embodiments, the recombinant LIGHT comprises one or more mutations selected from the group consisting of a threonine at position 138, a glycine at position 160, a glycine at position 221, and a lysine at position 222. In some of any embodiments, the recombinant LIGHT comprises the amino acid sequence set forth in SEQ ID NO: 25, or an amino acid sequence that has at least 95%, 96%, 97%, 98%, or 99% sequence identity to the amino acid sequence set forth in SEQ ID NO: 25. In some of any embodiments, the recombinant LIGHT comprises the sequence set forth in SEQ ID NO: 25.

[0055] In some of any embodiments, the nucleic acid genome of the recombinant oncolytic virus comprises the nucleic acid sequence set forth in any one of SEQ ID NOs: 11, 82, 87, and 88, or a nucleic acid sequence that has at least 95%, 96%, 97%, 98%, or 99% sequence identity to the nucleic acid sequence set forth in any one of SEQ ID NOs: 11, 82, 87, and 88.

[0056] In some of any embodiments, the IL-12 is a human IL-12. In some embodiments, the human IL-12 is a human single chain IL-12 (hscIL-12). In some embodiments, the hscIL-12 comprises the amino acid sequence set forth in SEQ ID NO: 103, or an amino acid sequence that has at least 95%, 96%, 97%, 98%, or 99% sequence identity to the amino acid sequence set forth in SEQ ID NO: 103.

[0057] In some of any embodiments, the CXCL9 is a human CXCL9. In some embodiments, the human CXCL9 comprises the amino acid sequence set forth in SEQ ID NO: 99, or an amino acid sequence that has at least 95%, 96%, 97%, 98%, or 99% sequence identity to the amino acid sequence set forth in SEQ ID NO: 99.

[0058] In some of any embodiments, the at least one heterologous nucleic acid encoding one or more heterologous gene product comprises one or more heterologous nucleic acid each encoding an apoptosis-inducible protein. In some of any embodiments, the inactivating mutation of one or more of the at least one viral gene is by insertion of one or more heterologous nucleic acid each encoding an apoptosis-inducible protein. In some of any embodiments, the apoptosis-inducible protein comprises a proapoptotic molecule fused with an FKBP variant that is able to bind a chemical inducer of dimerization (CID). In some of any embodiments, the FKBP variant is FKBP-F36V. In some embodiments, the FKBP-F36V comprises the amino acid sequence set forth in SEQ ID NO: 56 or an amino acid sequence that has at least 95%, 96%, 97%, 98%, or 99% sequence identity to the amino acid sequence set forth in SEQ ID NO: 56.

[0059] In some of any embodiments, the chemical inducer of dimerization is AP1903 (Rimiducid). In some embodiments, the proapoptotic molecule is or comprises Fas, the death effector domain (DED) of the Fas-associated death domain-containing protein (FADD), or a caspase, optionally wherein the caspase is caspase 9. In some of any embodiments, the apoptosis-inducible protein is an inducible DED (iDED). In some of any embodiments, the iDED comprises the amino acid sequence set forth in SEQ ID NO: 27 or an amino acid sequence that has at least 95%, 96%, 97%, 98%, or 99% sequence identity to the amino acid sequence set forth in SEQ ID NO: 27. In some of any embodiments, the nucleic acid genome of the recombinant oncolytic virus comprises the nucleic acid sequence set forth in SEQ ID NO: 8 or 86, or a nucleic acid sequence that has at least 95%, 96%, 97%, 98%, or 99% sequence identity to the nucleic acid sequence set forth in SEQ ID NO: 8 or 86.

[0060] In some of any embodiments, the apoptosis-inducible protein is an inducible Fas (iFas). In some of any embodiments, the iFas comprises the amino acid sequence set forth in SEQ ID NO: 28 or an amino acid sequence that has at least 95%, 96%, 97%, 98%, or 99% sequence identity to the amino acid sequence set forth in SEQ ID NO: 28. In some of any embodiments, the nucleic acid genome of the recombinant oncolytic virus comprises the nucleic acid sequence set forth in SEQ ID NO: 9, or a nucleic acid sequence that has at least 95%, 96%, 97%, 98%, or 99% sequence identity to the nucleic acid sequence set forth in SEQ ID NO: 9.

[0061] In some of any embodiments, the apoptosis-inducible protein is an inducible caspase 9 (iCas9). In some of any embodiments, the iCas9 comprises the amino acid sequence set forth in SEQ ID NO: 26 or an amino acid sequence that has at least 95%, 96%, 97%, 98%, or 99% sequence identity to the amino acid sequence set forth in SEQ ID NO: 26. In some of any embodiments, the nucleic acid genome of the recombinant oncolytic virus comprises the nucleic acid sequence set forth in SEQ ID NO: 7, or a nucleic acid sequence that has at least 95%, 96%, 97%, 98%, or 99% sequence identity to the nucleic acid sequence set forth in SEQ ID NO: 7.

[0062] In some of any embodiments, the at least one heterologous nucleic acid encoding one or more heterologous gene product comprises one or more heterologous nucleic acid each encoding one or more T cell or NK cell evader proteins. In some of any embodiments, the inactivating mutation of one or more of the at least one viral gene is by insertion of one or more heterologous nucleic acid each encoding one or more T cell or NK cell evader proteins.

[0063] In some of any embodiments, the one or more T cell or NK cell evader proteins comprises a set of proteins encoded by Cowpox virus ORFs 012, 203 and 018 (CPXV012-203-018). In some of any embodiments, the one or more T cell or NK cell evader proteins comprises a set of proteins that is or comprises the CPXV012, CPXV203, and CPXV018 proteins. In some of any embodiments, the set of proteins encoded by CPXV012-203-018 comprises: (i) the amino acid sequence set forth in SEQ ID NO: (CPXV012) or an amino acid sequence that has at least 85%, 90%, 91%, 92%, 93%, 94%, 95%, 96%, 97%, 98%, or 99% sequence identity to the amino acid sequence set forth in SEQ ID NO: 20, (ii) the amino acid sequence set forth in SEQ ID NO: 21 (CPXV0203) or an amino acid sequence that has at least 85%, 90%, 91%, 92%, 93%, 94%, 95%, 96%, 97%, 98%, or 99% sequence identity to the amino acid sequence set forth in SEQ ID NO: 21, and (iii) the amino acid sequence set forth in SEQ ID NO: 22 (CPXV018) or an amino acid sequence that has at least 85%, 90%, 91%, 92%, 93%, 94%, 95%, 96%, 97%, 98%, or 99% sequence identity to the amino acid sequence set forth in SEQ ID NO: 22. In some of any embodiments, the set of proteins encoded by CPXV012-203-018 comprises the amino acid sequences set forth in SEQ ID NO:20, SEQ ID NO:21, and SEQ ID NO:22. In some of any embodiments, the nucleic acid genome of the recombinant oncolytic virus comprises the nucleic acid sequence set forth in any one of SEQ ID NOs: 10, 89, and 90, or a nucleic acid sequence that has at least 95%, 96%, 97%, 98%, or 99% sequence identity to the nucleic acid sequence set forth in any one of SEQ ID NOs: 10, 89, and 90.

[0064] In some of any embodiments, the at least one heterologous nucleic acid encoding one or more heterologous gene product comprises one or more heterologous nucleic acid each encoding one or more complement inhibitor. In some of any embodiments, the inactivating mutation of one or more of the at least one viral gene is by insertion of one or more heterologous nucleic acid each encoding one or more complement inhibitor.

[0065] In some of any embodiments, the one or more complement inhibitor is Borrelia burgdorferi complement regulatory-acquiring surface protein-2 (CRASP-2) and/or minimized complement regulator factor H (miniFH). In some of any embodiments, the one or more complement inhibitor is or comprises CRASP-2. In some of any embodiments, the CRASP-2 comprises the amino acid sequence set forth in SEQ ID NO: 18 or has an amino acid sequence that has at least 95%, 96%, 97%, 98%, or 99% sequence identity to the amino acid sequence set forth in SEQ ID NO:18. In some of any embodiments, the one or more complement inhibitor is or comprises miniFH In some of any embodiments, the miniFH comprises the amino acid sequence set forth in SEQ ID NO: 19 or has an amino acid sequence that has at least 95%, 96%, 97%, 98%, or 99% sequence identity to the amino acid sequence set forth in SEQ ID NO:19.

[0066] In some of any embodiments, the one or more heterologous nucleic acid encoding the one or more complement inhibitor is introduced into a viral membrane gene, optionally F14.5L, to produce a fusion gene encoding a fusion protein. In some embodiments, the fusion protein comprises the complement inhibitor fused to a viral membrane protein encoded by the viral membrane gene. In some of any embodiments, the viral membrane gene is F14.5L, optionally wherein the fusion is at the C-terminus of the F14.5L protein. In some of any embodiments, the fusion protein is incorporated into the outer membrane of the intracellular mature virus (IMV). In some of any embodiments, the nucleic acid genome of the recombinant oncolytic virus comprises the nucleic acid sequence set forth in SEQ ID NO: 5, or a nucleic acid sequence that has at least 95%, 96%, 97%, 98%, or 99% sequence identity to the nucleic acid sequence set forth in SEQ ID NO: 5. In some of any embodiments, the nucleic acid genome of the recombinant oncolytic virus comprises the nucleic acid genome of the recombinant oncolytic virus comprises the nucleic acid sequence set forth in SEQ ID NO: 6, or a nucleic acid sequence that has at least 95%, 96%, 97%, 98%, or 99% sequence identity to the nucleic acid sequence set forth in SEQ ID NO: 6. In some of any embodiments, the nucleic acid genome of the recombinant oncolytic virus comprises the nucleic acid genome of the recombinant oncolytic virus comprises the nucleic acid sequence set forth in SEQ ID NO: 89, or a nucleic acid sequence that has at least 95%, 96%, 97%, 98%, or 99% sequence identity to the nucleic acid sequence set forth in SEQ ID NO: 89. In some of any embodiments, the nucleic acid genome of the recombinant oncolytic virus comprises the nucleic acid genome of the recombinant oncolytic virus comprises the nucleic acid sequence set forth in SEQ ID NO: 90, or a nucleic acid sequence that has at least 95%, 96%, 97%, 98%, or 99% sequence identity to the nucleic acid sequence set forth in SEQ ID NO: 90.

[0067] In some of any embodiments, the at least one heterologous nucleic acid encoding one or more heterologous gene product comprises one or more heterologous nucleic acid each encoding one or more anti-angiogenic protein. In some of any embodiments, the inactivating mutation of one or more of the at least one viral gene is by insertion of one or more heterologous nucleic acid each encoding one or more anti-angiogenic protein. In some of any embodiments, the one or more anti-angiogenic protein is a VEGF inhibitor, an angiopoietin inhibitor, versikine, or a fusion protein of any two or more of the foregoing. In some of any embodiments, the one or more anti-angiogenic protein comprises a VEGF inhibitor and/or an angiopoietin inhibitor, optionally an inhibitor of Ang2. In some of any embodiments, the one or more anti-angiogenic protein comprises an anti-VEGF antibody and/or an anti-Ang2 antibody. In some of any embodiments, the VEGF inhibitor is an anti-VEGF antibody, optionally an anti-VEGF-single chain antibody (scAb). In some of any embodiments, the angiopoietin inhibitor is an anti-Angriopoietin-2 (Ang2) antibody, optionally an anti-Ang2 single chain antibody (scAb). In some of any embodiments, the one or more anti-angiogenic protein is a bispecific anti-VEGF/anti-Ang2 antibody. In some of any embodiments, the bispecific anti-VEGF/anti-Ang2 antibody comprises the amino acid sequence set forth in SEQ ID NO: 23, or an amino acid sequence that has at least 85%, 90%, 91%, 92%, 93%, 94%, 95%, 96%, 97%, 98%, or 99% sequence identity to the sequence set forth in SEQ ID NO:23. In some of any embodiments, the one or more anti-angiogenic protein comprises versikine. In some of any embodiments, the versikine comprises the amino acid sequence set forth in SEQ ID NO: 24, or comprises an amino acid sequence that has at least 85%, 90%, 91%, 92%, 93%, 94%, 95%, 96%, 97%, 98%, or 99% sequence identity to the sequence set forth in SEQ ID NO: 24. In some of any embodiments, the nucleic acid genome of the recombinant oncolytic virus comprises the nucleic acid sequence set forth in any one of SEQ ID NOs: 13, 47, 82, 87, and 88, or a nucleic acid sequence that has at least 95%, 96%, 97%, 98%, or 99% sequence identity to the nucleic acid sequence set forth in any one of SEQ ID NOs: 13, 47, 82, 87, and 88.

[0068] In some of any embodiments, the at least one heterologous nucleic acid encoding one or more heterologous gene product comprises one or more heterologous nucleic acid each encoding one or more therapeutic agent or diagnostic agent. In some of any embodiments, the inactivating mutation of one or more of the at least one viral gene is by insertion of one or more heterologous nucleic acid each encoding one or more one or more therapeutic agent or diagnostic agent.

[0069] In some of any embodiments, the one or more therapeutic agent or diagnostic agent are selected from among an anticancer agent, an antimetastatic agent, an antiangiogenic agent, an immunomodulatory molecule, an antigen, a cell matrix degradative gene, genes for tissue regeneration and reprogramming human somatic cells to pluripotency, enzymes that modify a substrate to produce a detectable product or signal or are detectable by antibodies, proteins that can bind a contrasting agent, genes for optical imaging or detection, genes for PET imaging and genes for MRI imaging. In some of any embodiments, the one or more therapeutic agent or diagnostic agent comprises a therapeutic agent selected from among a hormone, a growth factor, cytokine, a chemokine, a costimulatory molecule, ribozymes, a transporter protein, a single chain antibody, an antisense RNA, a prodrug converting enzyme, an siRNA, a microRNA, a toxin, an antitumor oligopeptide, a mitosis inhibitor protein, an antimitotic oligopeptide, an anti-cancer polypeptide antibiotic, an angiogenesis inhibitor, a tumor suppressor, a cytotoxic protein, a cytostatic protein and a tissue factor.

[0070] In some of any embodiments: the at least one viral gene is or comprises A35R, optionally wherein the nucleic acid genome of the recombinant oncolytic virus comprises the nucleic acid sequence of SEQ ID NO: 3, or a nucleic acid sequence that has at least 95%, 96%, 97%, 98%, or 99% sequence identity to the nucleic acid sequence set forth in SEQ ID NO: 3.

[0071] In some of any embodiments: the at least one viral gene is or comprises A35R and J2R, optionally wherein the nucleic acid genome of the recombinant oncolytic virus comprises the nucleic acid sequence of SEQ ID NO: 12, or a nucleic acid sequence that has at least 95%, 96%, 97%, 98%, or 99% sequence identity to the nucleic acid sequence set forth in SEQ ID NO: 12.

[0072] In some of any embodiments: the at least one viral gene is or comprises J2R, and the inactivating mutation of J2R is by insertion of one or more heterologous nucleic acid each encoding one or more T cell or NK cell evader proteins, optionally wherein the one or more T cell or NK cell evader proteins comprises a set of proteins encoded by Cowpox virus ORFs 012, 203 and 018 (CPXV012-203-018), and wherein the at least one heterologous nucleic acid encoding one or more heterologous gene product comprises one or more heterologous nucleic acid each encoding one or more complement inhibitor that is introduced into a viral membrane gene to produce a fusion gene encoding a fusion protein. In some embodiments, the viral membrane gene is F14.5L. In some embodiments, the fusion is at the C-terminus of the F14.5L protein. In some embodiments, the nucleic acid genome of the recombinant oncolytic virus comprises the nucleic acid sequence of SEQ ID NO: 10, or a nucleic acid sequence that has at least 95%, 96%, 97%, 98%, or 99% sequence identity to the nucleic acid sequence set forth in SEQ ID NO: 10.

[0073] In some of any embodiments: the at least one viral gene is or comprises J2R. In some embodiments, the nucleic acid genome of the recombinant oncolytic virus comprises the nucleic acid sequence of SEQ ID NO: 4, or a nucleic acid sequence that has at least 95%, 96%, 97%, 98%, or 99% sequence identity to the nucleic acid sequence set forth in SEQ ID NO: 4.

[0074] In some of any embodiments: the at least one viral gene is or comprises J2R and A35R, and the inactivating mutation of A35R is by insertion of one or more heterologous nucleic acid each encoding one or more immune modulating proteins. In some embodiments, the one or more immune modulating proteins is selected from the group consisting of LIGHT, IRF3, IL-2, IL-12, and CXCL9. In some embodiments, the one or more immune modulating proteins is LIGHT. In some embodiments, the nucleic acid genome of the recombinant oncolytic virus comprises the nucleic acid sequence of SEQ ID NO: 11, or a nucleic acid sequence that has at least 95%, 96%, 97%, 98%, or 99% sequence identity to the nucleic acid sequence set forth in SEQ ID NO: 11.

[0075] In some of any embodiments: the at least one viral gene is or comprises J2R and A35R, and the inactivating mutation of J2R is by insertion of the one or more heterologous nucleic acid encoding one or more anti-angiogenic protein. In some embodiments, the one or more anti-angiogenic protein comprises an inhibitor or VEGF and/or an inhibitor of Ang2. In some embodiments, the one or more anti-angiogenic protein is a bispecific anti-VEGF/anti-Ang2 antibody. In some embodiments, the nucleic acid genome of the recombinant oncolytic virus comprises the nucleic acid sequence of SEQ ID NO: 13, or a nucleic acid sequence that has at least 95%, 96%, 97%, 98%, or 99% sequence identity to the nucleic acid sequence set forth in SEQ ID NO: 13.

[0076] In some of any embodiments: the at least one viral gene is or comprises J2R and A35R, and the inactivating mutation of A35R is by insertion of the one or more heterologous nucleic acid encoding one or more immune modulating proteins and the inactivating mutation of J2R is by insertion of the one or more heterologous nucleic acid encoding one or more anti-angiogenic protein. In some embodiments, the one or more immune modulating proteins is selected from the group consisting of LIGHT, IRF3, IL-2, IL-12, and CXCL9. In some embodiments, the one or more immune modulating proteins is LIGHT. In some embodiments, the one or more anti-angiogenic protein comprises an inhibitor or VEGF and/or an inhibitor of Ang2. In some embodiments, the one or more anti-angiogenic protein is a bispecific anti-VEGF/anti-Ang2 antibody. In some embodiments, the nucleic acid genome of the recombinant oncolytic virus comprises the nucleic acid sequence of SEQ ID NO: 47, or a nucleic acid sequence that has at least 95%, 96%, 97%, 98%, or 99% sequence identity to the nucleic acid sequence set forth in SEQ ID NO:

[0077] 47.

[0078] In some of any embodiments: the at least one viral gene is or comprises J2R, and the inactivating mutation of J2R is by insertion of one or more heterologous nucleic acid each encoding an apoptosis-inducible protein. In some embodiments, the apoptosis-inducible protein is an inducible DED (iDED), an inducible Fas (iFas), or an inducible Cas9 (iCas9). In some embodiments, the nucleic acid genome of the recombinant oncolytic virus comprises the nucleic acid sequence of SEQ ID NO: 7, 8, or 9, or a nucleic acid sequence that has at least 95%, 96%, 97%, 98%, or 99% sequence identity to the nucleic acid sequence set forth in SEQ ID NO: 7, 8, or 9. In some embodiments, the nucleic acid genome of the recombinant oncolytic virus comprises the nucleic acid sequence of SEQ ID NO: 7. In some embodiments, the nucleic acid genome of the recombinant oncolytic virus comprises the nucleic acid sequence of SEQ ID NO: 8. In some embodiments, the nucleic acid genome of the recombinant oncolytic virus comprises the nucleic acid sequence of SEQ ID NO: 9.

[0079] In some of any embodiments: the at least one viral gene is or comprises J2R, and the inactivating mutation of J2R is by insertion of one or more heterologous nucleic acid each encoding one or more immune modulating proteins. In some embodiments, the one or more immune modulating proteins is selected from the group consisting of LIGHT, IRF3, IL-2, IL-12, and CXCL9. In some embodiments, the one or more immune modulating proteins is IRF3. In some embodiments, the nucleic acid genome of the recombinant oncolytic virus comprises the nucleic acid sequence of SEQ ID NO: 49, or 93, or a nucleic acid sequence that has at least 95%, 96%, 97%, 98%, or 99% sequence identity to the nucleic acid sequence set forth in SEQ ID NO: 49, 50, or 93.

[0080] In some of any embodiments: the at least one viral gene is or comprises J2R and B2R. In some embodiments, the nucleic acid genome of the recombinant oncolytic virus comprises the nucleic acid sequence of SEQ ID NO: 48, or a nucleic acid sequence that has at least 95%, 96%, 97%, 98%, or 99% sequence identity to the nucleic acid sequence set forth in SEQ ID NO: 48.

[0081] In some of any embodiments, the at least one viral gene is or comprises J2R and B2R.

[0082] In some of any embodiments: the at least one viral gene is or comprises J2R and B2R, and the inactivating mutation of J2R is by insertion of one or more heterologous nucleic acid each encoding one or more immune modulating proteins. In some embodiments, the one or more immune modulating proteins is selected from the group consisting of LIGHT, IRF3, IL-2, IL-12, and CXCL9. In some embodiments, the one or more immune modulating proteins is IRF3. In some embodiments, the nucleic acid genome of the recombinant oncolytic virus comprises the nucleic acid sequence of SEQ ID NO: 80, or a nucleic acid sequence that has at least 95%, 96%, 97%, 98%, or 99% sequence identity to the nucleic acid sequence set forth in SEQ ID NO: 80.

[0083] In some of any embodiments: the at least one viral gene is or comprises J2R, B2R, and A35R; wherein: the inactivating mutation of J2R is by insertion of the one or more heterologous nucleic acid encoding one or more anti-angiogenic protein, the inactivating mutation of B2R is by insertion of one or more heterologous nucleic acid each encoding one or more immune modulating proteins, and the inactivating mutation of A35R is by insertion of one or more heterologous nucleic acid encoding one or more immune modulating proteins. In some embodiments, the one or more anti-angiogenic protein comprises an inhibitor or VEGF and/or an inhibitor of Ang2. In some embodiments, the one or more anti-angiogenic protein is a bispecific anti-VEGF/anti-Ang2 antibody. In some embodiments, the inactivating mutation of B2R is by insertion of one or more heterologous nucleic acid each encoding one or more immune modulating proteins selected from the group consisting of LIGHT, IRF3, IL-2, IL-12, and CXCL9. In some embodiments, the one or more immune modulating proteins is IRF3. In some embodiments, the inactivating mutation of A35R is by insertion of one or more heterologous nucleic acid encoding one or more immune modulating proteins selected from the group consisting of LIGHT, IRF3, IL-2, IL-12, and CXCL9. In some embodiments, the one or more immune modulating proteins is LIGHT. In some embodiments, the nucleic acid genome of the recombinant oncolytic virus comprises the nucleic acid sequence of SEQ ID NO: 82, or a nucleic acid sequence that has at least 95%, 96%, 97%, 98%, or 99% sequence identity to the nucleic acid sequence set forth in SEQ ID NO: 82.

[0084] In some of any embodiments: the at least one viral gene is or comprises J2R, B2R, and A56R; wherein: the inactivating mutation of J2R is by insertion of one or more heterologous nucleic acid encoding one or more immune modulating proteins, optionally wherein the one or more immune modulating proteins is IRF3; the inactivating mutation of A56R is by insertion of one or more heterologous nucleic acid encoding one or more immune modulating proteins, optionally wherein the one or more immune modulating proteins is IL-2. In some embodiments, the IL-2 is an IL-2 superkine. In some embodiments, the IL-2 superkine is MDNA11. In some embodiments, the nucleic acid genome of the recombinant oncolytic virus comprises the nucleic acid sequence of SEQ ID NO: 84, or a nucleic acid sequence that has at least 95%, 96%, 97%, 98%, or 99% sequence identity to the nucleic acid sequence set forth in SEQ ID NO: 84.

[0085] In some of any embodiments: the at least one viral gene is or comprises J2R, B2R, and A56R; wherein: the inactivating mutation of J2R is by insertion of one or more heterologous nucleic acid encoding one or more immune modulating proteins, optionally wherein the one or more immune modulating proteins is IRF3; the inactivating mutation of A56R is by insertion of one or more heterologous nucleic acid encoding one or more immune modulating proteins, optionally wherein the one or more immune modulating proteins comprises two or more immune modulating proteins selected from the group consisting of LIGHT, IRF3, IL-2, IL-12, and CXCL9. In some embodiments, the two or more immune modulating proteins comprises IL-12 and CXCL9. In some embodiments, the nucleic acid genome of the recombinant oncolytic virus comprises the nucleic acid sequence of SEQ ID NO: 85, or a nucleic acid sequence that has at least 95%, 96%, 97%, 98%, or 99% sequence identity to the nucleic acid sequence set forth in SEQ ID NO: 85.

[0086] In some of any embodiments: the at least one viral gene is or comprises J2R, B2R, and A56R; wherein: the inactivating mutation of B2R is by insertion of one or more heterologous nucleic acid encoding one or more immune modulating proteins, optionally wherein the one or more immune modulating proteins is IRF3; the inactivating mutation of A56R is by insertion of one or more heterologous nucleic acid encoding one or more immune modulating proteins, optionally wherein the one or more immune modulating proteins comprises two or more immune modulating proteins selected from the group consisting of LIGHT, IRF3, IL-2, IL-12, and CXCL9, and the inactivating mutation of J2R is by insertion of one or more heterologous nucleic acid each encoding an apoptosis-inducible protein. In some embodiments, the two or more immune modulating proteins comprises IL-12 and CXCL9. In some embodiments, the apoptosis-inducible protein is an inducible DED (iDED). In some embodiments, the nucleic acid genome of the recombinant oncolytic virus comprises the nucleic acid sequence of SEQ ID NO: 86, or a nucleic acid sequence that has at least 95%, 96%, 97%, 98%, or 99% sequence identity to the nucleic acid sequence set forth in SEQ ID NO: 86.

[0087] In some of any embodiments: the at least one viral gene is or comprises J2R, B2R, A35R, and A56R; wherein: the inactivating mutation of J2R is by insertion of the one or more heterologous nucleic acid encoding one or more anti-angiogenic protein, optionally wherein the one or more anti-angiogenic protein comprises an inhibitor or VEGF and/or an inhibitor of Ang2, optionally wherein the one or more anti-angiogenic protein is a bispecific anti-VEGF/anti-Ang2 antibody; the inactivating mutation of B2R is by insertion of one or more heterologous nucleic acid encoding one or more immune modulating proteins, optionally wherein the one or more immune modulating proteins is IRF3; the inactivating mutation of A35R is by insertion of the one or more heterologous nucleic acid encoding one or more immune modulating proteins, optionally wherein the one or more immune modulating proteins is selected from the group consisting of LIGHT, IRF3, IL-2, IL-12, and CXCL9, optionally wherein the one or more immune modulating proteins is LIGHT; the inactivating mutation of A56R is by insertion of one or more heterologous nucleic acid encoding one or more immune modulating proteins, wherein the one or more immune modulating proteins is IL-2 superkine MDNA11. In some embodiments, the nucleic acid genome of the recombinant oncolytic virus comprises the nucleic acid sequence of SEQ ID NO: 87, or a nucleic acid sequence that has at least 95%, 96%, 97%, 98%, or 99% sequence identity to the nucleic acid sequence set forth in SEQ ID NO: 87.

[0088] In some of any embodiments: the at least one viral gene is or comprises J2R, B2R, A35R, and A56R; wherein: the inactivating mutation of J2R is by insertion of the one or more heterologous nucleic acid encoding one or more anti-angiogenic protein, optionally wherein the one or more anti-angiogenic protein comprises an inhibitor or VEGF and/or an inhibitor of Ang2, optionally wherein the one or more anti-angiogenic protein is a bispecific anti-VEGF/anti-Ang2 antibody; the inactivating mutation of B2R is by insertion of one or more heterologous nucleic acid encoding one or more immune modulating proteins, optionally wherein the one or more immune modulating proteins is IRF3; the inactivating mutation of A35R is by insertion of the one or more heterologous nucleic acid encoding one or more immune modulating proteins, optionally wherein the one or more immune modulating proteins is selected from the group consisting of LIGHT, IRF3, IL-2, IL-12, and CXCL9, optionally wherein the one or more immune modulating proteins is LIGHT; the inactivating mutation of A56R is by insertion of one or more heterologous nucleic acid encoding one or more immune modulating proteins, wherein the one or more immune modulating proteins is IL-2 superkine MDNA11T. In some embodiments, the MDNA11T comprises the amino acid sequence set forth in SEQ ID NO: 98. In some embodiments, the nucleic acid genome of the recombinant oncolytic virus comprises the nucleic acid sequence of SEQ ID NO: 88, or a nucleic acid sequence that has at least 95%, 96%, 97%, 98%, or 99% sequence identity to the nucleic acid sequence set forth in SEQ ID NO: 88.

[0089] In some of any embodiments: the at least one viral gene is or comprises J2R, B2R, and A56R; wherein: the inactivating mutation of J2R is by insertion of one or more heterologous nucleic acid each encoding one or more T cell or NK cell evader proteins, optionally wherein the one or more T cell or NK cell evader proteins comprises a set of proteins encoded by Cowpox virus ORFs 012, 203 and 018 (CPXV012-203-018); the inactivating mutation of B2R is by insertion of one or more heterologous nucleic acid encoding one or more immune modulating proteins, optionally wherein the one or more immune modulating proteins is IRF3; the inactivating mutation of A56R is by insertion of one or more heterologous nucleic acid each encoding one or more immune modulating proteins, optionally wherein the one or more immune modulating proteins is selected from the group consisting of LIGHT, IRF3, IL-2, IL-12, and CXCL9, optionally wherein the one or more immune modulating proteins is an IL-2 superkine, optionally MDNA11 or MDNA11T; the at least one heterologous nucleic acid encoding one or more heterologous gene product comprises one or more heterologous nucleic acid each encoding one or more complement inhibitor, optionally CRASP-2, that is introduced into a viral membrane gene, optionally F14.5L, to produce a fusion gene encoding a fusion protein. In some embodiments, the fusion is at the C-terminus of the F14.5L protein. In some embodiments, the nucleic acid genome of the recombinant oncolytic virus comprises the nucleic acid sequence of SEQ ID NO: 89, or a nucleic acid sequence that has at least 95%, 96%, 97%, 98%, or 99% sequence identity to the nucleic acid sequence set forth in SEQ ID NO: 89.

[0090] In some of any embodiments: the at least one viral gene is or comprises J2R, B2R, and A56R; wherein: the inactivating mutation of J2R is by insertion of one or more heterologous nucleic acid each encoding one or more T cell or NK cell evader proteins, optionally wherein the one or more T cell or NK cell evader proteins comprises a set of proteins encoded by Cowpox virus ORFs 012, 203 and 018 (CPXV012-203-018); the inactivating mutation of B2R is by insertion of one or more heterologous nucleic acid encoding one or more immune modulating proteins, optionally wherein the one or more immune modulating proteins is IRF3; the inactivating mutation of A56R is by insertion of one or more heterologous nucleic acid encoding one or more immune modulating proteins, optionally wherein the one or more immune modulating proteins comprises two or more immune modulating proteins selected from the group consisting of LIGHT, IRF3, IL-2, IL-12, and CXCL9, optionally wherein the two or more immune modulating proteins comprises IL-12 and CXCL9; the at least one heterologous nucleic acid encoding one or more heterologous gene product comprises one or more heterologous nucleic acid each encoding one or more complement inhibitor, optionally CRASP-2, that is introduced into a viral membrane gene, optionally F14.5L, to produce a fusion gene encoding a fusion protein. In some embodiments, the fusion is at the C-terminus of the F14.5L protein. In some embodiments, the nucleic acid genome of the recombinant oncolytic virus comprises the nucleic acid sequence of SEQ ID NO: 90, or a nucleic acid sequence that has at least 95%, 96%, 97%, 98%, or 99% sequence identity to the nucleic acid sequence set forth in SEQ ID NO: 90.

[0091] In some of any embodiments: the at least one viral gene is or comprises B2R and J2R, and the inactivating mutation of J2R is by insertion of one or more heterologous nucleic acid each encoding one or more immune modulating proteins, optionally wherein the one or more immune modulating proteins is selected from the group consisting of LIGHT, IRF3, IL-2, IL-12, and CXCL9, optionally wherein the one or more immune modulating proteins is IRF3. In some embodiments, the nucleic acid genome of the recombinant oncolytic virus comprises the nucleic acid sequence of SEQ ID NO: 91, or a nucleic acid sequence that has at least 95%, 96%, 97%, 98%, or 99% sequence identity to the nucleic acid sequence set forth in SEQ ID NO: 91.

[0092] In some of any embodiments: the at least one viral gene is or comprises B2R, J2R, and A56R, and the inactivating mutation of J2R is by insertion of one or more heterologous nucleic acid each encoding one or more immune modulating proteins, optionally wherein the one or more immune modulating proteins is selected from the group consisting of LIGHT, IRF3, IL-2, IL-12, and CXCL9, optionally wherein the one or more immune modulating proteins is IRF3; and the inactivating mutation of A56R is by insertion of one or more heterologous nucleic acid encoding one or more immune modulating proteins, optionally wherein the one or more immune modulating proteins comprises two or more immune modulating proteins selected from the group consisting of LIGHT, IRF3, IL-2, IL-12, and CXCL9, optionally wherein the two or more immune modulating proteins comprises IL-12 and CXCL9. In some embodiments, the nucleic acid genome of the recombinant oncolytic virus comprises the nucleic acid sequence of SEQ ID NO: 92, or a nucleic acid sequence that has at least 95%, 96%, 97%, 98%, or 99% sequence identity to the nucleic acid sequence set forth in SEQ ID NO: 92.

[0093] In some of any embodiments: the at least one viral gene is or comprises J2R, and the inactivating mutation of J2R is by insertion of one or more heterologous nucleic acid each encoding one or more immune modulating proteins, optionally wherein the one or more immune modulating proteins is selected from the group consisting of LIGHT, IRF3, IL-2, IL-12, and CXCL9, optionally wherein the one or more immune modulating proteins is IRF3. In some embodiments, the nucleic acid genome of the recombinant oncolytic virus comprises the nucleic acid sequence of SEQ ID NO: 93, or a nucleic acid sequence that has at least 95%, 96%, 97%, 98%, or 99% sequence identity to the nucleic acid sequence set forth in SEQ ID NO: 93.

[0094] In some of any embodiments, the nucleic acid genome of the recombinant oncolytic virus comprises a nucleic acid sequence set forth in any one of SEQ ID NOs: 48, 80, 82, and 84-93, or a nucleic acid sequence that has at least 95%, 96%, 97%, 98%, or 99% sequence identity to a nucleic acid sequence set forth in any one of SEQ ID NOs 48, 80, 82, and 84-93. In some of any embodiments, the nucleic acid genome of the recombinant oncolytic virus comprises a nucleic acid sequence set forth in any one of SEQ ID NOs: 85, 86, 88, and 90, or a nucleic acid sequence that has at least 95%, 96%, 97%, 98%, or 99% sequence identity to a nucleic acid sequence set forth in any one of SEQ ID NOs 85, 86, 88, and 90. In some of any embodiments, the nucleic acid genome of the recombinant oncolytic virus comprises a nucleic acid sequence set forth in SEQ ID NO: 85, or a nucleic acid sequence that has at least 95%, 96%, 97%, 98%, or 99% sequence identity to a nucleic acid sequence set forth in SEQ ID NO 85.

[0095] In some of any embodiments, one or more of the heterologous nucleic acid encoding a heterologous gene product is operably linked to a promoter.

[0096] In some of any embodiments, each of the one or more heterologous nucleic acid encoding a heterologous gene product that is operably linked to a promoter is selected from the group consisting of 7.5E, 7.5E/L, SSE, 11KL, SSL, SSEL, mH5, and LEO. In some of any embodiments, each heterologous nucleic acid encoding a heterologous gene product is independently operably linked to a promoter, optionally wherein each heterologous nucleic acid encoding a heterologous gene product is independently operably linked to a promoter selected from the group consisting of 7.5E, 7.5E/L, SSE, 11KL, SSL, SSEL, mH5, and LEO. In some of any embodiments, the promoter is a poxviral promoter or is a variant or derivative thereof. In some of any embodiments, the promoter is a vaccinia virus promoter. In some of any embodiments, the promoter is selected from the group consisting of 7.5E, 7.5E/L, SSE, 11KL, SSL, SSEL, mH5, and LEO. In some of any embodiments, the promoter has the sequence of amino acids set forth in any one of SEQ ID NOS: 29, 53, 55, 68, 69, 70, 71, or 72. In some of any embodiments, the promoter is synthetic strong early promoter (SSE). In some of any embodiments, the SSE promoter comprises the sequence set forth in SEQ ID NO:29. In some of any embodiments, the promoter is a strong early/late promoter (SEL). In some of any embodiments, the SEL promoter comprises the sequence set forth in SEQ ID NO:55. In some of any embodiments, the promoter is mH5. In some of any embodiments, the mH5 promoter comprises the sequence set forth in SEQ ID NO: 53.

[0097] Also provided herein is an isolated clonal vaccinia virus (VACV) strain comprising a nucleic acid genome that has at least 95% sequence identity with the nucleic acid sequence set forth in SEQ ID NO: 1 and wherein the nucleic acid genome is characterized by one or more of: (i) a variant 017 open reading frame (ORF) encoding an amino acid sequence that has at least 95% sequence identity to SEQ ID NO: 57 and comprises a polar uncharged amino acid at position 66, optionally a threonine (T) at position 66; (ii) a variant 038 (K5L) ORF comprising a nucleotide insertion to effect a frameshift mutation, wherein the 038 (K5L) gene product is altered; (iii) a variant 059 (E2L) ORF encoding an amino acid sequence that is at least 95% sequence identity to SEQ ID NO:60 and comprises a hydrophobic amino acid other than leucine at position 419, optionally a phenylalanine (F) at position 419; (iv) a variant 104 (H4L) ORF encoding an amino acid sequence having at least 95% sequence identity to SEQ ID NO:61 and comprises a negatively charged amino acid at position 591, optionally aspartic acid (D) at position 591; and (v) a variant 182 (A56R) ORF comprising deletion of two nucleotides to effect a frameshift mutation, wherein the 182 (A56R) ORF gene product is altered.

[0098] In some of any embodiments of any recombinant oncolytic virus or any isolated clonal VACV strain, the nucleic acid genome is characterized by (i) and the variant 017 ORF encodes an amino acid sequence that has at least 96%, at least 97%, at least 98%, at least 99% or 100% sequence identity to SEQ ID NO:57. In some of any embodiments of any recombinant oncolytic virus or any isolated clonal VACV strain, the nucleic acid genome is characterized by (i) and the variant 017 ORF encodes the amino acid sequence set forth in SEQ ID NO: 57. In some of any embodiments of any recombinant oncolytic virus or any isolated clonal VACV strain, the nucleic acid genome is characterized by (ii) and the nucleotide insertion is guanine (G) corresponding to insertion after nucleotide position 32135 of SEQ ID NO:1, optionally wherein the variant 038 (K5L) ORF is set forth in SEQ ID NO: 58. In some of any embodiments of any recombinant oncolytic virus or any isolated clonal VACV strain, the nucleic acid genome is characterized by (ii) and the 038 (K5L) gene product is set forth in SEQ ID NO:59. In some of any embodiments of any recombinant oncolytic virus or any isolated clonal VACV strain, the nucleic acid genome is characterized by (iii) and the variant 059 (E2L) ORF encodes an amino acid sequence that has at least 96%, at least 97%, at least 98%, at least 99% or 100% sequence identity to SEQ ID NO:60. In some of any embodiments of any recombinant oncolytic virus or any isolated clonal VACV strain, the nucleic acid genome is characterized by (iii) and the variant 059 (E2L) ORF encodes the amino acid sequence set forth in SEQ ID NO: 60. In some of any embodiments of any recombinant oncolytic virus or any isolated clonal VACV strain, the nucleic acid genome is characterized by (iv) and the 104 (H4L) ORF encodes an amino acid sequence that has at least 96%, at least 97%, at least 98%, at least 99% or 100% sequence identity to SEQ ID NO:61. In some of any embodiments of any recombinant oncolytic virus or any isolated clonal VACV strain, the nucleic acid genome is characterized by (iv) and wherein the variant 104 (H4L) ORF encodes the amino acid sequence set forth in SEQ ID NO: 61. In some of any embodiments of any recombinant oncolytic virus or any isolated clonal VACV strain, the nucleic acid genome is characterized by (v) and the deletion of two nucleotides is deletion of two contiguous nucleotides corresponding to nucleotides after nucleotide position 165972 of SEQ ID NO:2, optionally wherein the variant 182 (A56R) is set forth in SEQ ID NO: 62. In some of any embodiments of any recombinant oncolytic virus or any isolated clonal VACV strain, the nucleic acid genome is characterized by (v) and the VACV protein is set forth in SEQ ID NO:63.

[0099] In some of any embodiments of any recombinant oncolytic virus or any isolated clonal VACV strain, the nucleic acid genome is characterized by any two of (i)-(v). In some of any embodiments of any recombinant oncolytic virus or any isolated clonal VACV strain, the nucleic acid genome is characterized by any three of (i)-(v). In some of any embodiments of any recombinant oncolytic virus or any isolated clonal VACV strain, the nucleic acid genome is characterized by any four of (i)-(v). In some of any embodiments of any recombinant oncolytic virus or any isolated clonal VACV strain, the nucleic acid genome is characterized by each of (i)-(v).

[0100] Also provided herein is an isolated clonal vaccinia virus (VACV) strain comprising a nucleic acid genome that has at least 95% sequence identity with the nucleic acid sequence set forth in SEQ ID NO: 1, and wherein the nucleic acid genome is characterized by one or more of: (i) a guanine (G) at the position corresponding to position 7770 of SEQ ID NO: 1; (ii) a thymine (T) at the position corresponding to position 15261 of SEQ ID NO: 1; (iii) a G at the position corresponding to position 32136 of SEQ ID NO: 1; (iv) a G at the position corresponding to position 49455 of SEQ ID NO: 1; (v) a cytosine (C) at the position corresponding to position 92969 of SEQ ID NO: 1; (vi) the nucleic acid sequence CACTTATATAT at the positions corresponding to positions 106870 to 106880 of SEQ ID NO: 1; (vii) the nucleic acid sequence GTTTTCATTA at the positions corresponding to positions 111267 to 111276 of SEQ ID NO: 1; (viii) an adenine (A) at the position corresponding to position 162715 of SEQ ID NO: 1; (ix) the nucleic acid sequence TACAGACACC at the positions corresponding to positions 165844 to 185853 of SEQ ID NO: 1; and (x) a C at the position corresponding to position 187805 of SEQ ID NO: 1.

[0101] In some of any embodiments of any recombinant oncolytic virus or any isolated clonal VACV strain, the nucleic acid genome is characterized by any two of (i)-(x). In some of any embodiments of any recombinant oncolytic virus or any isolated clonal VACV strain, the nucleic acid genome is characterized by any three of (i)-(x). In some of any embodiments of any recombinant oncolytic virus or any isolated clonal VACV strain, the nucleic acid genome is characterized by any four of (i)-(x). In some of any embodiments of any recombinant oncolytic virus or any isolated clonal VACV strain, the nucleic acid genome is characterized by any five of (i)-(x). In some of any embodiments of any recombinant oncolytic virus or any isolated clonal VACV strain, the nucleic acid genome is characterized by any six of (i)-(x). In some of any embodiments of any recombinant oncolytic virus or any isolated clonal VACV strain, the nucleic acid genome is characterized by any seven of (i)-(x). In some of any embodiments of any recombinant oncolytic virus or any isolated clonal VACV strain, the nucleic acid genome is characterized by any eight of (i)-(x). In some of any embodiments of any recombinant oncolytic virus or any isolated clonal VACV strain, the nucleic acid genome is characterized by any nine of (i)-(x). In some of any embodiments of any recombinant oncolytic virus or any isolated clonal VACV strain, the nucleic acid genome is characterized by each of (i)-(x).

[0102] In some of any embodiments of any recombinant oncolytic virus or any isolated clonal VACV strain, the nucleic acid genome has at least 96% sequence identity with the sequence of nucleotides set forth in SEQ ID NO: 1. In some of any embodiments of any recombinant oncolytic virus or any isolated clonal VACV strain, the nucleic acid genome has at least 97% sequence identity with the sequence of nucleotides set forth in SEQ ID NO: 1. In some of any embodiments of any recombinant oncolytic virus or any isolated clonal VACV strain, the nucleic acid genome has at least 98% sequence identity with the sequence of nucleotides set forth in SEQ ID NO: 1. In some of any embodiments of any recombinant oncolytic virus or any isolated clonal VACV strain, the nucleic acid genome has at a least 99% sequence identity with the sequence of nucleotides set forth in SEQ ID NO: 1.

[0103] Also provided herein is an isolated clonal vaccinia virus (VACV) strain comprising a nucleic acid genome that has at least 99% sequence identity with the sequence of nucleotides set forth in SEQ ID NO: 1.

[0104] In some of any embodiments of any recombinant oncolytic virus or any isolated clonal VACV strain, the nucleic acid genome has at least 99.5% sequence identity with the sequence of nucleotides set forth in SEQ ID NO: 1. In some of any embodiments of any recombinant oncolytic virus or any isolated clonal VACV strain, the nucleic acid genome has at least 99.9% sequence identity with the sequence of nucleotides set forth in SEQ ID NO: 1. In some of any embodiments of any recombinant oncolytic virus or any isolated clonal VACV strain, the nucleic acid genome has at least 99.95% sequence identity with the sequence of nucleotides set forth in SEQ ID NO: 1. In some of any embodiments of any recombinant oncolytic virus or any isolated clonal VACV strain, the nucleic acid genome does not comprise the sequence of nucleotides set forth in SEQ ID NO: 2. In some of any embodiments of any recombinant oncolytic virus or any isolated clonal VACV strain, the nucleic acid genome is not modified to contain non-viral heterologous nucleic acid containing an open reading frame encoding a non-viral heterologous protein. In some of any embodiments of any recombinant oncolytic virus or any isolated clonal VACV strain, the nucleic acid genome is set forth in SEQ ID NO: 1.

[0105] In some of any embodiments of any recombinant oncolytic virus or any isolated clonal VACV strain, the clonal VACV strain exhibits enhanced production of extracellular enveloped virions (EEV) after cell infection, optionally as determined by percentage of EEV, wherein the percentage of EEV is determined by the formula: viral titer in supernatant/(viral titer in supernatant+viral titer in cell lysate)*100. In some of any embodiments of any recombinant oncolytic virus or any isolated clonal VACV strain, greater than 5% of infectious particles after cell infection are EEV. In some of any embodiments of any recombinant oncolytic virus or any isolated clonal VACV strain, greater than 10% of infectious particles after cell infection are EEV. In some of any embodiments of any recombinant oncolytic virus or any isolated clonal VACV strain, greater than 15% of infectious particles after cell infection are EEV. In some of any embodiments, the recombinant oncolytic virus or the clonal VACV strain exhibits enhanced production of extracellular enveloped virions (EEV) after cell infection, as determined by having a percentage of at least 5%, 10%, or 15% of infectious particles being EEV.

[0106] In some of any embodiments of any recombinant oncolytic virus or any isolated clonal VACV strain, the virus exhibits oncolytic activity to kill tumor cells.

[0107] Also provided herein is a VACV preparation comprising the isolated clonal VACV strain of any of isolated clonal VACV strain provided herein.

[0108] Also provided herein is a VACV preparation comprising any recombinant oncolytic vaccinia virus provided herein.

[0109] Also provided herein is a recombinant oncolytic virus preparation comprising any of the recombinant oncolytic viruses provided herein, wherein at least 70%, 80%, 90%, 95%, or 98% of the virus particles in the preparation have the genomic sequence of the clonal recombinant oncolytic virus.

[0110] In some of any embodiments, the VACV preparation is substantially homogenous wherein a plurality of the virus particles in the preparation has the genomic sequence of the clonal VACV strain.

[0111] In some of any embodiments, at least 70% of the virus particles in the preparation have the genomic sequence of the clonal VACV strain. In some of any embodiments, at least 80% of the virus particles in the preparation have the genomic sequence of the clonal VACV strain. In some of any embodiments, at least 90% of the virus particles in the preparation have the genomic sequence of the clonal VACV strain. In some of any embodiments, at least 95% of the virus particles in the preparation have the genomic sequence of the clonal VACV strain. In some of any embodiments, at least 98% of the virus particles in the preparation have the genomic sequence of the clonal VACV strain.

[0112] Also provided herein is a pharmaceutical composition comprising any if the isolated VACV clonal strains provided herein.

[0113] Also provided herein is a pharmaceutical composition comprising any of the VACV provided herein.

[0114] Also provided herein is a pharmaceutical composition comprising any of the recombinant oncolytic vaccinia viruses provided herein.

[0115] Also provided herein is a recombinant vaccinia virus (VACV) strain comprising a nucleic acid genome of any of the VACV clonal strains provided herein that comprises an inactivating mutation in at least one viral gene.

[0116] In some of any embodiments, the viral gene is selected from the group consisting of hemagglutinin (HA), J2R (thymidine kinase), F14.5L, A56R (hemagglutinin), B2R, vaccinia growth factor (VGF), A35R, A49R, A55R, B14R, C4L, C6L, C16L, NIL/N2L, E2L/E3L, K1L/K2L, K7L, superoxide dismutase locus, 7.5K, C2L-F3L, C4L-F1L, C7-K1L, B13R+B14R, A26L and I4L. In some of any embodiments, the inactivating mutation is a deletion of all or a portion of the at least one viral gene. In some of any embodiments, the deletion of the at least one viral gene is deletion of the entire gene ORF of a viral gene. In some of any embodiments, the deletion of the at least one viral gene is a deletion of a portion of the ORF of a viral gene, and wherein said deletion is sufficient to render the encoded gene product non-functional.

[0117] In some of any embodiments, the at least one viral gene is or comprises A35R.

[0118] In some of any embodiments, the nucleic acid genome of the recombinant VACV strain comprises the nucleic acid sequence set forth in SEQ ID NO: 3, or a nucleic acid sequence that has at least 95%, at least 96%, at least 97%, at least 98% or at least 99% sequence identity to the sequence set forth in SEQ ID NO:3.

[0119] In some of any embodiments, the at least one viral gene is or comprises J2R.

[0120] In some of any embodiments, the nucleic acid genome of the recombinant VACV strain comprises the nucleic acid sequence set forth in SEQ ID NO: 4, or a nucleic acid sequence that has at least 95%, at least 96%, at least 97%, at least 98% or at least 99% sequence identity to the sequence set forth in SEQ ID NO:4.

[0121] In some of any embodiments, the at least one viral gene is or comprises B2R.

[0122] In some of any embodiments, the at least one viral gene is or comprises A35R and J2R.

[0123] In some of any embodiments, the nucleic acid genome of the recombinant VACV strain comprises the nucleic acid sequence set forth in SEQ ID NO: 12, or a nucleic acid sequence that has at least 95%, at least 96%, at least 97%, at least 98% or at least 99% sequence identity to the sequence set forth in SEQ ID NO:12.

[0124] In some of any embodiments, the at least one viral gene is or comprises B2R and J2R.

[0125] In some of any embodiments, the nucleic acid genome of the recombinant VACV strain comprises the nucleic acid sequence set forth in SEQ ID NO: 48, or a nucleic acid sequence that has at least 95%, at least 96%, at least 97%, at least 98% or at least 99% sequence identity to the sequence set forth in SEQ ID NO:48.

[0126] In some of any embodiments, the nucleic acid genome of the recombinant oncolytic virus comprises a nucleic acid sequence set forth in any one of SEQ ID NOs: 48, 80, 82, and 84-93, or a nucleic acid sequence that has at least 95%, 96%, 97%, 98%, or 99% sequence identity to a nucleic acid sequence set forth in any one of SEQ ID NOs 48, 80, 82, and 84-93. In some of any embodiments, the nucleic acid genome of the recombinant oncolytic virus comprises a nucleic acid sequence set forth in any one of SEQ ID NOs: 85, 86, 88, and 90, or a nucleic acid sequence that has at least 95%, 96%, 97%, 98%, or 99% sequence identity to a nucleic acid sequence set forth in any one of SEQ ID NOs 85, 86, 88, and 90. In some of any embodiments, the nucleic acid genome of the recombinant oncolytic virus comprises a nucleic acid sequence set forth in SEQ ID NO: 85, or a nucleic acid sequence that has at least 95%, 96%, 97%, 98%, or 99% sequence identity to a nucleic acid sequence set forth in SEQ ID NO 85.

[0127] Also provided herein is a nucleic acid comprising a genome of any of the recombinant oncolytic viruses provided herein or any of the isolated VACV clonal strains provided herein.

[0128] Also provided herein is a recombinant oncolytic virus comprising the nucleic acid of any of the recombinant oncolytic viruses provided herein.

[0129] In some of any embodiments, the recombinant oncolytic virus is a recombinant oncolytic vaccinia virus. In some of any embodiments, the recombinant oncolytic virus is a recombinant oncolytic vaccinia virus.

[0130] Also provided herein is a pharmaceutical composition comprising any of the recombinant VACV strains provided herein.

[0131] Also provided herein is a pharmaceutical composition comprising any of the recombinant oncolytic viruses provided herein, optionally wherein the recombinant oncolytic virus is a recombinant oncolytic vaccinia virus.

[0132] In some of any embodiments, the pharmaceutical composition further comprises a pharmaceutically acceptable carrier.

[0133] In some of any embodiments, the pharmaceutical composition is formulated for intravenous administration, intratumoral administration, intraperitoneal administration or intrapleural administration. In some of any embodiments, the pharmaceutical composition is formulated for intravenous administration. In some of any embodiments, the pharmaceutical composition is a liquid composition. In some of any embodiments, the pharmaceutical composition is lyophilized.

[0134] Also provided herein is a method of treating a proliferative disorder in a subject comprising administering to the subject any of the recombinant oncolytic viruses provided herein, any of the isolated oncolytic viruses provided herein, or any of the pharmaceutical compositions provided herein.

[0135] In some embodiments, the proliferative disorder is a tumor or a metastasis. In some of any embodiments, the proliferative disorder is cancer. In some of any embodiments, the cancer is a pancreatic cancer, ovarian cancer, lung cancer, colon cancer, prostate cancer, cervical cancer, breast cancer, rectal cancer, renal (kidney) cancer, gastric cancer, esophageal cancer, hepatic (liver) cancer, endometrial cancer, bladder cancer, brain cancer, head and neck cancer, oral cancer (e.g., oral cavity cancer), cervical cancer, uterine cancer, thyroid cancer, testicular cancer, prostate cancer, skin cancers, such as melanoma, e g, malignant melanoma, cholangiocarcinoma (bile duct cancer), thymic epithelial cancer, e.g., thymoma, leukemia, lymphoma, or multiple myeloma. In some of any embodiments, the cancer is Microsatellite Stable (MSS) colorectal cancer.

[0136] In some of any embodiments, the nucleic acid genome of the recombinant oncolytic virus comprises the nucleic acid sequence set forth in SEQ ID NO: 8, or a nucleic acid sequence that has at least 95%, at least 96%, at least 97%, at least 98% or at least 99% sequence identity to the sequence set forth in SEQ ID NO:8.

[0137] In some of any embodiments, the recombinant oncolytic virus or the isolated oncolytic virus is administered in an amount from 1×10 5 pfu to 1×10¹⁴ pfu.

[0138] In some of any embodiments, the method further comprises administering a second therapeutic agent for the treatment of the proliferative disorder.

[0139] In some of any embodiments, the method further comprises another treatment selected from among surgery, radiation therapy, immunosuppressive therapy and administration of an anticancer agent. In some embodiments, the another treatment is administration of an anticancer agent selected from among a cytokine, a chemokine, a growth factor, a photosensitizing agent, a toxin, an anti-cancer antibiotic, a chemotherapeutic compound, a radionuclide, an angiogenesis inhibitor, a signaling modulator, an anti-metabolite, an anti-cancer vaccine, an anti-cancer oligopeptide, a mitosis inhibitor protein, an antimitotic oligopeptide, an anticancer antibody, an anti-cancer antibiotic, an immunotherapeutic agent and a combination of any of the preceding thereof.

[0140] In some of any embodiments, the recombinant oncolytic virus or the isolated oncolytic virus is administered intravenously.

[0141] In some of any embodiments, the method further comprises administering AP1903 (Rimiducid) to the subject.

[0142] In some of any embodiments, the recombinant oncolytic virus administered to the subject comprises a heterologous nucleic acid encoding an apoptosis inducible protein.

[0143] In some of any embodiments, the nucleic acid genome of the recombinant oncolytic virus comprises the nucleic acid sequence set forth in SEQ ID NO: 8, or a nucleic acid sequence that has at least 95%, at least 96%, at least 97%, at least 98% or at least 99% sequence identity to the sequence set forth in SEQ ID NO:8.

[0144] In some of any embodiments, the subject exhibits severe immune deficiency and is sensitive to virus infection.

[0145] In some of any embodiments, the nucleic acid genome of the recombinant oncolytic virus comprises a nucleic acid sequence set forth in any one of SEQ ID NOs: 48, 80, 82, and 84-93, or a nucleic acid sequence that has at least 95%, 96%, 97%, 98%, or 99% sequence identity to a nucleic acid sequence set forth in any one of SEQ ID NOs 48, 80, 82, and 84-93.

[0146] Also provided herein is a method of inhibiting virus replication, the method comprising contacting cells infected with a recombinant oncolytic virus with AP1903 (Rimiducid), wherein the recombinant oncolytic virus comprises a heterologous nucleic acid encoding an apoptosis inducible protein.

[0147] Also provided herein is a method of inhibiting virus replication, the method comprising contacting cells with AP1903 (Rimiducid), wherein the cells are infected with any of the recombinant oncolytic viruses provided herein, any of the isolated oncolytic viruses provided herein, or any of the recombinant oncolytic viruses, e.g., clonal VACV strains, provided herein.

[0148] In some of any embodiments, the contacting occurs in vivo in a subject. In some of any embodiments, the AP1903 (Rimiducid) has been administered to a subject previously administered with a recombinant oncolytic virus comprising the heterologous nucleic acid encoding an apoptosis inducible protein. In some of any embodiments, the AP1903 (Rimiducid) has been administered to a subject previously administered with any of the recombinant oncolytic viruses provided herein, or any of the isolated oncolytic viruses provided herein.

[0149] Also provided herein is a method of inhibiting virus replication in a subject, the method comprising administering to a subject AP1903 (Rimiducid), wherein the subject has been previously administered a recombinant oncolytic virus comprising a heterologous nucleic acid encoding an apoptosis inducible protein.

[0150] Also provided herein is a method of inhibiting virus replication in a subject, the method comprising administering to a subject AP1903 (Rimiducid), wherein the subject has been previously administered any of the recombinant oncolytic viruses provided herein, or any of the isolated oncolytic viruses provided herein.

[0151] In some of any embodiments, the method inhibits virus replication preferentially in non-cancer cells. In some of any embodiments, the apoptosis-inducible protein is an inducible DED (iDED). In some of any embodiments, the iDED comprises the amino acid sequence set forth in SEQ ID NO:27, or an amino acid sequence that has at least 85%, 90% or 95% sequence identity to SEQ ID NO:27.

[0152] In some of any embodiments, the nucleic acid genome of the recombinant oncolytic virus comprises the nucleic acid sequence set forth in SEQ ID NO: 8, or a nucleic acid sequence that has at least 95%, at least 96%, at least 97%, at least 98% or at least 99% sequence identity to the sequence set forth in SEQ ID NO:8.

[0153] In some of any embodiments, the nucleic acid genome of the recombinant oncolytic virus comprises a nucleic acid sequence set forth in any one of SEQ ID NOs: 48, 80, 82, and 84-93, or a nucleic acid sequence that has at least 95%, 96%, 97%, 98%, or 99% sequence identity to a nucleic acid sequence set forth in any one of SEQ ID NOs 48, 80, 82, and 84-93.

### BRIEF DESCRIPTION OF THE DRAWINGS

[0154] FIG. 1 depicts cell survival percentage of BT-549, A549, LOX-IMVI, HCC-2998 and COLO-205 cells after infection with VIP01-06 VACV clonal isolates. For each of VIP01, VIP02, VIP03, VIP04, VIP05, and VIP06, the bars correspond to, from left to right, BT-549, A549, LOX-IMVI, HCC-2998, and COLO-205 cells.

[0155] FIG. 2 shows VCP02 and VIP02 percentage of extracellular enveloped virus (EVV) production in 4T1 and B16-F10 infected cells.

[0156] FIG. 3 depicts tumor volume in a 4T1 mouse breast cancer model after infection with a single intravenous delivery of VCP02 (squares), VIP01 (triangles), VIP02 (diamonds), and vehicle (circle).

[0157] FIGS. 4A and 4B depicts cell survival percentage in 2-D (FIG. 4A) and 3-D (FIG. 4B) cell cultures of different cancer cell types infected with VIP02 at MOI=0.01 (lighter bars) and MOI=0.1 (darker bars).

[0158] FIG. 5 depicts a series of schematics representing the genomic structures of stealth recombinant clones VIR27, VIR37 and VIR46 derived from the parental VIP02.

[0159] FIG. 6 depicts percentage of host complement inhibition in human and mice serum after incubation with stealth oncolytic viral clones VIR27, VIR37 and VIP02.

[0160] FIG. 7 depicts tumor volume in a 4T1 mouse breast cancer model after infection with a single intravenous delivery of VIP02, VIR27, and vehicle.

[0161] FIG. 8 depicts tumor volume in a 4T1 mouse breast cancer model after infection with a single intravenous delivery of VIR46, VIR52, and vehicle.

[0162] FIG. 9 depicts a series of schematics representing the genomic structures of immune-stimulating oncolytic viruses VIR49 and VIR52.

[0163] FIG. 10 depicts tumor volume in a 4T1 mouse breast cancer model after infection with a single intravenous delivery of VIR49, and VIR52.

[0164] FIG. 11 depicts a series of schematics representing the genomic structure of anti-angiogenesis oncolytic virus VIR71.

[0165] FIGS. 12A and 12B depicts tumor volume in a 4T1 mouse breast cancer model after infection with a single intravenous delivery of VIR71, VIR52, and vehicle (FIG. 12A), and tumor volume in.

[0166] FIG. 13 depicts a series of schematics representing the genomic structures of apoptosis inducing oncolytic viruses VIR40, VIR41 and VIR42, and control virus VIR13.

[0167] FIG. 14 depicts a series of graphs quantifying viral replication of the apoptosis-inducing viral clones VIR13, VIR40, VIR41 and VIR42 in primary healthy HBE, HME and MME cells initially infected at MOIs of 0.01 and/or 10 in the presence of Rimiducid or DMSO, as a control.

[0168] FIGS. 15A-G depicts a series of graphs quantifying viral replication of the apoptosis-inducing viral clones VIR13, VIR40, VIR41 and VIR42 in BT-549 breast cancer cells (FIG. 15A), Hs578T breast cancer cells (FIG. 15B), MCF-7 and 4T1breast cancer cells (FIG. 15C), A549 and M14 lung and melanoma cancer cells (FIG. 15D), HCT-15 MSI colon cancer cells (FIG. 15E), HCT-116 MSI colon cancer cells (FIG. 15F), and KM12 MSI colon cancer cells (FIG. 15G) initially infected at MOIs of 0.01 and/or 10 in the presence of Rimiducid or DMSO as a control.

[0169] FIGS. 16A-C depicts a series of graphs quantifying viral replication in COL0205 cancer cells (FIG. 16A), HCC-2998 cancer cells (FIG. 16B), and HT-29 cancer cells (FIG. 16C) initially infected at MOIs of 0.01 and/or 10 in the presence of Rimiducid or DMSO as a control.

[0170] FIGS. 17A-C depict a series of graphs quantifying the cytotoxicity of the apoptosis-inducing viral clones VIR13, VIR40, VIR41 and VIR42 in human primary bronchial/tracheal epithelial cells (HBE, FIG. 17A), human primary mammary epithelial cells (HME, FIG. 17B), murine primary mammary epithelial cells (MME) and human primary colonic epithelial cells (HCE, FIG. 17C) initially infected at MOIs of 0.01 and/or 0.1 in the presence of Rimiducid or DMSO as a control.

[0171] FIGS. 18A-K depict a series of graphs quantifying the cytotoxicity of the apoptosis-inducing viral clones VIR13, VIR40, VIR41 and VIR42 BT-549 breast cancer cells (FIG. 18A), Hs578T breast cancer cells (FIG. 18B), 4T1 breast cancer cells (FIG. 18C), DU-145 prostate cancer cells (FIG. 18D), PC-3 prostate cancer cells (FIG. 18E), A549 lung and melanoma cancer cells (FIG. 18F), M14 lung and melanoma cancer cells (FIG. 18G), COLO 320 DM and HCT-15 MSI colon cancer cells (FIG. 18I1), HCT-116 and KM12 MSI colon cancer cells (FIG. 18I), KM12 MSI colon cancer cells (FIG. 18J) and SW48 MSI colon cancer cells (FIG. 18K) initially infected at MOIs of 0.01 and/or 0.1 in the presence of Rimiducid or DMSO as a control.

[0172] FIGS. 19A-G depict a series of graphs quantifying the cytotoxicity of the apoptosis-inducing viral clones VIR13, VIR40, VIR41 and VIR42 in COL0205 MSS colon cancer cells (FIG. 19A), HCC-2998 colon cancer cells (FIG. 19B), HT-29 cells (FIG. 19C), LS123 cells (FIG. 19D), LS174T cells (FIG. 19E), SW620 cells (FIG. 19F) and WiDR cells (FIG. 19G) initially infected at MOIs of 0.01 and/or 0.1 in the presence of Rimiducid or DMSO as a control.

[0173] FIG. 20 shows complete inhibition of tumor growth in the SL-4 mouse model of colon adenocarcinoma after infection with a single intravenous injection of VIR13.

[0174] FIGS. 21A-E depict a series of graphs showing tumor size over time (days post treatment) in mice following administration of VIR13, VIR41, or control (FIG. 21A), VIR13, VIR86, or control (FIG. 21B), VIR13, VIR93, or control (FIG. 21C), VIR13, VIR94, or control (FIG. 21D), VIR13, VIR96, or control (FIG. 21E). FIG. 21F depicts a graph showing body weight (g) over time (days post treatment) for mice that were administered VIR13, VIR41, VIR86, VIR93, VIR94, VIR96, or control.

[0175] FIGS. 22A-H depict a series of graphs showing tumor volume over time (days post-treatment) in mice following administration of VIR94, VIR100, or control (FIG. 22A), VIR94, VIR103, or control (FIG. 22B), VIR94, VIR105, or control (FIG. 22C), VIR94, VIR106, or control (FIG. 22D), VIR94, VIR109, or control (FIG. 22E), VIR94, VIR113, or control (FIG. 22F), VIR94, VIR114, or control (FIG. 22G), or VIR94, VIR115, or control (FIG. 2211). *=p<0.05; **=p<0.01; ***=p≤0.001.

[0176] FIG. 23A depicts a graph showing tumor size over time (days post treatment) in mice following administration of VIR103, VIR111, or VIR113. FIG. 23B shows a schematic for how both MDNA11 and MDNA11T are created from wild-type human IL-2 (wt hIL-2). *=p<0.05; **=p≤0.01.

[0177] FIG. 24A depicts a graph showing tumor volume over time (days post treatment) in mice following administration of VIR106 or control. FIG. 24B depicts a graph showing weight (g) over time (days post treatment) in mice following administration of VIR106 or control. ***=p<0.001. FIG. 24C shows images of the tumor location on mice that were taken on day 8 following administration of VIR106 or control, which shows the presence of detectable tumors in control mice but a lack of detectable tumors in mice that were treated with VIR106. FIGS. 24D-E depict a graph showing tumor volume over time (days post treatment) (FIG. 24D) and weight (g) (FIG. 24E) in mice administered VIR113 or control. FIGS. 24F-G depict a graph showing tumor volume over time (days post treatment) (FIG. 24F) and weight (g) (FIG. 24G) in mice administered VIR115 or control.

[0178] FIGS. 25A-F depict a series of graphs showing tumor volume and weight (g) over time (days post treatment) in mice following administration of VIR106 or control (FIGS. 25A and B), VIR113 or control (FIGS. 25C and D), or VIR115 or control (FIGS. 25E and F). *=p≤0.05; **=p≤0.01; ***=p≤0.001.

[0179] FIGS. 26A-B depict Western blot analyses showing expression of human phosphor-IRF3, mouse phosphor-IRF3, human IRF3, mouse IRF3, and beta actin, in B16-F10 cells (FIG. 26A) and in Hela S3 cells (FIG. 26B) infected with mock, iVIR13, VIR13, VIR93, VIR94, VIR100, VIR106, VIR113, VIR115, VIR123, or VIR127.

### DETAILED DESCRIPTION

[0180] Provided herein are isolated clonal strains that exhibit superior anti-tumorigenic activity and enhanced potential to evade host immune systems compared to other vaccinia viruses. In particular, the provided clonal strains are clonal isolates from a parent IHD-J obtained from ATCC® Catalog No. VR-156™. Also provided are preparations resulting from propagation of such isolated clonal strain. Also provided are recombinant vaccinia viruses derived from the isolated clonal strains that are attenuated by modification to delete or reduce expression of a viral gene or inactivate a viral protein. Also, provided are recombinant viruses that are further improved to evade host anti-viral defenses or to have further enhanced anti-tumor activities. For example, such recombinant viruses comprise a heterologous nucleic acid encoding proteins to escape inhibition by the complement system, to evade Natural Killer (NK) or T cells, to incorporate immune checkpoint molecules to enhance the immunostimulatory activity, or to provide anti-angiogenic activity. Provided recombinant viruses herein also include those armed with a viral inducible system to inhibit viral replication as a safety strategy, such as by mediating apoptosis in certain undesired infected cells, for example healthy cells. Specifically, provided herein is a recombinant oncolytic vaccinia virus, comprising: an inactivating mutation of B2R; a heterologous nucleic acid encoding interferon regulatory factor 3 (IRF3); and at least one heterologous nucleic acid encoding one or more cytokine and/or chemokine. In some embodiments, the at least one heterologous nucleic acid encoding one or more cytokine and/or chemokine comprises a heterologous nucleic acid encoding chemokine ligand 9 (CXCL9) and/or IL-12. Also specifically provided herein is a recombinant oncolytic virus, comprising: an inactivating mutation of at least one viral gene; and at least one heterologous nucleic acid encoding one or more heterologous gene product, wherein the one or more heterologous gene product is or comprises an immune modulating protein, a complement inhibitor, a T cell or NK cell evader, an anti-angiogenic protein, an interferon regulatory factor, or an apoptosis inducible protein, or a combination of any of the foregoing.

[0181] Oncolytic viruses (OVs) are viruses that replicate selectively or more efficiently in cancer cells than in non-cancer cells. In some cases, the ability to selectively infect, replicate within, and destroy cancer cells, often times while sparing healthy cells, is due to the ability to exploit biochemical differences between healthy and transformed cells during infection. Cancer cells are characterized by disrupted apoptosis pathways, the acquisition of new abilities to evade the immune system, and the ability to proliferate indefinitely, all characteristics that favor viral replication. Because one of the main challenges of cancer therapy is killing malignant cells while minimizing toxic effects, OVs are an appealing option since they rarely cause off-target toxicities.

[0182] Oncolytic viruses can be divided into three main groups: (1) viruses with a natural propensity to preferentially replicate in cancer cells while being non-pathogenic in humans such as parvovirus, myxoma virus, Newcastle disease virus, and reovirus; (2) viruses that are genetically engineered to ensure selective replication in cancer cells such as adenovirus, HSV, and vesicular stomatitis virus; and (3) viruses that have been attenuated by propagation in vitro to be used safely in humans. The latter group includes oncolytic viruses derived from vaccinia, also preferred because of their efficient replication, cell lysis, spread, host range and natural tropism for tumor tissues (Shen et al. (2004) Mol. Ther., 11:180). For example, vaccinia virus is more potent in replication and spread than adenovirus vectors.

[0183] Vaccinia virus (VV), the prototypical member of the Orthopoxvirus genus, replicates in the cytoplasm of a host cell. VV is a large, complex, enveloped virus that has a linear, double-stranded DNA genome of approximately 190,000 base pairs in length that is made up of a single continuous polynucleotide chain encoding for approximately 250 genes that can potentially express more than 200 proteins. See, e.g., McCraith al., (1982) PNAS, 97(9):4879-4884. In general, the nonsegmented, noninfectious genome is arranged such that centrally located genes are essential for virus replication (and are thus conserved), while genes near the two termini effect more peripheral functions such as host range and virulence. Vaccinia viruses practice differential gene expression by utilizing open reading frames (ORFs) arranged in sets that, as a general principle, do not overlap. See, e.g., Traktman, P., Chapter 27, Poxvirus DNA Replication, pp. 775-798, in DNA Replication in Eukaryotic Cells, Cold Spring Harbor Laboratory Press (1996). VV's ability for rapid replication results in efficient lysis of infected cells as well as spread to other tumor cells upon successive rounds of replication, leading to profound localized destruction of the tumor. The VV genome encodes — 250 genes and can accept as much as 20 kb of foreign DNA, making it ideal as a gene delivery vehicle. The recombinant VV vectors are being developed to deliver eukaryotic genes, such as tumor-associated antigens, to the tumors and thus facilitate an induction of the host immune system directed to kill the cancer cells. However, a limiting factor in the use of VVs as cancer treatment delivery vectors is the strong neutralizing antibody response induced by the injection of VV into the bloodstream that limits the ability of the virus to persist and spread and prevents vector re-dosing. In some cases, neutralizing antibodies recognize and bind viral glycoproteins with high affinity and prevent virus interaction with host cell receptors, leading to virus neutralization.

[0184] Vaccinia virus replicates in the cytoplasm of infected cells where assembly of progeny starts in specialized areas called viral factories. During replication, three morphologically and antigenically distinct forms of the virus are produced: the intracellular mature virions (IMV), the intracellular enveloped virions (IEV), and extracellular virions. A subset of IMV, the first infectious progeny produced, are trafficked to the trans-Golgi network (TGN), where they are enveloped with two additional membranes to produce IEV. IEV are transported through the cytoplasm to the cell periphery, where the outermost membrane fuses with the plasma membrane to release a double membraned form, termed EV. EV that remain on the cell surface are called cell-associated enveloped virion (CEV), while EV that are no longer attached to the cell surface are called extracellular enveloped virion (EEV). IMV is the most abundant infectious form and is thought to be responsible for spread between hosts; the CEV is believed to play a role in cell-to-cell spread; and the EEV is thought to be important for long range dissemination within the host organism. In particular, EEV has been implicated in long-range virus spread dissemination in vivo. See, e.g., Blasco et al., (1993) Journal of Virology, 67(6):3319-3325. The outer proteins of EEV may induce protective immunity to the virus (Blaso and Moss (1992) J. Virol., 66:4170-4179). There is, however, a high degree of variation in the amount of EEV generated by vaccinia virus strains.

[0185] Attenuated vaccinia virus strains have been developed for therapeutic and diagnostic applications. For example, attenuated viruses include recombinant viruses that are modified in one or more viral genes that results in loss or reduced expression of a viral gene or inactivation of a viral protein. Nevertheless, although vaccinia is a well-studied attenuated virus with anti-tumorigenic properties, many strains of vaccinia, including recombinant strains, exhibit variations in virulence and safety that make many unsuitable for clinical application. Therefore, there is a need for improved vaccinia strains with enhanced anti-tumorigenic properties and low cytotoxicity, as these are highly desirable as an effective oncolytic therapy. The oncolytic viruses and methods described herein address this need.

[0186] Various approaches have been studied to improve OV antitumoral activity, mainly focused on virus replication and spread, as replication of the virus is generally correlated with cancer cell killing efficacy. However, other aspects of viral infection such as augmentation of host antitumor immune response, induction of apoptosis, and control of tumor angiogenesis are also important aspects of cancer viral therapy (Davola, M. E. and K. L. Mossman (2019) Oncoimmunology 8(6): e1581528).

[0187] Provided herein are isolated clonal viruses derived from the vaccinia virus strain known as IHD-J (ATCC® Catalog No. VR-156TH). IHD-J is a vaccinia virus strain that is closely related to Western Reserve (WR) strain but that exhibits 10 to 40 times more EEV and spread to distant cells much more efficiently than did WR (Blaso and Moss, 1992). However, strains that exhibit longer range spread may not exhibit sufficient anti-tumorigeneic activity for oncolytic virus therapy.

[0188] The provided embodiments are based on the identification of a particular clonal isolate of IHD-J, designated VIP02, that not only exhibits a high percentage of EEV but also exhibits the highest anti-tumorigenic activity among other clonal isolates from the same strain. Moreover, results demonstrated that a single intravenous delivery of the clonal isolate at a low dose significantly inhibited tumor growth in a mouse syngeneic tumor model, and exhibited potent tumor cell killing in vitro against multiple tumor cells in both 2-D and 3-D cultures. Also provided herein are vaccinia virus strains with sequence features of the VIP02 clonal isolate.

[0189] Provided embodiments also relate to recombinant viruses in which heterologous nucleic acid can be introduced in the isolated clonal virus with enhanced anti-tumorigenic properties to further enhance the anti-tumorigenic properties of the isolated clonal virus while minimizing their cytotoxic effects on healthy cells.

[0190] In some embodiments, the selected clonal strains and their recombinant derived strains are oncolytic virus candidates for tumor diagnosis and therapy. In some embodiments, the isolated clonal strains of vaccinia and their recombinant derived strains can be used as therapeutic viruses for use in the treatment of proliferative disorders, including cancer, hyperplasia, metastasis and tumors, and for use in other therapeutic and/or diagnostic methods as described herein. In some other embodiments, the clonal strains can be used in methods of vaccination. In other embodiments, the isolated clonal strains and their recombinant derived strains can be used as parental vaccinia viruses to generate recombinant oncolytic viruses.

[0191] All publications, including patent documents, scientific articles and databases, referred to in this application are incorporated by reference in their entirety for all purposes to the same extent as if each individual publication were individually incorporated by reference. If a definition set forth herein is contrary to or otherwise inconsistent with a definition set forth in the patents, applications, published applications and other publications that are herein incorporated by reference, the definition set forth herein prevails over the definition that is incorporated herein by reference.

[0192] The section headings used herein are for organizational purposes only and are not to be construed as limiting the subject matter described.

### I. Isolated Clonal Virus Strains and Attenuated Strains Thereof

[0193] Provided herein are isolated clonal vaccinia virus (VACV) strains of vaccinia virus strain IHD-J (ATCC® Catalog No. VR-156™) or that exhibit features of a clonal virus strain isolated therefrom. The parental IHD-J strain is heterogenous in sequence. It is found herein that certain vaccinia virus clones with enhanced anti-tumorigenic properties can be isolated from the IHD-J parental vaccinia virus preparation or mixture.

[0194] In some embodiments, the clonal strains provided herein are present in a virus preparation propagated from IHD-J. For example, the clonal strains or preparations thereof can be obtained by isolating IHD-J derived clone isolates from cell cultures in which parental IHD-J, or a variant thereof, has been propagated. The clonal isolates provided herein were obtained by passage of the IHD-J virus in confluent CV-1, from African green monkey kidney fibroblast cell cultures, growing in 6-well plates infected with a series of dilutions of the vaccinia virus strains.

[0195] In some embodiments, the clonal strains do not contain non-viral heterologous nucleic acid that contains an open reading frame encoding a non-viral heterologous protein. In other embodiments, the clonal strains can be used as a parental sequence for generating a recombinant virus that is modified with a heterologous nucleic acid encoding a non-viral heterologous protein.

[0196] In some embodiments, the IHD-J clonal strain provided herein is designated VIP02 and has the nucleotide sequence set forth in SEQ ID NO: 1.

[0197] In some embodiments, provided herein is a recombinant oncolytic vaccinia virus, comprising: an inactivating mutation of B2R; a heterologous nucleic acid encoding interferon regulatory factor 3 (IRF3); and at least one heterologous nucleic acid encoding one or more cytokine and/or chemokine. In some embodiments, the at least one heterologous nucleic acid encoding one or more cytokine and/or chemokine comprises a heterologous nucleic acid encoding chemokine ligand 9 (CXCL9) and/or IL-12.

[0198] In some embodiments, also provided herein is a recombinant oncolytic virus, comprising: an inactivating mutation of at least one viral gene; and at least one heterologous nucleic acid encoding one or more heterologous gene product, wherein the one or more heterologous gene product is or comprises an immune modulating protein, a complement inhibitor, a T cell or NK cell evader, an anti-angiogenic protein, an interferon regulatory factor, or an apoptosis inducible protein, or a combination of any of the foregoing.

[0199] In some embodiments, provided vaccinia virus clonal strains have a nucleic acid genome that has at least 95% sequence identity to SEQ ID NO:1. In some embodiments, provided vaccinia virus clonal strains have a nucleic acid genome that has at least 96% sequence identity to SEQ ID NO:1. In some embodiments, provided vaccinia virus clonal strains have a nucleic acid genome that has at least 97% sequence identity to SEQ ID NO:1. In some embodiments, provided vaccinia virus clonal strains have a nucleic acid genome that has at least 98% sequence identity to SEQ ID NO:1. In some embodiments, provided vaccinia virus clonal strains have a nucleic acid genome that has at least 99% sequence identity to SEQ ID NO:1. In some embodiments, provided vaccinia virus clonal strains have a nucleic acid genome that has at least 99.1% sequence identity to SEQ ID NO:1. In some embodiments, provided vaccinia virus clonal strains have a nucleic acid genome that has at least 99.2% sequence identity to SEQ ID NO:1. In some embodiments, provided vaccinia virus clonal strains have a nucleic acid genome that has at least 99.3% sequence identity to SEQ ID NO:1. In some embodiments, provided vaccinia virus clonal strains have a nucleic acid genome that has at least 99.4% sequence identity to SEQ ID NO:1. In some embodiments, provided vaccinia virus clonal strains have a nucleic acid genome that has at least 99.5% sequence identity to SEQ ID NO:1. In some embodiments, provided vaccinia virus clonal strains have a nucleic acid genome that has at least 99.6% sequence identity to SEQ ID NO:1. In some embodiments, provided vaccinia virus clonal strains have a nucleic acid genome that has at least 99.7% sequence identity to SEQ ID NO:1. In some embodiments, provided vaccinia virus clonal strains have a nucleic acid genome that has at least 99.8% sequence identity to SEQ ID NO:1. In some embodiments, provided vaccinia virus clonal strains have a nucleic acid genome that has at least 99.9% sequence identity to SEQ ID NO:1.

[0200] In some of any such embodiments, the provided vaccinia virus clonal strain does not have a nucleic acid genome with the sequence of amino acids set forth in SEQ ID NO:2 (IHD-W1). In some embodiments, the provided clonal strains have a sequence of nucleotides that has less than 100% sequence identity to SEQ ID NO:2 and at least 85%, 86%, 87%, 88%, 89%, 90%, 91%, 92%, 93%, 94%, 05%, 96%, 97%, 98%, 99%, 99.5% or 99.9% sequence identity to SEQ ID NO:2. In some embodiments, the provided clonal strains has a sequence of nucleotides that differs from SEQ ID NO:2 by 1, 2, 3, 4, 5, 6, 7, 8, 9, 10, 11, 12, 13, 14, 15, 16, 17, 18, 19, 20 or more nucleotides. Such IHD-J clonal viruses provided herein include viruses that differ in one or more open reading frames (ORF) compared to the IHD-W1 strain that has a sequence of nucleotides set forth in SEQ ID NO: 2. For example, IHD-J clonal viruses provided herein include viruses that differ in one or more ORF compared to the IHD-W1 strain that has a sequence of amino acids set forth in SEQ ID NO: 2. The IHD-J clonal virus strains provided herein can contain a nucleotide deletion or mutation in any one or more nucleotides in any ORF compared to SEQ ID NO: 2, or can contain an addition or insertion of viral DNA compared to SEQ ID NO: 2.

[0201] In some embodiments, the provided vaccinia virus clonal strains have a nucleic acid genome that has at least 95% sequence identity to SEQ ID NO:1 and exhibits sequence features of SEQ ID NO:1. For instance, as described herein in Table E1 exemplary VIP02 clonal isolates are characterized by deletion or mutation in one or more nucleotides as compared to SEQ ID NO:2, including one or more mutations in ORFs of SEQ ID NO:2. With reference to ORFs, ORFs are numbered in consecutive order starting from 001. In other embodiments, vaccinia virus open reading frames may also be designated by a capital letter indicating a HindIII restriction endonuclease fragment, a number indicating the position in the HindIII fragment, and a letter (L or R) indicating the direction of transcription, e.g., KSL. The corresponding protein is designated by a capital letter and number, e.g., K5. In some embodiments, the nucleotide change is in a non-ORF region of the sequence.

[0202] In some embodiments, a provided vaccinia virus clonal strain includes or is characterized by a variant 017 open reading frame (ORF) encoding an amino acid sequence that has at least 95% sequence identity to SEQ ID NO: 57 and that contains an amino acid at position 66 other than alanine. In some embodiments, the amino acid at position 66 is a polar uncharged amino acid. In some embodiments, the amino acid at position 66 is a serine (S), Threonine (T), Asparagine (N) or Glutamine (E). In some embodiments, the amino acid at position 66 is a T. In some embodiments, the provided clonal strain includes a variant 017 ORF with a A66T mutation compared to the 017 ORF set forth in SEQ ID NO:2. In some embodiments, the variant 017 ORF encodes an amino acid sequence that contains any of the above amino acid changes at position 66 and has at least 96% sequence identity to SEQ ID NO:57. In some embodiments, the variant 017 ORF encodes an amino acid sequence that contains any of the above amino acid changes at position 66 and has at least 97% sequence identity to SEQ ID NO:57. In some embodiments, the variant 017 ORF encodes an amino acid sequence that contains any of the above amino acid changes at position 66 and has at least 98% sequence identity to SEQ ID NO:57. In some embodiments, the variant 017 ORF encodes an amino acid sequence that contains any of the above amino acid changes at position 66 and has at least 99% sequence identity to SEQ ID NO:57. In some embodiments, the variant 017 ORF has the sequence set forth in SEQ ID NO:57. In some embodiments, such a vaccinia virus clonal strain has a nucleic acid genome that has at least 95%, 96%, 97%, 98%, 99%, 99.5%, 99.99% sequence identity to SEQ ID NO:1.

[0203] In some embodiments, a provided clonal strain includes or is characterized by a variant 038 (K5L) ORF that has a nucleotide insertion to effect a frameshift mutation, wherein the 038 (K5L) gene product is altered. In some embodiments, the nucleotide insertion is insertion of a guanine (G) corresponding to insertion after nucleotide position 32135 of SEQ ID NO:1. In some embodiments, the full-length sequence of the 038 (K5L) gene product is set forth in SEQ ID NO:59. In some embodiments, the variant 038 (K5L) ORF is set forth in SEQ ID NO:58. In some embodiments, such a vaccinia virus clonal strain has a nucleic acid genome that has at least 95%, 96%, 97%, 98%, 99%, 99.5%, 99.99% sequence identity to SEQ ID NO:1. In some embodiments, the variant 038 (K5L) ORF is characterized by being altered compared to the nucleic acid set forth in SEQ ID NO: 73, or the amino acid sequence set forth in SEQ ID NO: 74.

[0204] In some embodiments, a provided clonal strain includes or is characterized by a variant variant 059 (E2L) encoding an amino acid sequence that has at least 95% sequence identity to SEQ ID NO: 60 and that contains an amino acid at position 419 other than leucine. In some embodiments, the amino acid at position 419 is a hydrophobic amino acid other than leucine. In some embodiments, the amino acid at position 419 is an alanine (A), valine (V), isoleucine (I), methionine (M), phenylalanine (F), tyrosine (Y) or tryptophan (W). In some embodiments, the amino acid at position 419 is F. In some embodiments, the provided clonal strain includes a variant 059 (E2L) ORF with a L419F mutation compared to the 059 (E2L) ORF set forth in SEQ ID NO:2. In some embodiments, the variant 059 (E2L) ORF encodes an amino acid sequence that contains any of the above amino acid changes at position 419 and has at least 96% sequence identity to SEQ ID NO:60. In some embodiments, the variant 059 (E2L) ORF encodes an amino acid sequence that contains any of the above amino acid changes at position 66 and has at least 97% sequence identity to SEQ ID NO:60. In some embodiments, the variant 059 (E2L) ORF encodes an amino acid sequence that contains any of the above amino acid changes at position 419 and has at least 98% sequence identity to SEQ ID NO:60. In some embodiments, the variant 059 (E2L) ORF encodes an amino acid sequence that contains any of the above amino acid changes at position 66 and has at least 99% sequence identity to SEQ ID NO:60. In some embodiments, the variant 059 (E2L) ORF has the sequence set forth in SEQ ID NO:60. In some embodiments, such a vaccinia virus clonal strain has a nucleic acid genome that has at least 95%, 96%, 97%, 98%, 99%, 99.5%, 99.99% sequence identity to SEQ ID NO:1.

[0205] In some embodiments, a provided clonal strain includes or is characterized by a variant 104 (H4L) ORF encoding an amino acid sequence that has at least 95% sequence identity to SEQ ID NO: 61 and that contains an amino acid at position 591 other than asparagine (N). In some embodiments, the amino acid at position 591 is a negatively charged amino acid. In some embodiments, the amino acid at position 591 is aspartic acid (D) or glutamic acid (E). In some embodiments, the amino acid at position 591 is D. In some embodiments, the provided clonal strain includes a variant 104 (H4L) ORF with a N591D mutation compared to the 104 (H4L) ORF set forth in SEQ ID NO:2. In some embodiments, the variant 104 (H4L) ORF encodes an amino acid sequence that contains any of the above amino acid changes at position 591 and has at least 96% sequence identity to SEQ ID NO:61. In some embodiments, the variant 104 (H4L) ORF encodes an amino acid sequence that contains any of the above amino acid changes at position 591 and has at least 97% sequence identity to SEQ ID NO:61. In some embodiments, the variant 104 (H4L) ORF encodes an amino acid sequence that contains any of the above amino acid changes at position 591 and has at least 98% sequence identity to SEQ ID NO:61. In some embodiments, the variant 104 (H4L) ORF encodes an amino acid sequence that contains any of the above amino acid changes at position 591 and has at least 99% sequence identity to SEQ ID NO:61. In some embodiments, the variant 104 (H4L) ORF has the sequence set forth in SEQ ID NO:61. In some embodiments, such a vaccinia virus clonal strain has a nucleic acid genome that has at least 95%, 96%, 97%, 98%, 99%, 99.5%, 99.99% sequence identity to SEQ ID NO:1.

[0206] In some embodiments, a provided clonal strain includes or is characterized by a variant 182 (A56R) ORF that has a nucleotide deletion to effect a frameshift mutation, wherein the 182 (A56R) gene product is altered. In some embodiments, the nucleotide deletion is deletion of two contiguous nucleotides corresponding to nucleotides after nucleotide position 165972 of SEQ ID NO:2. In some embodiments, the 182 (A56R) gene product is set forth in SEQ ID NO:63. In some embodiments, the variant 182 (A56R) ORF is set forth in SEQ ID NO:62. In some embodiments, such a vaccinia virus clonal strain has a nucleic acid genome that has at least 95%, 96%, 97%, 98%, 99%, 99.5%, 99.99% sequence identity to SEQ ID NO:1. In some embodiments, the variant 182 (A56R) ORF is characterized by being altered compared to the nucleic acid set forth in SEQ ID NO: 75, or the amino acid sequence set forth in SEQ ID NO: 76

[0207] In some embodiments, a provided clonal strain is characterized by a nucleic acid genome that includes at least one of any of the above mutations in the 017 ORF, 038 (K5L) ORF, 059 (E2L) ORF, 104 (H4L) ORF and 182 (A56R) ORF. In some embodiments, a provided clonal strain is characterized by a nucleic acid genome that includes at least two of any of the above mutations in the 017 ORF, 038 (K5L) ORF, 059 (E2L) ORF, 104 (H4L) ORF and 182 (A56R) ORF. In some embodiments, a provided clonal strain is characterized by a nucleic acid genome that includes at least three of any of the above mutations in the 017 ORF, 038 (K5L) ORF, 059 (E2L) ORF, 104 (H4L) ORF and 182 (A56R) ORF. In some embodiments, a provided clonal strain is characterized by a nucleic acid genome that includes at least four of any of the above mutations in the 017 ORF, 038 (K5L) ORF, 059 (E2L) ORF, 104 (H4L) ORF and 182 (A56R) ORF. In some embodiments, at least one of the mutation is in the 017 ORF. In some embodiments, at least one of the mutation is in the 038 (K5L) ORF. In some embodiments, at least one of the mutation is in the 059 (E2L) ORF. In some embodiments, at least one of the mutation is in the 104 (H4L) ORF. In some embodiments, at least one of the mutation is in the 182 (A56R) ORF. In some embodiments, such a vaccinia virus clonal strain has a nucleic acid genome that has at least 95%, 96%, 97%, 98%, 99%, 99.5%, 99.99% sequence identity to SEQ ID NO:1.

[0208] In some embodiments, a provided clonal strain is characterized by a nucleic acid genome that includes each of the above mutations in the 017 ORF, 038 (K5L) ORF, 059 (E2L) ORF, 104 (H4L) ORF and 182 (A56R) ORF. In some embodiments, a provided clonal strain is characterized by a nucleic acid genome containing a variant 017 ORF encoding the amino acid sequence set forth in SEQ ID NO:57, a variant 038 (K5L) ORF set forth in SEQ ID NO: 58, a variant of 038 (K5L) encoding the amino acid sequence set forth in SEQ ID NO:59, a variant 059 (E2L) ORF encoding the amino acid sequence set forth in SEQ ID NO: 60, a variant 104 (H4L) ORF encoding the amino acid sequence set forth in SEQ ID NO: 61, a variant 182 (A56R) ORF set forth in SEQ ID NO: 62, and a variant of 182 (A56R) encoding the amino acid sequence set forth in SEQ ID NO: 63. In some embodiments, such a vaccinia virus clonal strain has a nucleic acid genome that has at least 95%, 96%, 97%, 98%, 99%, 99.5%, 99.99% sequence identity to SEQ ID NO:1.

[0209] In some embodiments, provided vaccinia virus clonal strains have a nucleic acid genome that has at least 95% sequence identity to SEQ ID NO:1 and is characterized by one or more of: (i) a guanine (G) at the position corresponding to position 7770 of SEQ ID NO: 1; (ii) a thymine (T) at the position corresponding to position 15261 of SEQ ID NO: 1; (iii) a G at the position corresponding to position 32136 of SEQ ID NO: 1; (iv) a G at the position corresponding to position 49455 of SEQ ID NO: 1; (v) a cytosine (C) at the position corresponding to position 92969 of SEQ ID NO: 1; (vi) the contiguous sequence of nucleotides CACTTATATAT (set forth in SEQ ID NO: 77) at the positions corresponding to positions 106870 to 106880 of SEQ ID NO: 1; (vii) the nucleic acid sequence GTTTTCATTA (set forth in SEQ ID NO: 78) at the positions corresponding to positions 111267 to 111276 of SEQ ID NO: 1; (viii) an adenine (A) at the position corresponding to position 162715 of SEQ ID NO: 1; (ix) the nucleic acid sequence TACAGACACC (set forth in SEQ ID NO: 79) at the positions corresponding to positions 165844 to 185853 of SEQ ID NO: 1; and (x) a C at the position corresponding to position 187805 of SEQ ID NO: 1.

[0210] In some embodiments, the vaccinia virus clonal strain provided herein include those that have a nucleotide sequence that is characterized by one point mutation, insertion, and/or deletion selected from any one of (i)-(x) above.

[0211] In some embodiments, the vaccinia virus clonal strain provided herein include those that have a nucleotide sequence that is characterized by one point mutation, insertion, and/or deletion selected from any two of (i)-(x) above.

[0212] In some embodiments, the vaccinia virus clonal strain provided herein include those that have a nucleotide sequence that is characterized by one point mutation, insertion, and/or deletion selected from any three of (i)-(x) above.

[0213] In some embodiments, the vaccinia virus clonal strain provided herein include those that have a nucleotide sequence that is characterized by one point mutation, insertion, and/or deletion selected from any four of (i)-(x) above.

[0214] In some embodiments, the vaccinia virus clonal strain provided herein include those that have a nucleotide sequence that is characterized by one point mutation, insertion, and/or deletion selected from any five of (i)-(x) above.

[0215] In some embodiments, the vaccinia virus clonal strain provided herein include those that have a nucleotide sequence that is characterized by one point mutation, insertion, and/or deletion selected from any six of (i)-(x) above.

[0216] In some embodiments, the vaccinia virus clonal strain provided herein include those that have a nucleotide sequence that is characterized by one point mutation, insertion, and/or deletion selected from any seven of (i)-(x) above.

[0217] In some embodiments, the vaccinia virus clonal strain provided herein include those that have a nucleotide sequence that is characterized by one point mutation, insertion, and/or deletion selected from any eight of (i)-(x) above.

[0218] In some embodiments, the vaccinia virus clonal strain provided herein include those that have a nucleotide sequence that is characterized by one point mutation, insertion, and/or deletion selected from any nine of (i)-(x) above.

[0219] In some embodiments, the vaccinia virus clonal strain provided herein include those that have a nucleotide sequence that is characterized by one point mutation, insertion, and/or deletion selected from each of (i)-(x) above.

[0220] A. Exemplary Features

[0221] In some embodiments, the IHD-J derived clones exhibited better anti-tumorigenicity and less pathogenicity/toxicity in in vitro and/or in vivo assays compared to the starting virus preparation or mixture or other reference strain or isolate, including recombinant strains. In some embodiments, the IHD-J derived clones exhibited better anti-tumorigenicity properties compared to the starting virus preparation or mixture or other reference strain or isolate, including recombinant strains. In some embodiments, the IHD-J derived clones exhibited less toxicity compared to the starting virus preparation or mixture or other reference strain or isolate, including recombinant strains. In some embodiments, the IHD-J derived clones exhibited similar anti-tumorigenicity properties and/or similar toxicity compared to the starting virus preparation or mixture or other reference strain or isolate, including recombinant strains.

[0222] Provided herein are IHD-J clonal isolate strains that exhibited improved properties compared to the starting virus preparation or mixture or other reference strain or isolate, including recombinant strains in the absence of inserted heterologous DNA. In some embodiments, the IHD-J clonal isolate strains exhibited better anti-tumorigenicity and less toxicity compared to the starting virus preparation or mixture or other reference strain or isolate, including recombinant strains in the absence of inserted heterologous DNA. In some embodiments, the IHD-J clonal isolate strains exhibited improved or better anti-tumorigenic activity compared to the starting virus preparation or mixture or other reference strain or isolate, including recombinant strains in the absence of inserted heterologous DNA. In some embodiments, IHD-J clonal isolate strains exhibited less toxicity compared to the starting virus preparation or mixture or other reference strain or isolate, including recombinant strains in the absence of inserted heterologous DNA. In some embodiments, IHD-J clonal isolate strains exhibited similar toxicity and/or anti-tumorigenic activity compared to the starting virus preparation or mixture or other reference strain or isolate, including recombinant strains in the absence of inserted heterologous DNA.

[0223] In some embodiments, clonal isolate strains that exhibited improved or better anti-tumorigenic activity compared to the starting virus preparation or mixture or other reference strain or isolate, including recombinant strains, exhibited at or between 120% to 1000%, for example, at least 120%, 130%, 140%, 150%, 160%, 170%, 180%, 190%, 200%, 250%, 300%, 400%, 500%, 1000% or more of the anti-tumorigenic activity of the reference virus preparation (starting virus preparation or mixture or other reference strain or isolate, including recombinant strains) in an assay or method to assess a parameter indicative of anti-tumorigenicity. The anti-tumorigenicity can be determined using any of the in vitro or in vivo tests for parameters indicative of anti-tumorigenicity as described herein.

[0224] In some embodiments, the clonal isolates provided herein exhibited increased production of extracellular enveloped virus (EEV) compared to the starting virus preparation or mixture or other reference strain or isolate, including recombinant strains. Vaccinia virus replicates in cells and produces both intracellular virus (IMV, intracellular mature virus; IEV, intracellular enveloped virus) and extracellular virus (EEV, extracellular enveloped virus; CEV, cell-associated extracellular virus) (Smith et al. (1998) Adv Exp Med Biol. 440: 395-414). IMV represents approximately 99% of virus yield following replication by wild-type vaccinia virus strains. The IMV virus form is relatively stable in the outside environment, and is primarily responsible for spread between individuals; however, IMV virus does not spread efficiently within the infected host due to inefficient release from cells and sensitivity to complement and/or antibody neutralization. By contrast, the EEV form is released into the extracellular milieu and typically represents only approximately 1% of the viral yield (Smith et al. (1998) Adv Exp Med Biol. 440: 395-414). EEV is responsible for viral spread within the infected host and is relatively easily degraded outside of the host. In addition, the EEV form has developed several mechanisms to inhibit its neutralization within the bloodstream. EEV is relatively resistant to complement (Vanderplasschen et al. (1998) Proc Natl Acad Sci USA. 95(13): 7544-9) due to the incorporation of host cell inhibitors of complement into its outer membrane coat and secretion of vaccinia virus complement control protein (VCP) into local extracellular environment. In addition, EEV is relatively resistant to neutralizing antibody effects compared to IMV (Smith et al. (1997) Immunol Rev. 159: 137-54; Vanderplasschen et al. (1997) J Gen Virol. 78 (Pt 8): 2041-8). EEV is released at earlier time points following infection (e.g., 4-6 hours) than is IMV (which is only released during/after cell death), and therefore, spread of the EEV form is faster (Blasco et al. (1993) J Virol. 67(6):3319-25).

[0225] Since EEV is relatively resistant to complement effects and to antibody-mediated neutralization, when it is grown in a cell type from the same species, this virus form will have enhanced stability and retain activity longer in the blood following intravenous administration (Smith et al. (1998) Adv Exp Med Biol. 440: 395-414; Vanderplasschen et al., (1998) Proc Natl Acad Sci USA. (13):7544-9). This is particularly important for repeat administration once neutralizing antibody levels have increased and anti-cancer therapies require repeat administration. Therefore, increasing the EEV form of vaccinia, and other poxviruses, may result in enhanced systemic efficacy.

[0226] In some embodiments, the clonal isolates provided herein exhibited increased production of extracellular enveloped virus (EEV) compared to other clonal isolates derived from the IDH-J or the Copenhagen strains. In some embodiments, the clonal isolates provided herein exhibited increased production of extracellular enveloped virus (EEV) such as at or between 120% to 1000%, for example, at least 120%, 130%, 140%, 150%, 160%, 170%, 180%, 190%, 200%, 250%, 300%, 400%, 500%, 1000% or more of the production of extracellular enveloped virus (EEV) compared to the starting virus preparation or mixture or other reference strain or isolate, including recombinant strains.

[0227] In some embodiments, greater than at or about 5%, 6%, 7%, 8%, 9%, 10%, 11%, 12%, 13%, 14%, 15%, 16%, 17%, 18%, 19%, 20% of the infectious particles after cell infection are EEV. In some embodiments, greater than 5% of the infectious particles after cell infection are EEV. In some embodiments, greater than 10% of the infectious particles after cell infection are EEV. In some embodiments, greater than 15% of the infectious particles after cell infection are EEV. In some embodiments, greater than 20% of the infectious particles after cell infection are EEV.

[0228] In other embodiments, the clonal isolates provided herein exhibited decreased tumor and/or metastasis growth or increased tumor and/or metastasis shrinkage in in vitro or in vivo assays or models. Tumors can be harvested from the subjects, weighed, and the weight compared to tumors harvested from tumor-bearing subjects that were infected with virus from the starting virus preparation or mixture or other reference strain or isolate, including recombinant strains. The weight of the tumors can also be compared to tumors harvested from control treated subjects at the same time post-infection. The weight can be presented as tumor volume/weight and/or a ratio of the tumor volume/weight (tumor weight control treated animals/tumor weights of clonal isolate-treated subjects). It is understood that a ratio of tumor weight that is 1.2 or 5, for example, means that the virus effects a decreased tumor/metastasis weight/growth or and increased tumor/metastasis shrinkage, and 120% or 500% of anti-tumorigenicity activity compared to the reference or control.

[0229] In some embodiments, the clonal isolates provided herein exhibited decreased tumor and/or metastasis growth or increased tumor and/or metastasis shrinkage. In some embodiments, the tumor/metastasis volume/weight ratio is greater than 1.0, for example, that is greater than 1.1, 1.2, 1.3, 1.4, 1.5, 1.6, 1.7, 1.8, 1.9, 2, 3, 4, 5, 6, 7, 8, 9, 10, 20, 30, 40, 50 or more. In some embodiments, the increased tumor/metastasis shrinkage is at least 120% to 500%, for example, 150%, 200%, 250%, 300%, 350%, 400%, 450%, 500%, or more.

[0230] In some embodiments, the clonal isolates provided herein exhibit similar anti-tumorigenic activity compared to the starting virus preparation or mixture or other reference strain or isolate, including recombinant strains such as between 70% to 120%, for example, at least or about or 70%, 80%, 90%, 95%, 100%, 110%, 115% or 120% of the anti-tumorigenic activity of the parental virus preparation or mixture or other reference virus strain in an assay or method to assess a parameter indicative of toxicity.

[0231] In some embodiments, the clonal isolates provided herein exhibit decreased tumor and/or metastasis volume, size or weight in in vitro or in vivo assays or models. In some embodiments, the clonal isolates provided herein exhibit decreased tumor and/or metastasis volume such as at or between 0% to 99%, for example, less than 99%, 98%, 97%, 96%, 95%, 90%, 80%, 70%, 60%, 50%, 40%, 30%, 20%, 10%, 5% or less of the toxicity or more of tumor and/or metastasis volume, size or weight compared to the starting virus preparation or mixture or other reference strain or isolate, including recombinant strains.

[0232] Parameters indicative of toxicity or virulence include, but are not limited to, reduced percentage of cell survival in 2-D (2 dimensional) and 3-D (3 dimensional) cell cultures, decrease in body weight in a subject, presence of fever, rash or other allergy, fatigue or abdominal pain, tissue distribution of the virus, reduced or decreased survival rate of the subject, induction of an immune response in the subject, amount of tumor antigens that are released and decreased rate of pock formation. The toxicity or virulence can be determined using any in vitro or in vivo tests that are well known to those of skill in the art.

[0233] In some embodiments, the clonal isolates provided herein exhibited less toxicity compared to the starting virus preparation or mixture or other reference strain or isolate, including recombinant strains such as at or between 0% to 99%, for example, less than 99%, 98%, 97%, 96%, 95%, 90%, 80%, 70%, 60%, 50%, 40%, 30%, 20%, 10%, 5% or less of the toxicity of the starting virus preparation or mixture or other reference strain or isolate, including recombinant strains in an assay or method to assess a parameter indicative of toxicity. In some embodiments, the IHD-J clonal isolates provided herein exhibit at or between 0% to 99%, for example, less than 99%, 98%, 97%, 96%, 95%, 90%, 80%, 70%, 60%, 50%, 40%, 30%, 20%, 10%, 5% or less of the toxicity compared to other clonal isolates derived from the IHD-J or the Copenhagen strains. In some embodiments, the method to assess a parameter indicative of toxicity includes quantifying the percentage of cell survival in cell cultures. In some embodiments, the method to assess a parameter indicative of toxicity includes quantifying the percentage of cell survival in 2-D (two-dimensional) and 3-D (three-dimensional) cell cultures. (Should I mention all the cell types used in the examples?).

[0234] In some embodiments, the clonal isolates provided herein exhibited similar toxicity and/or cytotoxicity compared to the to the starting virus preparation or mixture or other reference strain or isolate, including recombinant strains such as between 70% to 120%, for example, at least or about or 70%, 80%, 90%, 95%, 100%, 110%, 115% or 120% of the anti-tumorigenic activity of the starting virus preparation or mixture or other reference strain or isolate, including recombinant strains in an assay or method to assess a parameter indicative of toxicity.

[0235] In particular embodiments, clonal isolates provided herein exhibited improved anti-tumorigenicity and were less toxic (i.e. less virulent) compared to the starting virus preparation or mixture or other reference strain or isolate, including recombinant strains. For example, when administered to a subject in an amount effective to induce anti-tumorigenic activity the clonal strains were less toxic (i.e. less virulent). For treatment of a human subject or other similarly sized subject, exemplary therapeutic amounts of a clonal strain are in the range of about or between 1×10⁶ to 1×10¹⁴ pfu, 1×10⁷ to 1×10¹⁰ pfu, such as 1×10⁹ to 1×10¹⁰ pfu, for example at least or about 1×10⁶, 1×10⁷, 1×10⁸, 1×10⁹, 2×10⁹, 3×10⁹, 4×10⁹, or 5×10⁹ pfu. For treatment of a mouse or other similarly sized subject, exemplary therapeutic amounts of a clonal strain are in the range of about or between 1×10³ to 1×10⁹ pfu, such as 1×10⁵ to 1×10⁷ pfu, for example at least or about or 1×10³, 1×10 4, 1×10⁵, 1×10 6, 2×10⁶, 3×10⁶, 4×10⁶ or 5×10−⁶ pfu. Such effective amounts can be empirically determined by a person skilled in the art and depend on a variety of factors including the subject, the condition or disease being treated, the stage or progression of the disease, the type of cancer, tumor, metastasis, or hyperplasia, and other factors. Dosage regimes can vary. In some embodiments, the clonal isolates provided herein, over the course of a treatment regime, exhibit 100% survival of subjects and are not associated with effecting decreased or reduced weight of a subject over the course of treatment. In one embodiment, the clonal strains provided herein, when administered to a subject, exhibit a survival rate that is increased compared to the survival rate of subjects administered with the same or similar therapeutic amount of other clonal isolates. In some embodiments, the clonal isolates provided herein, over the course of a treatment regime, exhibited 100% tumor growth inhibition.

[0236] Isolated clonal viruses provided herein can be derived from plaque isolation of the IHD-J strain that is propagated through repeated passage in cell lines. In some embodiments, the clonal isolates provided herein can be obtained by passage of virus in embryonated chicken eggs culture, in chicken embryo fibroblasts (CEF), Hela S3 cells, confluent CV-1 cells, or BHK-21 cells. In some embodiments, the clonal isolates provided herein can be obtained by passage of virus in confluent CV-1, African green monkey kidney fibroblast cell cultures, growing in 6-well plates infected with a series of dilutions of the vaccinia virus strains. The clonal isolates provided herein are homogenous in sequence. Exemplary clonal viruses provided herein are clonal isolates that exhibit enhanced anti-tumorigenic properties and reduced toxicity.

### II. Attenuated Vaccinia Virus Strains

[0237] Also provided here are recombinant vaccinia virus that exhibit one or more modifications to attenuate virus toxicity compared to the wild-type or parental strain of the virus, such as compared to any of the isolated clonal virus strains described in Section I. In some embodiments, provided herein is a recombinant vaccinia virus that is attenuated, such as has reduced toxicity, compared to the vaccinia virus strain VIP02. In some embodiments, provided herein is a recombinant vaccinia virus that is attenuated, such as has reduced toxicity, compared to the vaccinia virus strain set forth in SEQ ID NO:1. In some embodiments, an attenuated virus is a virus that has low toxicity to normal cells, such as low or reduced viral replication, cytolytic activity or cytotoxicity to normal cells, such as non-tumor cells.

[0238] In some embodiments, the attenuated virus is a recombinant oncolytic vaccinia virus, comprising: an inactivating mutation of B2R; a heterologous nucleic acid encoding interferon regulatory factor 3 (IRF3); and at least one heterologous nucleic acid encoding one or more cytokine and/or chemokine. In some embodiments, the at least one heterologous nucleic acid encoding one or more cytokine and/or chemokine comprises a heterologous nucleic acid encoding chemokine ligand 9 (CXCL9) and/or IL-12.

[0239] In some embodiments, the attenuated virus is a recombinant oncolytic virus, comprising: an inactivating mutation of at least one viral gene; and at least one heterologous nucleic acid encoding one or more heterologous gene product, wherein the one or more heterologous gene product is or comprises an immune modulating protein, a complement inhibitor, a T cell or NK cell evader, an anti-angiogenic protein, an interferon regulatory factor, or an apoptosis inducible protein, or a combination of any of the foregoing.

[0240] In some embodiments, any of the provided vaccinia viruses can be made to be attenuated by modifying the vaccinia virus to be deficient in the function of vaccinia growth factor (VGF) (McCart et al. (2001) Cancer Research 61:8751); thymidine kinase (TK) gene (WO 2005/047458); a hemagglutinin (HA) gene (WO 2005/047458, and Zhang et al. (2007) Cancer Research 67:10038); an F3 gene (also called F14.5L; WO 2005/047458, and Zhang et al. (2007) Cancer Research 67:10038); ribonucleotide reductase (Gammon et al. (2010) PLoS Pathogens 6:e1000984); serine protease inhibitor (e.g., SPI-1, SPI-2) (Guo et al. (2005) Cancer Research 65:9991, and Yang et al. (2007) Gene Therapy 14:638); ribonucleotide reductase genes F4L or I4L (Child et al. (1990) Virology 174:625; Potts et al. (2017) EMBO Mol. Med. 9:638); B2R (Eaglesham et al. (2019) Nature 566:259-263); B18R (Symons et al. (1995) Cell 81:551; Kim et al. (2007) PLoS Medicine 4:e353); A48R (Hughes et al. (1991) J. Biol. Chem. 266:20103); B8R (Verardi et al. (2001) J. Virol. 75:11); B15R (Spriggs et al. (1992) Cell 71:145); A41R (Ng et al. (2001) Journal of General Virology 82:2095); A52R (Bowie et al. (2000) Proc. Natl. Acad. Sci. USA 97:10162); FlL (Gerlic et al. (2013) Proc. Natl. Acad. Sci. USA 110:7808); E3L (Chang et al. (1992) Proc. Natl. Acad. Sci. USA 89:4825); A44R-A46R (Bowie et al. (2000) Proc. Natl. Acad. Sci. USA 97:10162); K1L (Bravo Cruz et al. (2017) Journal of Virology 91:e00524); A48R, B18R, C11R, and TK (Mejias-Perez et al. (2017) Molecular Therapy: Oncolytics 8:27). In some embodiments, it is known that several nonessential genes, such as J2R (thymidine kinase TK) (Buller et al. 1985), C11R (secreted epidermal growth factor-like) (Buller eta1.1988), A56R (hemagglutinin HA) (Shida eta1.1988), B8R (solubleinterferon-gamma receptor-like) (Verardi et al. 2001) and F14.5L (WO 2005/047458, and Zhang et al. (2007) Cancer Research 67:10038) result in reduced virulence when deleted or disrupted.

[0241] In some embodiments, provided herein is a recombinant vaccinia virus strain that has a genome in which any of the above genes has an inactivating mutation that inactivates the gene and thereby attenuates the virus. In some embodiments, the viral gene is selected from the group consisting of hemagglutinin (HA), J2R (thymidine kinase), F14.5L, A56R (hemagglutinin), B2R, vaccinia growth factor (VGF), A35R, A49R, A55R, B14R, C4L, C6L, C16L, NIL/N2L, E2L/E3L, K1L/K2L, K7L, superoxide dismutase locus, 7.5K, C2L-F3L, C4L-F1L, C7-K1L, B13R+B14R, A26L and I4L. In some embodiments, the inactivating mutation is deletion of all of a portion of the viral gene. In some embodiments, the inactivating mutation is a deletion of the entire ORF of the viral gene. In some embodiments, the inactivating mutation is deletion of a portion of the ORF of the viral gene that is renders the encoded gene product non-function. In some embodiments, the portion of the ORF that is deleted is a contiguous sequence of at least 10, 20, 30, 40, 50, 60, 70, 80, 90, 100 or more nucleotides up to the entire sequence of the ORF of the viral gene.

[0242] In some embodiments, a gene region or encoded gene product can be made deficient in function by any of a variety of methods known to a skilled artisan. In some embodiments, a gene region, or a gene product, may be made deficient as a result of one or more mutation (e.g. substitution), truncation or deletion of the gene region. In some embodiments, a gene region, or a gene product, may be made deficient as a result of a mutation, truncation or deletion of a promoter region controlling expression of the gene region. In some embodiments, a gene region, or a gene product, may be made deficient by mutation, truncation or deletion of a polyadenylation sequence such that translation of a polypeptide encoded by the gene region is reduced or eliminated.

[0243] In some embodiments, an attenuated recombinant vaccinia virus of the present disclosure that is deficient in a given vaccinia virus gene exhibits reduced production and/or activity of a gene product (e.g., mRNA gene product; polypeptide gene product) of the gene. In some embodiments, the amount and/or activity of the gene product is less than 75%, less than 60%, less than 50%, less than 40%, less than 30%, less than 25%, less than 20%, less than 15%, less than 10%, less than 5%, or less than 1% of the amount and/or activity of the same gene product produced by wild-type vaccinia virus, or by a control vaccinia virus that does not comprise the genetic alteration. For example, in some embodiments, the amount and/or activity of the gene product is less than 75%, less than 60%, less than 50%, less than 40%, less than 30%, less than 25%, less than 20%, less than 15%, less than 10%, less than 5%, or less than 1% of the amount and/or activity of the same gene product produced by VIP02 or a vaccinia virus having the nucleic acid genome set forth in SEQ ID NO:1. In some embodiments, the amount and/or activity of the gene product is less than 75%, less than 60%, less than 50%, less than 40%, less than 30%, less than 25%, less than 20%, less than 15%, less than 10%, less than 5%, or less than 1% of the amount and/or activity of the same gene product produced by IHD-W1 strain or a vaccinia virus having the nucleic acid genome set forth in SEQ ID NO:2.

[0244] In some embodiments, an attenuated recombinant vaccinia virus of the present disclosure that is deficient in a viral gene may have deletion in a region consisting of the specified gene region or the deletion in a neighboring gene region comprising the specified gene region. As an example, a mutation and/or truncation and/or deletion of a promoter region that reduces transcription of a gene region can result in deficiency. A gene region can also be rendered deficient through incorporation of a transcriptional termination element such that translation of a polypeptide encoded by the gene region is reduced or eliminated. A gene region can also be rendered deficient through use of a gene-editing enzyme or a gene-editing complex to reduce or eliminate transcription of the gene region. A gene region can also be rendered deficient through use of competitive reverse promoter/polymerase occupancy to reduce or eliminate transcription of the gene region. A gene region can also be rendered deficient by insertion of a nucleic acid into the gene region, thereby knocking out the gene region. In some cases, a heterologous nucleic acid may be inserted into the viral gene, such as described for exemplary recombinant vaccinia virus strains in Section III.

[0245] In some embodiments, an OVV provided by the present disclosure is vaccinia virus thymidine kinase (TK) deficient. In some cases, an OVV of the present disclosure comprises a deletion of all or a portion of the vaccinia virus TK coding region, such that the replication-competent, recombinant oncolytic vaccinia virus is TK deficient. For example, in some cases, an OVV of the present disclosure comprises a deletion in the J2R gene (i.e., gene that encodes viral thymidine kinase). See, e.g., Mejia-Perez et al. (2018) Mol. Ther. Oncolytics 8:27. In some cases, an OVV of the present disclosure comprises an insertion into the J2R region, thereby resulting in reduced vaccinia virus TK expression or activity.

[0246] In some embodiments, any of the clonal vaccinia virus strains described in Section I, such as VIP02 or a vaccinia virus strain set forth in SEQ ID NO:1, may be further modified in their genome to attenuate the virus. In some embodiments, the vaccinia virus strains are modified in one or more of the TK (J2R), hemagglutinin (HA), A35R or B2R genes. In some embodiments, the modification renders the gene product encoded by the locus as non-functional or deficient. In some embodiments, all or a portion of the TK, HA, A35R or B2R ORFs are deleted.

[0247] In some embodiments, an attenuated recombinant vaccinia virus provided herein has an inactivation mutation, such as an insertion, mutation or deletion, of the J2R gene encoding thymidine kinase (TK; SEQ ID NO: 66). In some embodiments, the TK locus has been reported to not be essential for virus replication such that its modification can decrease viral virulence, result in the inability of virus to replicate in brain or ovary and retain the ability to replicate preferentially in tumor tissue (e.g. Buller et al. (1985) Nature, 317:813-815). In some embodiments, the nucleic acid genome of the recombinant vaccinia virus strain comprises a sequence of nucleotide that has at least 95%, at least 96%, at least 97%, at least 98% or at least 99% sequence identity to the sequence set forth in SEQ ID NO:4. In some embodiments, the nucleic acid genome of the recombinant vaccina virus strain has the sequence of nucleotides set forth in SEQ ID NO:4. In some embodiments, the recombinant vaccinia virus is the vaccinia virus designated VIR13.

[0248] In some embodiments, an attenuated recombinant vaccinia virus provided herein has an inactivation mutation, such as an insertion, mutation or deletion, of the B2R locus encoding a cytosolic cGAMP nuclease (poxin) (SEQ ID NO: 54). In some embodiments, the B2R locus has been reported to result in vaccinia virus attenuation in a skin scarification model (Eaglesham et al. 2019, Nature 566:259-263). In some embodiments, the attenuated recombinant vaccina virus provide herein has an inactivation mutation, such as an insertion, mutation or deletion, of the B2R gene and an inactivation mutation, such as an insertion, mutation or deletion, of the J2R gene. In some embodiments, the nucleic acid genome of the recombinant vaccinia virus strain comprises a sequence of nucleotide that has at least 95%, at least 96%, at least 97%, at least 98% or at least 99% sequence identity to the sequence set forth in SEQ ID NO:48. In some embodiments, the nucleic acid genome of the recombinant vaccina virus strain has the sequence of nucleotides set forth in SEQ ID NO:48. In some embodiments, the recombinant vaccinia virus is the vaccinia virus designated VIR94.

[0249] In some embodiments, an attenuated recombinant vaccinia virus provided herein has an inactivation mutation, such as an insertion, mutation or deletion, of the A35R locus. A35R is a virulence gene that modulates the adaptive immune response, and its inactivation such as by deletion can lead to a decrease in viral replication capacity and reduce viral virulence (Brennan et al. 2015, J. Virol., 89:9986-9997). In some embodiments, the nucleic acid genome of the recombinant vaccinia virus strain comprises a sequence of nucleotide that has at least 95%, at least 96%, at least 97%, at least 98% or at least 99% sequence identity to the sequence set forth in SEQ ID NO:3. In some embodiments, the nucleic acid genome of the recombinant vaccina virus strain has the sequence of nucleotides set forth in SEQ ID NO:3. In some embodiments, the recombinant vaccinia virus is the vaccinia virus designated VIR11. In some embodiments, the attenuated recombinant vaccina virus provide herein has an inactivation mutation, such as an insertion, mutation or deletion, of the A35R gene and an inactivation mutation, such as an insertion, mutation or deletion, of the J2R gene. In some embodiments, the nucleic acid genome of the recombinant vaccinia virus strain comprises a sequence of nucleotide that has at least 95%, at least 96%, at least 97%, at least 98% or at least 99% sequence identity to the sequence set forth in SEQ ID NO:12. In some embodiments, the nucleic acid genome of the recombinant vaccina virus strain has the sequence of nucleotides set forth in SEQ ID NO:12. In some embodiments, the recombinant vaccinia virus is the vaccinia virus designated VIR52.

[0250] In some embodiments, an attenuated recombinant vaccinia virus provided herein has an inactivation mutation, such as an insertion, mutation or deletion, of the A56R locus encoding hemagglutinin (HA; SEQ ID NO: 67). In some embodiments, the HA locus has been reported to not be essential for virus replication such that its modification can decrease viral virulence, result in the inability of virus to replicate in brain or ovary and retain the ability to replicate preferentially in tumor tissue (e.g. Shida et al. (1988) J. Virol., 62:4474-4480).

[0251] In some embodiments, an attenuated recombinant vaccinia virus provided herein has an inactivation mutation, such as an insertion, mutation or deletion, of the F14.5L gene (SEQ ID NO: 65). In some embodiments, an attenuated recombinant vaccinia viruses provided herein has an insertion, mutation or deletion of the F3 gene product encoded by the F14.5L gene (SEQ ID NO: 64). In some embodiments, the F14.5L gene (also called F3) has been reported to not be essential for virus replication such that its modification can decrease viral virulence, result in the inability of virus to replicate in brain or ovary and retain the ability to replicate preferentially in tumor tissue (e.g. U.S. patent publication No. US2005/0031643).

[0252] A variety of method can be used to assess or determine the level of attenuation of a virus. Such methods for measuring the level of attenuation can be performed in vitro or in vivo and can include assessment of changes in any or all of the following properties of the virus: a) viral mRNA synthesis, b) viral protein expression, c) viral DNA replication, d) viral plaque size, e) viral titer or f) in vivo toxicity. Methods for assessing the level of attenuation of a virus by in vitro and in vivo methods are known in the art and include, but are not limited to, methods such as plaque assays and mouse models of viral pathogenicity. Exemplary methods for studying vaccinia early, intermediate, and late transcription can be found in Broyles et al. Methods Mol Biol. (2004) 269:135-142 and Wright et al. Methods Mol. Biol. (2004) 269:143-150. Method for assaying for viral RNA transcripts and proteins include, but are not limited to, well-known techniques as RNA hybridization and blotting techniques and immunohistochemistry.

### III. Recombinant Virus Strains with Heterologous Nucleic Acid

[0253] Provided herein are recombinant virus strains that are modified in their genomic sequence. In some embodiments, provided herein is a recombinant oncolytic virus comprising at least one heterologous nucleic acid encoding one or more heterologous gene product. The heterologous gene product is not particularly limited and can be, in some embodiments, a complement inhibitor, a T cell or NK cell evader, an immune stimulating protein, an anti-angiogenic protein, an interferon regulatory factor, an apoptosis inducible protein, or a combination of any of the foregoing. Accordingly, in some embodiments, provided herein is a recombinant oncolytic virus comprising at least one heterologous nucleic acid encoding one or more heterologous gene product, wherein the one or more heterologous gene product is a complement inhibitor, a T cell or NK cell evader, an immune stimulating protein, an anti-angiogenic protein, an interferon regulatory factor, an apoptosis inducible protein, or a combination of any of the foregoing.

[0254] Provided herein is a recombinant oncolytic vaccinia virus, comprising: an inactivating mutation of B2R; a heterologous nucleic acid encoding interferon regulatory factor 3 (IRF3); and at least one heterologous nucleic acid encoding one or more cytokine and/or chemokine. In some embodiments, the at least one heterologous nucleic acid encoding one or more cytokine and/or chemokine comprises a heterologous nucleic acid encoding chemokine ligand 9 (CXCL9) and/or IL-12.

[0255] Also provided herein is a recombinant oncolytic virus, comprising: an inactivating mutation of at least one viral gene; and at least one heterologous nucleic acid encoding one or more heterologous gene product, wherein the one or more heterologous gene product is or comprises an immune modulating protein, a complement inhibitor, a T cell or NK cell evader, an anti-angiogenic protein, an interferon regulatory factor, or an apoptosis inducible protein, or a combination of any of the foregoing. In some embodiments, the at least one heterologous nucleic acid encoding one or more heterologous gene product comprises one or more heterologous nucleic acid each encoding one or more immune modulating proteins, such as one or more immune modulating proteins selected from the group consisting of LIGHT, IRF3, IL-2, IL-12, and CXCL9; and/or the at least one heterologous nucleic acid encoding one or more heterologous gene product comprises one or more heterologous nucleic acid each encoding an apoptosis-inducible protein, such as an iDED, an iFas, or an iCas9; and/or the at least one heterologous nucleic acid encoding one or more heterologous gene product comprises one or more heterologous nucleic acid each encoding one or more T cell or NK cell evader proteins, such as a set of proteins encoded by Cowpox virus ORFs 012, 203 and 018 (CPXV012-203-018); and/or the at least one heterologous nucleic acid encoding one or more heterologous gene product comprises one or more heterologous nucleic acid each encoding one or more complement inhibitor, such as CRASP-2 or miniFH; and/or the one or more heterologous nucleic acid encoding the one or more complement inhibitor is introduced into a viral membrane gene, optionally F14.5L, to produce a fusion gene encoding a fusion protein; and/or the at least one heterologous nucleic acid encoding one or more heterologous gene product comprises one or more heterologous nucleic acid each encoding one or more anti-angiogenic protein, such as a VEGF inhibitor, an angiopoietin inhibitor, or versikine; and/or the at least one heterologous nucleic acid encoding one or more heterologous gene product comprises one or more heterologous nucleic acid each encoding one or more therapeutic agent or diagnostic agent.

[0256] An inactivating mutation includes any of several ways of altering expression and/or functionality of a gene product expressed by the viral gene being inactivated, such as by gene disruption. Gene disruption can be achieved by, e.g., a gene deletion, nucleic acid insertion, nucleic acid mutations or substitutions, knockouts, premature stop codons, transcriptional promoter modifications, RNAi, or gene editing, e.g., CRISPR. In some embodiments, an inactivating mutation is by a gene deletion and/or an insertion (also referred to as an introduction) of a heterologous nucleic acid encoding one or more gene product. In particular embodiments, an inactivating mutation combines a gene deletion and insertion of a heterologous nucleic acid into such gene loci. For instance, in some methods of effecting inactivating mutation, such as by homologous recombination and other methods, a heterologous nucleic acid may be inserted within a region of a gene that has been deleted. Thus, it is understood that in some embodiments, reference to a gene loci into which a heterologous nucleic acid is inserted is a deleted loci of a gene that has been inactivated by gene deletion of all or a portion of the gene. In some embodiments, a gene deletion removes the entire sequence of the gene. In other embodiments, a gene deletion is a partial deletion, that is, one that removes portion of the sequence of the gene. In one embodiment, a gene deletion is a partial deletion that removes at least 30%, at least 40%, at least 50%, at least 60%, at least 70%, at least 80%, at least 90% or at least 95% of the sequence of the gene. In one embodiment, a gene deletion is a partial deletion that removes at least 30%, at least 40%, at least 50%, at least 60%, at least 70%, at least 80%, or at least 90% of the protein coding sequence of the gene. In other embodiments, a gene deletion removes 100% of the sequence of the gene. In yet other embodiments, a gene deletion removes 100% of the protein coding sequence of the gene. In one embodiment, a gene deletion removes at least 50, at least 100, at least 200, at least 300, at least 400, at least 500, at least 600, at least 700, at least 800, at least 900, or at least 1000 nucleotides of the sequence of the gene. In another embodiment, a gene deletion is a partial deletion that removes at least 50, at least 100, at least 200, at least 300, at least 400, at least 500, at least 600, at least 700, at least 800, at least 900, or at least 1000 nucleotides of the sequence of the gene. In a specific embodiment, a partial deletion in a gene results in a partial gene.

[0257] Also provided herein is a recombinant oncolytic virus, comprising at least one heterologous nucleic acid encoding one or more heterologous gene product, wherein the one or more heterologous gene product is or comprises a complement inhibitor, a T cell or NK cell evader, an immune modulating protein, an anti-angiogenic protein, an interferon regulatory factor, an apoptosis inducible protein, or a combination of any of the foregoing.

[0258] Also provided herein is a recombinant oncolytic virus, comprising: a nucleic acid genome that has at least 99% sequence identity with the nucleic acid sequence set forth in SEQ ID NO: 1; and at least one heterologous nucleic acid encoding one or more heterologous gene product inserted in the genome.

[0259] Exemplary heterologous proteins are described in the following subsections. In addition to a recombinant virus strain, any of the described heterologous proteins can also be incorporated into a gene therapy vectors (e.g. AAV, lentivirus and retrovirus) or a cell-based therapy (e.g. chimeric antigen receptor-expressing T cell (CAR-T), natural killer (NK) NK cell or tumor infiltrating lymphocyte (TIL) therapy).

[0260] Among provided virus strains are recombinant virus strains comprising at least one heterologous nucleic acid encoding one or more heterologous gene product. In some embodiments, the recombinant virus includes, but not limited to, a vaccinia virus, a vesicular stomatitis virus (VSV), a Maraba virus (MARAV), a measles virus (MV), a myxoma virus, an orf virus, a parvovirus, a raccoonpox virus, a coxsackievirus, a reovirus, a Newcastle disease virus, a Seneca valley virus, a Semliki Forest virus, an influenza virus, an echovirus, a poliovirus (PV), adenoviruses (e.g., mastadenovirus and avian adenovirus), herpes viruses (e.g., herpes simplex virus 1, herpes simplex virus 2, herpes simplex virus 5, herpes simplex virus 6, Epstein-Barr virus, HHV6-HHV8 and cytomegalovirus), leviviruses (e.g. levivirus, enterobacterial phase MS2, allolevirus), poxviruses (e.g. the subfamily chordopoxvirus, parapoxvirus, avipoxvirus, capripoxvirus, leporipoxvirus, swipoxvirus, molluscipoxvirus entomopoxivirus), papovaviruses (e.g., poliomavirus and papillomavirus), paramyxoviruses (e.g., paramyxovirus, parainfluenza virus 1 (e.g., measles rubella virus), rubulavirus (e.g., mumps virus), pneumovirus, (pneumovirus, (pneumovirus) human), human respiratory syncytial virus and metapneumovirus (e.g. avian pneumovirus and human metapneumovirus)), picornaviruses (e.g. enterovirus, rhinovirus, hepatovirus (e.g., human hepatitis A virus), cardiovirus and aptovirus), reoviruses (e.g., orthoreovirus, orbivirus, rotavirus, cypovirus, fijivirus, phytoreovirus and oryzavirus), retroviruses (e g, mammalian type B retroviruses, type C mammalian retroviruses, groups of type D retroviruses, BLV-HTLV retroviruses, lentiviruses (e.g., human immunodeficiency virus type 1 and human immunodeficiency virus type 2 (e.g. HIV gp 160), spumavirus), flaviviruses (e.g. hepatitis C virus, Dengue fever virus, virus and West Nile fever), hepatadaviruses (e.g. hepatitis B virus), togaviruses (e.g. alphavirus (e.g. Sindbis virus) and rubiviruses (e.g. rubella virus)), rhabdoviruses (e.g. vesiculovirus, lissavirus, ephemerovirus, and cytoradovirus), arenaviruses (e.g., arenavirus, lymphocytic choriomeningitis virus, Ippy virus, and lassavirus) and coronaviruses (e.g., coronavirus and torovirus).

[0261] In some embodiments, the recombinant virus includes oncolytic viruses. In some embodiments, the recombinant virus is a recombinant oncolytic virus. In some embodiments, the recombinant virus, e.g., recombinant oncolytic virus, is a vaccinia virus, a herpes simplex virus, vesicular stomatitis virus (VSV), a Maraba virus (MARAV), a measles virus (MV), adenovirus, myxoma virus, orf virus, parvovirus, raccoonpox virus, coxsackievirus, reovirus, Newcastle disease virus, Seneca valley virus, Semliki Forest virus, mumps virus, influenza virus, echovirus, or a poliovirus (PV). In some embodiments, the recombinant virus, e.g., recombinant oncolytic virus, is a vaccinia virus.

[0262] In some embodiments, the recombinant virus is a virus that is not an oncolytic virus. In some embodiments, the recombinant virus is a virus that is not a vaccinia virus. In some embodiments, the recombinant virus includes a vaccinia virus. In some embodiments, the recombinant virus is derived from the Copenhagen strain.

[0263] In particular embodiments, the recombinant virus is an IHD-J derived virus. In some embodiments, the recombinant virus is a VIP02-derived virus. In some embodiments, provided herein are recombinant viruses, e.g., recombinant oncolytic viruses, that comprise one or more mutations, insertions, deletions, or substitutions (replacement) of nucleic acid, or other modification of the genomic sequence of the virus. In some embodiments, provided herein are modified VIP02 strains that are modified in a genomic sequence compared to the genomic sequence set forth in SEQ ID NO: 1. In some embodiments, the recombinant virus is a virus that is derived from a virus that has a nucleic acid genome set forth in SEQ ID NO:1 in which the genome is modified by insertion of a nucleic acid encoding a heterologous gene product.

[0264] Methods for the generation of recombinant viruses using recombinant DNA techniques are well known in the art (e.g., see U.S. Pat. Nos. 4,769,330, 4,603,112, 4,722,848, 4,215,051, 5,110,587, 5,174,993, 5,922,576, 6,319,703, 5,719,054, 6,429,001, 6,589,531, 6,573,090, 6,800,288, 7,045,313, He et al. (1998) PNAS USA. 95(5): 2509-2514. Racaniello et al., (1981) Science 214: 916-919). Methods for the generation of recombinant vaccinia viruses for the methods can also be found in the Examples described herein.

[0265] In some embodiments, the recombinant virus has a large carrying capacity for foreign genes where exogenous DNA fragments can be inserted. For instance, the vaccinia virus genome has a large carrying capacity for foreign genes, where up to 25 kb of exogenous DNA fragments can be inserted. The genomes of several of the vaccinia strains have been completely sequenced, and many essential and nonessential genes identified. Due to high sequence homology among different strains, genomic information from one vaccinia strain can be used for designing and generating modified viruses in other strains. Finally, the techniques for production of modified vaccinia strains by genetic engineering are well established (Moss, Curr. Opin. Genet. Dev. 3: 86-90 (1993); Broder and Earl, Mol. Biotechnol. 13: 223-245 (1999); Timiryasova et al., Biotechniques 31: 534-540 (2001).

[0266] Sites for the insertion of heterologous nucleic acid molecules are known in the art and have been described for various viral vectors (see e.g., 5,166,057, 5,266,489, 6,338,846, 6,248,320, 6,221,646, 6,841,158, 7,101,685, 7,001,760 and references therein). Heterologous nucleic acid molecules are typically inserted into a non-coding region or in a coding region for a gene that is nonessential for viral replication. For example, in vaccinia virus, sites for insertions of heterologous DNA molecules can be in intergenic regions, non-coding regions, and or nonessential genes or gene regions including, but not limited to, thymidine kinase (TK) gene, hemagglutinin (HA) gene, F14.5L (see, e.g., U.S. Patent Pub. No. 2005-0031-643), VGF gene (see, e.g., U.S. Pat. Pub. No. 2003-0031681) , Hind III F, F13L, or Hind III M (see, e.g., U.S. Pat. No. 6,548,068); a hemorrhagic region or an A type inclusion body region (ATI) (see, e.g., U.S. Pat. Nos. 6,265,189 and 6,596,279); A33R, A34R, A36R or B5R genes (see, e.g., Katz et al., (2003) J. Virology 77:12266-12275); SalF7L (see, e.g., Moore et al., (1992) EMBO J. 11:1973-1980); N1L (see, e.g., Kotwal et al. (1989) Virology 171:579-587); M1 lambda (see, e.g., Child et al. (1990) Virology. 174:625-629); HR, HindIIII-MK, HindIII-MKF, HindIII-CNM, RR, or BamF (see, e.g., Lee et al. (1992) J Virol. 66:2617-2630); C21L (see, e.g., Isaacs et al. (1992) Proc Natl Acad Sci USA. 89:628-632), host range region genes K1L and C7L, A35R (see e.g., U.S. Pat. Nos. 6,265,189, 7,045,313; U.S. Patent Pub. Nos. 2005-0244428, 2006-0159706; Coupar et al. J. Gen. Virol. (2000) 81: 431-439; Smith et al. (1993) Vaccine 11(1): 43-53). If more than one gene expression cassette is inserted, the insertions can be at the same insertion site or different insertion sites. Alternatively, the heterologous nucleic acid molecules can be inserted into an essential gene, and a cell line for packaging of the virus could be use for the production of the virus.

[0267] In some embodiments, the at least one heterologous nucleic acid encoding the one or more heterologous gene product is inserted into or in place of a non-essential gene or region in the genome of the virus. In some embodiments, the at least one heterologous nucleic acid encoding the one or more heterologous gene product is inserted into or in place of the hemagglutinin (HA), J2R (thymidine kinase), F14.5L, A56R (hemagglutinin), B2R, vaccinia growth factor (VGF), A35R, A49R, A55R, B14R, C4L, C6L, C16L, NIL/N2L, E2L/E3L, K1L/K2L, K7L, superoxide dismutase locus, 7.5K, C2L-F3L, C4L-F1L, C7-K1L, B13R+B14R, A26L, or I4L gene locus in the genome of the virus, or any combination thereof. In some embodiments, the at least one heterologous nucleic acid encoding the one or more heterologous gene product is inserted into or in place of the F14.5L gene locus. The F14.5 gene locus encodes a viral membrane protein. In some embodiments, the at least one heterologous nucleic acid encoding the one or more heterologous gene product is inserted into or in place of the A35R gene locus. In some embodiments, the at least one heterologous nucleic acid encoding the one or more heterologous gene product is inserted into or in place of the J2R gene locus. In some embodiments, insertion into a gene loci is an insertion in which the gene loci contains a partial deletion and the heterologous nucleic acid replaces the deleted portion. In some embodiments, insertion into a gene loci is an insertion into the gene loci but in which no portion of the endogenous gene loci is deleted. In some embodiments, insertion in place of the gene loci is an insertion such that all of the gene loci is deleted and replaced by the heterologous nucleic acid.

[0268] Mutation of nonessential vaccinia genes can also contribute to increased attenuation of the virus. Thus, insertion of heterologous expression cassettes into a nonessential gene, such as the TK gene, can attenuate the virus in two aspects: by gene mutation and by added transcriptional and/or translational load. For the methods described herein, mutation of nonessential genes is not required; however, one or more nonessential gene can be modified to enhance the attenuating effects of the gene expression cassette. The attenuation of the virus can be subsequently lessened (i.e., the virus exhibits increased replication) by removing the expression cassette and replacing it with noncoding sequence so that the gene remains inactive. Thus, removal or replacement of a gene expression cassette decreases the transcriptional and/or translational load on the virus, resulting in a decrease in attenuation of the virus.

[0269] In some embodiments, the at least one heterologous nucleic acid encoding the one or more heterologous gene product is fused with a gene encoding a viral membrane protein in the genome of the virus. In some embodiments, the at least one heterologous nucleic acid encoding the one or more heterologous gene product is fused with a gene encoding a viral membrane protein to produce a fusion protein. In some embodiments, the at least one heterologous nucleic acid encoding the one or more heterologous gene product is fused with a viral membrane protein to produce a fusion protein. In some embodiments, the gene encoding the viral membrane protein that is fused with the at least one heterologous nucleic acid encoding the one or more heterologous gene product is F14.5L. In some embodiments, the viral membrane protein is F14.5L. In some embodiments, the viral membrane protein is F14.5L and the fusion is at the C-terminus of F14.5L. In some embodiments, the fusion protein is incorporated into the outer membrane of the intracellular mature virus (IMV), e.g., of a vaccinia virus. These fusion proteins that comprise the viral membrane protein F14.5L are expected to be incorporated into the outer membrane of IMV viral particles, which can provide them with resistance to inactivation by complement in the blood.

[0270] Modifications can include mutations, insertions, deletions, or substitutions (replacement) of nucleic acid or other modification of the genomic sequence of the virus. For example, viruses provided herein can be modified to contain one or more heterologous nucleic acid molecule inserted or replaced into the genome of the virus. The viral gene can be replaced with a homologous gene from another virus or with a different gene. In one embodiment, modifications include insertion or replacement of one or more nucleotides, such as at least 1, 2, 3, 4, 5, 6, 7, 8, 9, 10, 20, 30, 40, 50, 60, 70, 80, 90, 100, 150, 200, 250, 300, 350, 400, 450, 500, 1000, 2000, 3000 or more nucleotides. In some embodiments, modifications include deletion of one or more nucleotides, such as at least 1, 2, 3, 4, 5, 6, 7, 8, 9, 10, 20, 40, 50, 60, 70, 80, 90, 100, 150, 200, 250, 300, 350, 400, 450, 500, 1000, 2000, 3000 or more nucleotides. In some embodiments, modifications include substitution of one or more nucleotides, such as at least 1, 2, 3, 4, 5, 6, 7, 8, 9, 10, 20, 30, 40, 50, 60, 70, 80, 90, 100, 150, 200, 250, 300, 350, 400, 450, 500, 1000, 2000, 3000 or more nucleotides.

[0271] Modifications include insertions and/or substitutions (replacement) of nucleic acid or other modification of the genomic sequence of the virus with a heterologous nucleic acid. Generally, the heterologous gene is a gene that encodes a non-viral protein. For example, a heterologous nucleic acid molecule can be inserted that encodes a heterologous gene. In some embodiments, the heterologous nucleic acid replaces all or a portion of a viral gene. In other embodiments, the viruses provided herein can be modified by insertion of one or more heterologous nucleic acid molecules. For example, 1, 2, 3, 4, 6, 7, 8, 9, 10 or more heterologous nucleic acid molecules can be inserted. A heterologous nucleic acid molecule can contain an open reading frame or can be a non-coding sequence. Generally, the heterologous nucleic acid that is inserted is a contiguous sequence of nucleotides that contains an open reading frame and corresponds to a coding region of a gene. Inserted or replaced genes can be transcribed and/or translated from the viral genome following infection of a host cell, such as a tumor cell. As described below, the heterologous nucleic acid can contain a regulatory sequence to control expression of the gene. For example, the heterologous nucleic acid can be operably linked to a promoter for expression of an open reading frame. In some embodiments, the promoter has a sequence identity 70, 80, 90, 100% identical to the sequences set forth in SEQ ID NOs: 68, 69, 70, 71, or 72. In some embodiments, the promoter has a sequence identity identical to the sequences set forth in SEQ ID NOs: 68, 69, 70, 71, or 72.

[0272] Modifications to the viral genome provided herein can result in changes of virus characteristics or properties. Example changes include changes in parameters indicative of anti-tumorigenicity and/or toxicity. For example, insertions, mutations or deletions can decrease pathogenicity of the clonal strain, for example, reducing the infectivity, toxicity, ability to replicate or number of non-tumor organs or tissues in which the vaccinia virus can accumulate. Exemplary insertions, deletions, mutations, and/or substitutions of nucleic acids are those that result in a vaccinia virus with better anti-tumorigenic properties and less toxicity relative to the clonal strain not containing the modification and/or the starting virus preparation or mixture or other reference strain or isolate, including recombinant strains. In some embodiments, the insertions, deletions, mutations, and/or substitutions of nucleic acids are those that result in a vaccinia virus with similar anti-tumorigenic properties and toxicity relative to the clonal strain not containing the modification and/or the starting virus preparation or mixture or other reference strain or isolate, including recombinant strains. In some embodiments, the modifications to the viral genome reduce the toxicity relative to the clonal strain not containing the modification and/or the starting virus preparation or mixture or other reference strain or isolate, including recombinant strains. In some embodiments, the insertions, mutations or deletions include, but are not limited to, those that increase anti-tumorigenicity and reduce toxicity of the virus relative to the clonal strain not containing the modification and/or the starting virus preparation or mixture or other reference strain or isolate, including recombinant strains.

[0273] In some embodiments, insertions, mutations or deletions include, but are not limited to, those that increase ability of the clonal viral strain to evade host's immune system relative to the clonal strain not containing the modification and/or the starting virus preparation or mixture or other reference strain or isolate, including recombinant strains. In some embodiments, insertions, mutations or deletions include, but are not limited to, those that increase the ability of the clonal viral strain to stimulate host's immune system relative to the clonal strain not containing the modification and/or the starting virus preparation or mixture or other reference strain or isolate, including recombinant strains. In some embodiments, insertions, mutations or deletions include, but are not limited to, those that increase the host's anti-angiogenic activity relative to the clonal strain not containing the modification and/or the starting virus preparation or mixture or other reference strain or isolate, including recombinant strains. In some embodiments, insertions, mutations or deletions include, but are not limited to, those that increase the host's apoptotic activity relative to the clonal strain not containing the modification and/or the starting virus preparation or mixture or other reference strain or isolate, including recombinant strains.

[0274] In some embodiments, the one or more heterologous nucleic acid molecules can encode, for example, an anti-apoptotic gene product of fragment thereof, such as gene product that can modify host's apoptotic response; an angiogenesis gene product or fragment thereof, such as a gene product that can modify host's angiogenesis response; an immune system gene product or fragment thereof, such as a gene product that can modify the host's immune response. In some embodiments, the gene product or fragment thereof that can modify the host's immune response, can increase host's immune system's ability to escape inhibition by complement relative to the clonal strain not containing the modification and/or the starting virus preparation or mixture or other reference strain or isolate, including recombinant strains. In some embodiments, the gene product that can modify the host's immune response increases host's immune system's activity relative to the clonal strain not containing the modification and/or the starting virus preparation or mixture or other reference strain or isolate, including recombinant strains.

[0275] In some embodiments, the recombinant virus is a vaccinia virus that is modified in a genomic sequence compared to the genomic sequence set forth in SEQ ID NO: 1 or a sequence that has at least 99% sequence identity to SEQ ID NO:1. . In some embodiments, the recombinant virus is a vaccinia virus that is modified in a genomic sequence compared to the genomic sequence set forth in SEQ ID NO: 1. The large genome size of vaccinia viruses provided herein allows insertion of large and/or multiple nucleotide sequences of heterologous DNA into the virus genome (Smith and Moss (1983) Gene 25(1):21-28). The viruses provided herein can be modified by insertion or substitution of one or more nucleotides. In one embodiment, modifications include insertion or substitution of one or more nucleotides, such as at least of 1, 2, 3, 4, 5, 6, 7, 8, 9, 10, 20, 30, 40, 50, 60, 70, 80, 90, 100, 150, 200, 250, 300, 350, 400, 450, 500, 1000, 2000, 3000, 4000, 5000 or more nucleotides. In some embodiments, the one or more heterologous DNA molecules are inserted into a gene loci of the virus genome, such as any as described herein. In some embodiments, the one or more heterologous DNA molecules are inserted into a non-essential region of the virus genome; for example, the DNA molecules are inserted into a locus that is not essential for viral replication in proliferating cells, such as tumor cells. Exemplary insertion sites are known in the art and provided herein. In some embodiments, the recombinant vaccinia virus provided herein can contain an inactivating mutation in a viral gene such as any as described, such as a gene deletion of all or a portion of a viral gene. In such embodiments, the one or more heterologous nucleic acids may be inserted into or in place of such gene loci. In some embodiments, the recombinant virus is a modified virus compared to the genomic sequence set forth in SEQ ID NO:1 in which one or more heterologous nucleic acids are inserted and one or more viral gene loci are inactivated, such as by gene deletion. The modified recombinant virus can be any of the virus provided herein having a genome set forth in SEQ ID NO: 1, or a genome that is at least 99% identical to SEQ ID NO: 1, or any other virus, generated by introduction of the heterologous DNA described herein. In some embodiments, the recombinant virus is modified in a genomic sequence compared to the genomic sequence set forth in SEQ ID NO:1 and has a sequence of amino acids that exhibits at least 85%, 90% or 95% sequence identity to the sequence set forth in SEQ ID NO:1. In some embodiments, the nucleic acid genome of the recombinant oncolytic vaccinia virus has at least 95%, 96%, 97%, 98%, or 99% sequence identity to the nucleic acid sequence set forth in SEQ ID NO: 1.

[0276] In some embodiments, the recombinant virus can be modified to express an exogenous or heterologous gene. Exemplary exogenous gene products include proteins involved in apoptosis, angiogenesis, and/or modulation of the immune system. In some embodiments, gene products include proteins that affect a host's apoptosis pathways such as Caspase-9, DED (death effector domain) of FADD (Fas-associated death domain protein), and Fas. In some embodiments, gene products include proteins that affect host's angiogenesis pathways such as vascular endothelial growth factor (VEGF) and versikine (VK). In some embodiments, gene products include proteins that affect host's immune system such as minimized complement regulator factor H (miniFH), Borrelia burgdorferi complement regulatory-acquiring surface protein-2 (CRASP-2), Cowpox virus ORFs 012, 203 and 018 (CPXV012-203-018), and human LIGHT mutant (hmLIGHT). The characteristics of such gene products are described herein and elsewhere.

[0277] In particular, the viruses provided herein can be modified to express genes in vivo and in vitro. In some embodiments, the viruses can be modified to express two or more gene products, such as 2, 3, 4, 5, 6, 7, 8, 9, 10 or more gene products, where any combination of the two or more gene products can be one or more detectable gene products. In one embodiment, a virus can be modified to express an apoptosis related gene product. In another example, a virus can be modified to express two or more gene products for generation of fusion proteins. In some examples, one or more proteins involved in angiogenesis can be expressed together. When two or more heterologous genes are introduced, the genes can be regulated under the same or different regulatory sequences, and the genes can be inserted in the same or different regions of the viral genome, in a single or a plurality of genetic manipulation steps. In some embodiments, one gene can be under the control of a constitutive promoter while a second gene can be under the control of an inducible promoter. Methods for inserting two or more genes into a virus are known in the art and can be readily performed for a wide variety of viruses using a wide variety of exogenous genes, regulatory sequences, and/or other nucleic acid sequences.

[0278] The viruses provided herein can be modified by insertion, deletion, substitution or mutation as described herein. Standard methodologies for modifying viruses by inserting, deleting, substituting and mutating nucleic acids are well known in the art. Such methodologies include in vitro recombination techniques, synthetic methods, direct cloning, and in vivo recombination methods. See, for example, Sambrook et al., Molecular Cloning: A Laboratory Manual, 2nd edition, Cold Spring Harbor Laboratory Press, cold Spring Harbor N.Y. (1989), and the Examples disclosed herein. Techniques for the generation of recombinant viruses include nucleic acid transfer protocols, various nucleic acid manipulation techniques, nucleic acid amplification protocols and, typically, involves the generation of gene cassettes or transfer vectors using standard techniques in molecular biology. See, e.g., U.S. Pat. Nos. 5,494,807 and 5,185,146, which describe exemplary methods of generating recombinant vaccinia viruses and other molecular biology techniques known in the art. Methods for the generation of recombinant viruses using recombinant DNA techniques are well known in the art (e.g., see U.S. Pat. Nos. 4,769,330; 4,603,112; 4,722,848; 4,215,051; 5,110,587; 5,174,993; 5,922,576; 6,319,703; 5,719,054; 6,429,001; 6,589,531; 6,573,090; 6,800,288; 7,045,313; He et al. (1998) PNAS 95(5): 2509-2514; Racaniello et al., (1981) Science 214: 916-919; and Hruby et al., (1990) Clin Micro Rev. 3:153-170). Methods for the generation of recombinant vaccinia viruses are well known in the art (e.g., see Hruby et al., (1990) Clin Micro Rev. 3:153-170, U.S. Pat. Pub. No. 2005-0031643, now U.S. Pat. Nos. 7,588,767, 7,588,771, 7,662,398 and 7,045,313).

[0279] In some embodiments, homologous recombination can be used to introduce an insertion or deletion of a nucleic acid molecule into a target sequence of interest. Use of nucleic acid tools such as vectors, plasmids, promoters and other regulating sequences, are well known in the art for a large variety of viruses and cellular organisms. Nucleic acid amplification protocols include, but are not limited to, the polymerase chain reaction (PCR), or amplification via viruses or organisms, such as, but not limited to, yeast, bacteria, insect or mammalian cells. Nucleic acid transfer protocols include electroporation, calcium chloride transformation/transfection, liposome mediated nucleic acid transfer, and others. A large variety of tools to modify nucleic acids is available from many different sources, including various commercial sources. For example, point mutations or small insertions or deletions can be introduced into a gene of interest through the use of oligonucleotide mediated site-directed mutagenesis. In another example, homologous recombination can be used to introduce a mutation in the nucleic acid sequence, or to insert or delete a nucleic acid molecule into a target sequence of interest. In some examples, mutations, insertions or deletions of nucleic acids in a particular gene can be selected for using a positive or negative selection pressure. See, e.g., Current Techniques in Molecular Biology, (Ed. Ausubel, et al.). One skilled in the art will be readily able to select the appropriate tools and methods for genetic modifications of any particular virus according to the knowledge in the art and design choice. In some embodiments, a plasmid is used for homologous recombination for constructing a recombinant virus. In some embodiments, the plasmid is constructed using gene splicing for joining two fragments. In some embodiments, primer used to amplify the two fragments comprise 70%, 80%, 90%, or 100% of SEQ ID NOs: 14, 15, 16, 17, 31, 32, 33, 34, 35, 36, 37, 38, 39, 40, 41, 42, 43, 44, 45, 46, 94, 95, 96, or 97.

[0280] The insertion, deletion, substitution or mutation can be specifically directed to a particular sequence in the viral genome. Such sequences in the viral genome include, but are not limited to, an intergenic sequence, a regulatory sequence, a sequence without a known role, a gene-encoding sequence, or a non-essential region of the viral genome. Regions of viral genomes that are available for modification are well known in the art for many viruses.

[0281] In some embodiments, the recombinant virus, e.g., recombinant oncolytic virus, comprises an inactivation mutation of at least one viral gene. The inactivating mutation is not particularly limited and can, in some embodiments, be any mutation that results in the viral gene's gene product having less function or no function as compared to without the inactivating mutation. In some embodiments, the inactivation mutation is deletion of all or a portion of the at least one viral gene. In some embodiments, the deletion of the at least one viral gene is deletion of the entire gene ORF of a viral gene. In some embodiments, the deletion of the at least one viral gene is a deletion of a portion of the ORF of a viral gene. In some embodiments, the deletion of the at least one viral gene is a deletion of a portion of the ORF of a viral gene that is sufficient to render the encoded gene product non-functional. In some embodiments, the at least one viral gene is selected from the group consisting of hemagglutinin (HA), J2R (thymidine kinase), F14.5L, A56R (hemagglutinin), B2R, vaccinia growth factor (VGF), A35R, A49R, A55R, B14R, C4L, C6L, C16L, NIL/N2L, E2L/E3L, K1L/K2L, K7L, superoxide dismutase locus, 7.5K, C2L-F3L, C4L-F1L, C7-K1L, B13R+B14R, A26L, and I4L. In some embodiments, the at least one viral gene comprises two or more viral genes selected from the group consisting of hemagglutinin (HA), J2R (thymidine kinase), F14.5L, A56R (hemagglutinin), B2R, vaccinia growth factor (VGF), A35R, A49R, A55R, B14R, C4L, C6L, C16L, NIL/N2L, E2L/E3L, K1L/K2L, K7L, superoxide dismutase locus, 7.5K, C2L-F3L, C4L-F1L, C7-K1L, B13R+B14R, A26L, and I4L. In some embodiments, the at least one viral gene is A35R. In some embodiments, the at least one viral gene is J2R. In some embodiments, the at least one viral gene is B2R. In some embodiments, the at least one viral gene is B2R. In some embodiments, the at least one viral gene is B2R. In some embodiments, the at least one viral gene comprises A35R and J2R. In some embodiments, the at least one viral gene is B2R. In some embodiments, the at least one viral gene comprises B2R and J2R.

[0282] Heterologous nucleic acid molecules are typically inserted into the viral genome in an intergenic region or in a locus that encodes a nonessential viral gene product. Insertion of heterologous nucleic acid at such sites generally does not significantly affect viral infection or replication in the target tissue. Examples of insertion sites include, but are not limited to, J2R (thymidine kinase (TK)), A56R (hemagglutinin (HA)), F14.5L, vaccinia growth factor (VGF), A35R, NIL, E2L/E3L, K1L/K2L, superoxide dismutase locus, 7.5K, C7-K1L (host range gene region), B13R+B14R (hemorrhagic region), A26L (A type inclusion body region (ATI)) or I4L (large subunit, ribonucleotide reductase) gene loci. Insertion sites for the viruses provided herein also include sites that correspond to intragenic regions described in other poxviruses such as Modified Vaccinia Ankara (MVA) virus (exemplary sites set forth in U.S. Pat. No. 7,550,147), NYVAC (exemplary sites set forth in U.S. Pat. No. 5,762,938). In some embodiments, insertion, deletion, substitution and/or mutations sites include J2R, F14.5L and/or A35R.

[0283] For example, generating a recombinant vaccinia virus that expresses a heterologous gene product typically includes the use of a recombination plasmid, which contains the heterologous nucleic acid, optionally operably linked to a promoter, with vaccinia virus DNA sequences flanking the heterologous nucleic acid to facilitate homologous recombination and insertion of the gene into the viral genome. Generally, the viral DNA flanking the heterologous gene is complementary to a non-essential segment of vaccinia virus DNA, such that the gene is inserted into a nonessential location or any other location. The recombination plasmid can be grown in and purified from Escherichia coli and introduced into suitable host cells, such as, for example, but not limited to, CV-1, BSC-40, BSC-1 and TK-143 cells. The transfected cells are then superinfected with vaccinia virus which initiates a replication cycle. The heterologous DNA can be incorporated into the vaccinia viral genome through homologous recombination, and packaged into infection progeny. The recombinant viruses can be identified by methods known in the art, such as by detection of the expression of the heterologous gene product, or by using positive or negative selection methods (U.S. Pat. No. 7,045,313). In some embodiments, a recombinant virus is generated by homologous incorporation of a plasmid into the viral genomic region corresponding to the J2R gene. In some embodiments, a recombinant virus is generated by homologous incorporation of a plasmid into the viral genomic region corresponding to the A35R gene. In some embodiments, a recombinant virus is generated by homologous incorporation of a plasmid into the viral genomic region corresponding to the F14.5L gene. In some embodiments, a recombinant virus is generated by homologous incorporation of one plasmid into the viral genomic region corresponding to the J2R gene and another plasmid into the viral genomic region corresponding to the F14.5L gene. In some embodiments, a recombinant virus is generated by homologous incorporation of one plasmid into the viral genomic region corresponding to the J2R gene and another plasmid into the viral genomic region corresponding to the F14.5L gene. In some embodiments, a recombinant virus is generated by homologous incorporation of one plasmid into the viral genomic region corresponding to the J2R gene and another plasmid into the viral genomic region corresponding to the A35R gene. In some embodiments, a recombinant virus is generated by homologous incorporation of one plasmid into the viral genomic region corresponding to the F14.5L gene and another plasmid into the viral genomic region corresponding to the A35R gene. In some embodiments, a recombinant virus is generated by homologous incorporation of one plasmid into the viral genomic region corresponding to the J2R gene and another plasmid into the viral genomic region corresponding to the A35R gene, and another plasmid into the viral genomic region corresponding to the F14.5L gene.

[0284] In another example, the recombinant vaccinia virus that expresses a heterologous gene product can be generated by direct cloning (see, e.g. U.S. Pat. No. 6,265,183 and Scheiflinger et al. (1992) Proc. Natl. Acad. Sci. USA 89: 9977-9981). In such methods, the heterologous nucleic acid, optionally operably linked to a promoter, is flanked by restriction endonuclease cleavage sites for insertion into a unique restriction endonuclease site in the target virus. The virus DNA is purified using standard techniques and is cleaved with the sequence-specific restriction endonuclease, where the sequence is a unique site in the virus genome. Any unique site in the virus genome can be employed provided that modification at the site does not interfere with viral replication. Generally, insertion is in a site that is located in a non-essential region of the virus genome. For example, exemplary modifications herein include insertion of a foreign DNA sequence into the NotI digested virus DNA.

[0285] In some examples, the heterologous nucleic acid also can contain one or more regulatory sequences to regulate expression of an open reading frame encoding the heterologous RNA and/or protein. Suitable regulatory sequences, which, for example, are functional in a mammalian host cell, are well known in the art. Expression can also be influenced by one or more proteins or RNA molecules expressed by the virus. Gene regulatory elements, such as promoters and enhancers, possess cell-type specific activities and can be activated by certain induction factors (e.g., hormones, growth factors, cytokines, cytostatic agents, irradiation, heat shock) via responsive elements. A controlled and restricted expression of these genes can be achieved using such regulatory elements as internal promoters to drive the expression of genes in viral vector constructs.

[0286] In some embodiments, the heterologous nucleic acid encoding the one or more heterologous gene product is operably linked to a promoter. In some embodiments, the one or more heterologous nucleic acid encoding the one or more heterologous gene product is operably linked to a promoter for expression of the heterologous RNA and/or protein. For example, a heterologous nucleic acid that is operably linked to a promoter is also called an expression cassette. Hence, viruses provided herein can have the ability to express one or more heterologous genes. Gene expression can include expression of a protein encoded by a gene and/or expression of an RNA molecule encoded by a gene. In some embodiments, the viruses provided herein can express exogenous genes at levels high enough that permit harvesting products of the exogenous genes from the tumor. Expression of heterologous genes can be controlled by a constitutive promoter, or by an inducible promoter. In other examples, organ or tissue-specific expression can be controlled by regulatory sequences. In order to achieve expression only in the target organ, for example, a tumor to be treated, the foreign nucleotide sequence can be linked to a tissue specific promoter and used for gene therapy. Such promoters are well known to those skilled in the art (see, e.g., Zimmermann et al., Neuron 12: 11-24 (1994); Vidal et al., EMBO J. 9: 833-840 (1990); Mayford et al., Cell 81: 891-904 (1995); and Pinkert et al., Genes & Dev. 1: 268-76 (1987)).

[0287] Exemplary promoters for the expression of heterologous genes are known in the art. The heterologous nucleic acid can be operatively linked to a native promoter or a heterologous promoter that is not native to the virus. Any suitable promoters, including synthetic, naturally occurring, and modified promoters, can be used. Exemplary promoters include synthetic promoters, including synthetic viral and animal promoters. Native promoter or heterologous promoters include, but are not limited to, viral promoters, such as vaccinia virus and adenovirus promoters.

[0288] In some embodiments, the promoter is a poxvirus promoter, such as, for example, a vaccinia virus promoter. As such, in some embodiments, the promoter is a poxviral promoter or is a variant or derivative thereof, such as a vaccinia virus promoter. In some embodiments, the promoter is a vaccinia virus promoter. Vaccinia viral promoters for the expression of one or more heterologous genes can be synthetic or natural promoters, and include vaccinia early, intermediate, early/late and late promoters. Exemplary vaccinia viral promoters for controlling heterologous gene expression include, but are not limited to, 7.5E, 7.5E/L, SSE, 11KL, SSL, SSEL, mH5, LEO, P7.5k, P11k, PSE, PSEL, PSL, H5R, TK, P28, C11R, G8R, F17R, I3L, I8R, A1L, A2L, A3L, H1L, H3L, H5L, H6R, H8R, D1R, D4R, D5R, D9R, DILL, D12L, D13L, M1L, N2L, P4b or K1 promoters. Accordingly, in some embodiments, the nucleic acid encoding the heterologous gene product is operably linked to a promoter selected from the group consisting of 7.5E, 7.5E/L, SSE, 11KL, SSL, SSEL, mH5, LEO, P7.5k, P11k, PSE, PSEL, PSL, H5R, TK, P28, C11R, G8R, F17R, I3L, I8R, A1L, A2L, A3L, H1L, H3L, H5L, H6R, H8R, D1R, D4R, D5R, D9R, D11L, D12L, D13L, M1L, N2L, P4b, and K1 promoters. Other viral promoters include, but are not limited to, adenovirus late promoter, Cowpox ATI promoter, or T7 promoter. Strong late promoters can be used to achieve high levels of expression of the heterologous genes. Early and intermediate-stage promoters can also be used. In one example, the promoters contain early and late promoter elements, for example, the modified H5 promoter, PmH5, which contains both native early and late vaccinia promoter regions the vaccinia virus, the synthetic early/late vaccinia PSEL promoter, and the PSE synthetic early promoter (Hammond et al., Journal of Virological Methods 66:1, 135-138 (1997); Stritzker et al., Journal of Virology 88:19, 11556-11567 (2014; Kugler et al., Virol J. 16: 100 (2019). In some embodiments, the promoter is synthetic strong early promoter (SSE). In some embodiments, the promoter is a strong early/late promoter (SEL).

[0289] In some embodiments, the promoter is selected from the group consisting of 7.5E, 7.5E/L, SSE, 11KL, SSL, SSEL, mH5 and LEO. In some embodiments, the promoter has the amino acids sequence set forth in any one of SEQ ID NOS: 29, 53, 55, 68, 69, 70, 71, or 72. In some embodiments, the promoter has the amino acids sequence set forth in SEQ ID NO: 29. In some embodiments, the promoter is synthetic strong early promoter (SSE) and comprises the amino acids sequence set forth in SEQ ID NO: 29. In some embodiments, the promoter has the amino acids sequence set forth in SEQ ID NO: 55. In some embodiments, the promoter is a strong early/late promoter (SEL) and comprises the amino acids sequence set forth in SEQ ID NO: 55. In some embodiments, the promoter is a poxviral promoter, and the poxviral promoter is mH5. In some embodiments, the poxviral promoter is mH5 and comprises the amino acid sequence set forth in SEQ ID NO: 53.

[0290] Combinations of different promoters can be used to express different gene products in the same virus or two different viruses. The viruses provided herein can exhibit differences in characteristics, such as attenuation, as a result of using a stronger promoter versus a weaker promoter. For example, in vaccinia, synthetic early/late and late promoters are relatively strong promoters, whereas vaccinia synthetic early promoters are relatively weaker promoters (see e.g., Chakrabarti et al. (1997) BioTechniques 23(6) 1094-1097).

[0291] As is known in the art, regulatory sequences can permit constitutive expression of the exogenous gene or can permit inducible expression of the exogenous gene. Further, the regulatory sequence can permit control of the level of expression of the exogenous gene. In some examples, such as gene product manufacture and harvesting, the regulatory sequence can result in constitutive, high levels of gene expression. In some examples, such as anti-(gene product) antibody harvesting, the regulatory sequence can result in constitutive, lower levels of gene expression. In tumor therapy examples, a therapeutic protein can be under the control of an internally inducible promoter or an externally inducible promoter.

[0292] Hence, expression of heterologous genes can be controlled by a constitutive promoter or by an inducible promoter. Inducible promoters can be used to provide tissue specific expression of the heterologous gene or can be inducible by the addition of a regulatory molecule to provide temporal specific induction of the promoter. In some examples, inducible expression can be under the control of cellular or other factors present in a tumor cell or present in a virus-infected tumor cell. In further examples, inducible expression can be under the control of an administrable substance, including IPTG, RU486 or other known induction compounds. Additional regulatory sequences can be used to control the expression of the one or more heterologous genes inserted the virus. Any of a variety of regulatory sequences are available to one skilled in the art according to known factors and design preferences.

[0293] In some embodiments, the one or more heterologous gene product comprise a therapeutic agent or diagnostic agent. In some embodiments, the one or more heterologous gene product, e.g., therapeutic agent or diagnostic agent, is selected from among an anticancer agent, an antimetastatic agent, an antiangiogenic agent, an immunomodulatory molecule, an antigen, a cell matrix degradative gene, genes for tissue regeneration and reprogramming human somatic cells to pluripotency, enzymes that modify a substrate to produce a detectable product or signal or are detectable by antibodies, proteins that can bind a contrasting agent, genes for optical imaging or detection, genes for PET imaging, and genes for MRI imaging. In some embodiments, the one or more heterologous gene product, e.g., therapeutic agent or diagnostic agent, comprise a therapeutic agent selected from among a hormone, a growth factor, cytokine, a chemokine, a costimulatory molecule, ribozymes, a transporter protein, a single chain antibody, an antisense RNA, a prodrug converting enzyme, an siRNA, a microRNA, a toxin, an antitumor oligopeptide, a mitosis inhibitor protein, an antimitotic oligopeptide, an anti-cancer polypeptide antibiotic, an angiogenesis inhibitor, a tumor suppressor, a cytotoxic protein, a cytostatic protein, and a tissue factor.

[0294] In some of any of such embodiments, the recombinant virus, e.g., recombinant oncolytic virus, comprises a nucleic acid sequence comprising at least one heterologous nucleic acids encoding one or more heterologous gene product, such as any of the heterologous gene products described herein, e.g., in Section III parts A, B, C, and D, including, e.g., one or more heterologous gene products selected from the group consisting of a complement inhibitor, a T cell evader or an NK cell evader, an immune stimulating protein, an anti-angiogenic protein, an interferon regulatory factor, an apoptosis-inducible protein, or any combination thereof, and, optionally, an inactivating mutation of at least one viral gene, such as one or more of hemagglutinin (HA), J2R (thymidine kinase), F14.5L, A56R (hemagglutinin), B2R, vaccinia growth factor (VGF), A35R, A49R, A55R, B14R, C4L, C6L, C16L, NIL/N2L, E2L/E3L, K1L/K2L, K7L, superoxide dismutase locus, 7.5K, C2L-F3L, C4L-F1L, C7-K1L, B13R+B14R, A26L, or I4L gene loci in the genome of the virus, optionally wherein the one or more viral genes is one or more of B2R, J2R, A35R, and A56R, and any combination thereof.

[0295] In some of any of such embodiments, the nucleic acid genome of the recombinant oncolytic virus comprises a nucleic acid sequence set forth in any one of SEQ ID NOs: 48, 80, 82, and 84-93, or a nucleic acid sequence that has at least 95%, 96%, 97%, 98%, or 99% sequence identity to a nucleic acid sequence set forth in any one of SEQ ID NOs 48, 80, 82, and 84-93. In some embodiments, the nucleic acid genome of the recombinant oncolytic virus comprises a nucleic acid sequence set forth in any one of SEQ ID NOs: 85, 86, 88, and 90, or a nucleic acid sequence that has at least 95%, 96%, 97%, 98%, or 99% sequence identity to a nucleic acid sequence set forth in any one of SEQ ID NOs 85, 86, 88, and 90. In some embodiments, the nucleic acid genome of the recombinant oncolytic virus comprises a nucleic acid sequence set forth in SEQ ID NO: 85, or a nucleic acid sequence that has at least 95%, 96%, 97%, 98%, or 99% sequence identity to a nucleic acid sequence set forth in SEQ ID NO 85. In some embodiments, the nucleic acid genome of the recombinant oncolytic virus comprises a nucleic acid sequence set forth in SEQ ID NO: 48, or a nucleic acid sequence that has at least 95%, 96%, 97%, 98%, or 99% sequence identity to a nucleic acid sequence set forth in SEQ ID NO 48. In some embodiments, the nucleic acid genome of the recombinant oncolytic virus comprises a nucleic acid sequence set forth in SEQ ID NO: 80, or a nucleic acid sequence that has at least 95%, 96%, 97%, 98%, or 99% sequence identity to a nucleic acid sequence set forth in SEQ ID NO 80. In some embodiments, the nucleic acid genome of the recombinant oncolytic virus comprises a nucleic acid sequence set forth in SEQ ID NO: 82, or a nucleic acid sequence that has at least 95%, 96%, 97%, 98%, or 99% sequence identity to a nucleic acid sequence set forth in SEQ ID NO 82. In some embodiments, the nucleic acid genome of the recombinant oncolytic virus comprises a nucleic acid sequence set forth in SEQ ID NO: 84, or a nucleic acid sequence that has at least 95%, 96%, 97%, 98%, or 99% sequence identity to a nucleic acid sequence set forth in SEQ ID NO 84. In some embodiments, the nucleic acid genome of the recombinant oncolytic virus comprises a nucleic acid sequence set forth in SEQ ID NO: 86, or a nucleic acid sequence that has at least 95%, 96%, 97%, 98%, or 99% sequence identity to a nucleic acid sequence set forth in SEQ ID NO 86. In some embodiments, the nucleic acid genome of the recombinant oncolytic virus comprises a nucleic acid sequence set forth in SEQ ID NO: 87, or a nucleic acid sequence that has at least 95%, 96%, 97%, 98%, or 99% sequence identity to a nucleic acid sequence set forth in SEQ ID NO 87. In some embodiments, the nucleic acid genome of the recombinant oncolytic virus comprises a nucleic acid sequence set forth in SEQ ID NO: 88, or a nucleic acid sequence that has at least 95%, 96%, 97%, 98%, or 99% sequence identity to a nucleic acid sequence set forth in SEQ ID NO 88. In some embodiments, the nucleic acid genome of the recombinant oncolytic virus comprises a nucleic acid sequence set forth in SEQ ID NO: 89, or a nucleic acid sequence that has at least 95%, 96%, 97%, 98%, or 99% sequence identity to a nucleic acid sequence set forth in SEQ ID NO 89. In some embodiments, the nucleic acid genome of the recombinant oncolytic virus comprises a nucleic acid sequence set forth in SEQ ID NO: 90, or a nucleic acid sequence that has at least 95%, 96%, 97%, 98%, or 99% sequence identity to a nucleic acid sequence set forth in SEQ ID NO 90. In some embodiments, the nucleic acid genome of the recombinant oncolytic virus comprises a nucleic acid sequence set forth in SEQ ID NO: 91, or a nucleic acid sequence that has at least 95%, 96%, 97%, 98%, or 99% sequence identity to a nucleic acid sequence set forth in SEQ ID NO 91. In some embodiments, the nucleic acid genome of the recombinant oncolytic virus comprises a nucleic acid sequence set forth in SEQ ID NO: 92, or a nucleic acid sequence that has at least 95%, 96%, 97%, 98%, or 99% sequence identity to a nucleic acid sequence set forth in SEQ ID NO 92. In some embodiments, the nucleic acid genome of the recombinant oncolytic virus comprises a nucleic acid sequence set forth in SEQ ID NO: 93, or a nucleic acid sequence that has at least 95%, 96%, 97%, 98%, or 99% sequence identity to a nucleic acid sequence set forth in SEQ ID NO 93.

[0296] In some of any of such embodiments, the recombinant oncolytic virus comprises: an inactivating mutation of at least one viral gene; and at least one heterologous nucleic acid encoding one or more heterologous gene product, optionally wherein the one or more heterologous gene product is or comprises an immune modulating protein, a complement inhibitor, a T cell or NK cell evader, an anti-angiogenic protein, an interferon regulatory factor, or an apoptosis inducible protein, or a combination of any of the foregoing; and wherein: the at least one viral gene is or comprises A35R, optionally wherein the nucleic acid genome of the recombinant oncolytic virus comprises the nucleic acid sequence of SEQ ID NO: 3, or a nucleic acid sequence that has at least 95%, 96%, 97%, 98%, or 99% sequence identity to the nucleic acid sequence set forth in SEQ ID NO: 3.

[0297] In some of any of such embodiments, the recombinant oncolytic virus comprises: an inactivating mutation of at least one viral gene; and at least one heterologous nucleic acid encoding one or more heterologous gene product, optionally wherein the one or more heterologous gene product is or comprises an immune modulating protein, a complement inhibitor, a T cell or NK cell evader, an anti-angiogenic protein, an interferon regulatory factor, or an apoptosis inducible protein, or a combination of any of the foregoing; and wherein: the at least one viral gene is or comprises A35R and J2R, optionally wherein the nucleic acid genome of the recombinant oncolytic virus comprises the nucleic acid sequence of SEQ ID NO: 12, or a nucleic acid sequence that has at least 95%, 96%, 97%, 98%, or 99% sequence identity to the nucleic acid sequence set forth in SEQ ID NO: 12.

[0298] In some of any of such embodiments, the recombinant oncolytic virus comprises: an inactivating mutation of at least one viral gene; and at least one heterologous nucleic acid encoding one or more heterologous gene product, optionally wherein the one or more heterologous gene product is or comprises an immune modulating protein, a complement inhibitor, a T cell or NK cell evader, an anti-angiogenic protein, an interferon regulatory factor, or an apoptosis inducible protein, or a combination of any of the foregoing; and wherein: the at least one viral gene is or comprises J2R, and the inactivating mutation of J2R is by insertion of one or more heterologous nucleic acid each encoding one or more T cell or NK cell evader proteins, optionally wherein the one or more T cell or NK cell evader proteins comprises a set of proteins encoded by Cowpox virus ORFs 012, 203 and 018 (CPXV012-203-018), and wherein the at least one heterologous nucleic acid encoding one or more heterologous gene product comprises one or more heterologous nucleic acid each encoding one or more complement inhibitor that is introduced into a viral membrane gene to produce a fusion gene encoding a fusion protein, optionally wherein the viral membrane gene is F14.5L, optionally wherein the fusion is at the C-terminus of the F14.5L protein, and optionally wherein the nucleic acid genome of the recombinant oncolytic virus comprises the nucleic acid sequence of SEQ ID NO: 10, or a nucleic acid sequence that has at least 95%, 96%, 97%, 98%, or 99% sequence identity to the nucleic acid sequence set forth in SEQ ID NO: 10.

[0299] In some of any of such embodiments, the recombinant oncolytic virus comprises: an inactivating mutation of at least one viral gene; and at least one heterologous nucleic acid encoding one or more heterologous gene product, optionally wherein the one or more heterologous gene product is or comprises an immune modulating protein, a complement inhibitor, a T cell or NK cell evader, an anti-angiogenic protein, an interferon regulatory factor, or an apoptosis inducible protein, or a combination of any of the foregoing; and wherein: the at least one viral gene is or comprises J2R, optionally wherein the nucleic acid genome of the recombinant oncolytic virus comprises the nucleic acid sequence of SEQ ID NO: 4, or a nucleic acid sequence that has at least 95%, 96%, 97%, 98%, or 99% sequence identity to the nucleic acid sequence set forth in SEQ ID NO: 4.

[0300] In some of any of such embodiments, the recombinant oncolytic virus comprises: an inactivating mutation of at least one viral gene; and at least one heterologous nucleic acid encoding one or more heterologous gene product, optionally wherein the one or more heterologous gene product is or comprises an immune modulating protein, a complement inhibitor, a T cell or NK cell evader, an anti-angiogenic protein, an interferon regulatory factor, or an apoptosis inducible protein, or a combination of any of the foregoing; and wherein: the at least one viral gene is or comprises J2R and A35R, and the inactivating mutation of A35R is by insertion of one or more heterologous nucleic acid each encoding one or more immune modulating proteins, optionally wherein the one or more immune modulating proteins is selected from the group consisting of LIGHT, IRF3, IL-2, IL-12, and CXCL9, optionally wherein the one or more immune modulating proteins is LIGHT; and optionally wherein the nucleic acid genome of the recombinant oncolytic virus comprises the nucleic acid sequence of SEQ ID NO: 11, or a nucleic acid sequence that has at least 95%, 96%, 97%, 98%, or 99% sequence identity to the nucleic acid sequence set forth in SEQ ID NO: 11.

[0301] In some of any of such embodiments, the recombinant oncolytic virus comprises: an inactivating mutation of at least one viral gene; and at least one heterologous nucleic acid encoding one or more heterologous gene product, optionally wherein the one or more heterologous gene product is or comprises an immune modulating protein, a complement inhibitor, a T cell or NK cell evader, an anti-angiogenic protein, an interferon regulatory factor, or an apoptosis inducible protein, or a combination of any of the foregoing; and wherein: the at least one viral gene is or comprises J2R and A35R, and the inactivating mutation of J2R is by insertion of the one or more heterologous nucleic acid encoding one or more anti-angiogenic protein, optionally wherein the one or more anti-angiogenic protein comprises an inhibitor or VEGF and/or an inhibitor of Ang2, optionally wherein the one or more anti-angiogenic protein is a bispecific anti-VEGF/anti-Ang2 antibody; and optionally wherein the nucleic acid genome of the recombinant oncolytic virus comprises the nucleic acid sequence of SEQ ID NO: 13, or a nucleic acid sequence that has at least 95%, 96%, 97%, 98%, or 99% sequence identity to the nucleic acid sequence set forth in SEQ ID NO: 13.

[0302] In some of any of such embodiments, the recombinant oncolytic virus comprises: an inactivating mutation of at least one viral gene; and at least one heterologous nucleic acid encoding one or more heterologous gene product, optionally wherein the one or more heterologous gene product is or comprises an immune modulating protein, a complement inhibitor, a T cell or NK cell evader, an anti-angiogenic protein, an interferon regulatory factor, or an apoptosis inducible protein, or a combination of any of the foregoing; and wherein: the at least one viral gene is or comprises J2R and A35R, and the inactivating mutation of A35R is by insertion of the one or more heterologous nucleic acid encoding one or more immune modulating proteins, optionally wherein the one or more immune modulating proteins is selected from the group consisting of LIGHT, IRF3, IL-2, IL-12, and CXCL9, optionally wherein the one or more immune modulating proteins is LIGHT; and the inactivating mutation of J2R is by insertion of the one or more heterologous nucleic acid encoding one or more anti-angiogenic protein, optionally wherein the one or more anti-angiogenic protein comprises an inhibitor or VEGF and/or an inhibitor of Ang2, optionally wherein the one or more anti-angiogenic protein is a bispecific anti-VEGF/anti-Ang2 antibody; and optionally wherein the nucleic acid genome of the recombinant oncolytic virus comprises the nucleic acid sequence of SEQ ID NO: 47, or a nucleic acid sequence that has at least 95%, 96%, 97%, 98%, or 99% sequence identity to the nucleic acid sequence set forth in SEQ ID NO: 47.

[0303] In some of any of such embodiments, the recombinant oncolytic virus comprises: an inactivating mutation of at least one viral gene; and at least one heterologous nucleic acid encoding one or more heterologous gene product, optionally wherein the one or more heterologous gene product is or comprises an immune modulating protein, a complement inhibitor, a T cell or NK cell evader, an anti-angiogenic protein, an interferon regulatory factor, or an apoptosis inducible protein, or a combination of any of the foregoing; and wherein: the at least one viral gene is or comprises J2R, and the inactivating mutation of J2R is by insertion of one or more heterologous nucleic acid each encoding an apoptosis-inducible protein, optionally wherein the apoptosis-inducible protein is an inducible DED (iDED), an inducible Fas (iFas), or an inducible Cas9 (iCas9), optionally wherein the nucleic acid genome of the recombinant oncolytic virus comprises the nucleic acid sequence of SEQ ID NO: 7, 8, or 9, or a nucleic acid sequence that has at least 95%, 96%, 97%, 98%, or 99% sequence identity to the nucleic acid sequence set forth in SEQ ID NO: 7, 8, or 9.

[0304] In some of any of such embodiments, the recombinant oncolytic virus comprises: an inactivating mutation of at least one viral gene; and at least one heterologous nucleic acid encoding one or more heterologous gene product, optionally wherein the one or more heterologous gene product is or comprises an immune modulating protein, a complement inhibitor, a T cell or NK cell evader, an anti-angiogenic protein, an interferon regulatory factor, or an apoptosis inducible protein, or a combination of any of the foregoing; and wherein: the at least one viral gene is or comprises J2R, and the inactivating mutation of J2R is by insertion of one or more heterologous nucleic acid each encoding one or more immune modulating proteins, optionally wherein the one or more immune modulating proteins is selected from the group consisting of LIGHT, IRF3, IL-2, IL-12, and CXCL9, optionally wherein the one or more immune modulating proteins is IRF3; optionally wherein the nucleic acid genome of the recombinant oncolytic virus comprises the nucleic acid sequence of SEQ ID NO: 49, 50, or 93, or a nucleic acid sequence that has at least 95%, 96%, 97%, 98%, or 99% sequence identity to the nucleic acid sequence set forth in SEQ ID NO: 49, 50, or 93.

[0305] In some of any of such embodiments, the recombinant oncolytic virus comprises: an inactivating mutation of at least one viral gene; and at least one heterologous nucleic acid encoding one or more heterologous gene product, optionally wherein the one or more heterologous gene product is or comprises an immune modulating protein, a complement inhibitor, a T cell or NK cell evader, an anti-angiogenic protein, an interferon regulatory factor, or an apoptosis inducible protein, or a combination of any of the foregoing; and wherein: the at least one viral gene is or comprises J2R and B2R, optionally wherein the nucleic acid genome of the recombinant oncolytic virus comprises the nucleic acid sequence of SEQ ID NO: 48, or a nucleic acid sequence that has at least 95%, 96%, 97%, 98%, or 99% sequence identity to the nucleic acid sequence set forth in SEQ ID NO: 48.

[0306] In some of any of such embodiments, the recombinant oncolytic virus comprises: an inactivating mutation of at least one viral gene; and at least one heterologous nucleic acid encoding one or more heterologous gene product, optionally wherein the one or more heterologous gene product is or comprises an immune modulating protein, a complement inhibitor, a T cell or NK cell evader, an anti-angiogenic protein, an interferon regulatory factor, or an apoptosis inducible protein, or a combination of any of the foregoing; and wherein: the at least one viral gene is or comprises J2R and B2R, and the inactivating mutation of J2R is by insertion of one or more heterologous nucleic acid each encoding one or more immune modulating proteins, optionally wherein the one or more immune modulating proteins is selected from the group consisting of LIGHT, IRF3, IL-2, IL-12, and CXCL9, optionally wherein the one or more immune modulating proteins is IRF3; optionally wherein the nucleic acid genome of the recombinant oncolytic virus comprises the nucleic acid sequence of SEQ ID NO: 80, or a nucleic acid sequence that has at least 95%, 96%, 97%, 98%, or 99% sequence identity to the nucleic acid sequence set forth in SEQ ID NO: 80.

[0307] In some of any of such embodiments, the recombinant oncolytic virus comprises: an inactivating mutation of at least one viral gene; and at least one heterologous nucleic acid encoding one or more heterologous gene product, optionally wherein the one or more heterologous gene product is or comprises an immune modulating protein, a complement inhibitor, a T cell or NK cell evader, an anti-angiogenic protein, an interferon regulatory factor, or an apoptosis inducible protein, or a combination of any of the foregoing; and wherein: the at least one viral gene is or comprises J2R, B2R, and A35R; wherein: the inactivating mutation of J2R is by insertion of the one or more heterologous nucleic acid encoding one or more anti-angiogenic protein, optionally wherein the one or more anti-angiogenic protein comprises an inhibitor or VEGF and/or an inhibitor of Ang2, optionally wherein the one or more anti-angiogenic protein is a bispecific anti-VEGF/anti-Ang2 antibody; the inactivating mutation of B2R is by insertion of one or more heterologous nucleic acid each encoding one or more immune modulating proteins, optionally wherein the one or more immune modulating proteins is selected from the group consisting of LIGHT, IRF3, IL-2, IL-12, and CXCL9, optionally wherein the one or more immune modulating proteins is IRF3; and the inactivating mutation of A35R is by insertion of one or more heterologous nucleic acid encoding one or more immune modulating proteins, optionally wherein the one or more immune modulating proteins is selected from the group consisting of LIGHT, IRF3, IL-2, IL-12, and CXCL9, optionally wherein the one or more immune modulating proteins is LIGHT; and optionally wherein the nucleic acid genome of the recombinant oncolytic virus comprises the nucleic acid sequence of SEQ ID NO: 82, or a nucleic acid sequence that has at least 95%, 96%, 97%, 98%, or 99% sequence identity to the nucleic acid sequence set forth in SEQ ID NO: 82.

[0308] In some of any of such embodiments, the recombinant oncolytic virus comprises: an inactivating mutation of at least one viral gene; and at least one heterologous nucleic acid encoding one or more heterologous gene product, optionally wherein the one or more heterologous gene product is or comprises an immune modulating protein, a complement inhibitor, a T cell or NK cell evader, an anti-angiogenic protein, an interferon regulatory factor, or an apoptosis inducible protein, or a combination of any of the foregoing; and wherein: the at least one viral gene is or comprises J2R, B2R, and A56R; wherein: the inactivating mutation of J2R is by insertion of one or more heterologous nucleic acid encoding one or more immune modulating proteins, optionally wherein the one or more immune modulating proteins is IRF3; the inactivating mutation of A56R is by insertion of one or more heterologous nucleic acid encoding one or more immune modulating proteins, optionally wherein the one or more immune modulating proteins is IL-2, optionally wherein the IL-2 is an IL-2 superkine, optionally MDNA11; and optionally wherein the nucleic acid genome of the recombinant oncolytic virus comprises the nucleic acid sequence of SEQ ID NO: 84, or a nucleic acid sequence that has at least 95%, 96%, 97%, 98%, or 99% sequence identity to the nucleic acid sequence set forth in SEQ ID NO: 84.

[0309] In some of any of such embodiments, the recombinant oncolytic virus comprises: an inactivating mutation of at least one viral gene; and at least one heterologous nucleic acid encoding one or more heterologous gene product, optionally wherein the one or more heterologous gene product is or comprises an immune modulating protein, a complement inhibitor, a T cell or NK cell evader, an anti-angiogenic protein, an interferon regulatory factor, or an apoptosis inducible protein, or a combination of any of the foregoing; and wherein: the at least one viral gene is or comprises J2R, B2R, and A56R; wherein: the inactivating mutation of J2R is by insertion of one or more heterologous nucleic acid encoding one or more immune modulating proteins, optionally wherein the one or more immune modulating proteins is IRF3; the inactivating mutation of A56R is by insertion of one or more heterologous nucleic acid encoding one or more immune modulating proteins, optionally wherein the one or more immune modulating proteins comprises two or more immune modulating proteins selected from the group consisting of LIGHT, IRF3, IL-2, IL-12, and CXCL9, optionally wherein the two or more immune modulating proteins comprises IL-12 and CXCL9; and optionally wherein the nucleic acid genome of the recombinant oncolytic virus comprises the nucleic acid sequence of SEQ ID NO: 85, or a nucleic acid sequence that has at least 95%, 96%, 97%, 98%, or 99% sequence identity to the nucleic acid sequence set forth in SEQ ID NO: 85.

[0310] In some of any of such embodiments, the recombinant oncolytic virus comprises: an inactivating mutation of at least one viral gene; and at least one heterologous nucleic acid encoding one or more heterologous gene product, optionally wherein the one or more heterologous gene product is or comprises an immune modulating protein, a complement inhibitor, a T cell or NK cell evader, an anti-angiogenic protein, an interferon regulatory factor, or an apoptosis inducible protein, or a combination of any of the foregoing; and wherein: the at least one viral gene is or comprises J2R, B2R, and A56R; wherein: the inactivating mutation of B2R is by insertion of one or more heterologous nucleic acid encoding one or more immune modulating proteins, optionally wherein the one or more immune modulating proteins is IRF3; the inactivating mutation of A56R is by insertion of one or more heterologous nucleic acid encoding one or more immune modulating proteins, optionally wherein the one or more immune modulating proteins comprises two or more immune modulating proteins selected from the group consisting of LIGHT, IRF3, IL-2, IL-12, and CXCL9, optionally wherein the two or more immune modulating proteins comprises IL-12 and CXCL9; the inactivating mutation of J2R is by insertion of one or more heterologous nucleic acid each encoding an apoptosis-inducible protein, optionally wherein the apoptosis-inducible protein is an inducible DED (iDED); and optionally wherein the nucleic acid genome of the recombinant oncolytic virus comprises the nucleic acid sequence of SEQ ID NO: 86, or a nucleic acid sequence that has at least 95%, 96%, 97%, 98%, or 99% sequence identity to the nucleic acid sequence set forth in SEQ ID NO: 86.

[0311] In some of any of such embodiments, the recombinant oncolytic virus comprises: an inactivating mutation of at least one viral gene; and at least one heterologous nucleic acid encoding one or more heterologous gene product, optionally wherein the one or more heterologous gene product is or comprises an immune modulating protein, a complement inhibitor, a T cell or NK cell evader, an anti-angiogenic protein, an interferon regulatory factor, or an apoptosis inducible protein, or a combination of any of the foregoing; and wherein: the at least one viral gene is or comprises J2R, B2R, A35R, and A56R; wherein: the inactivating mutation of J2R is by insertion of the one or more heterologous nucleic acid encoding one or more anti-angiogenic protein, optionally wherein the one or more anti-angiogenic protein comprises an inhibitor or VEGF and/or an inhibitor of Ang2, optionally wherein the one or more anti-angiogenic protein is a bispecific anti-VEGF/anti-Ang2 antibody; the inactivating mutation of B2R is by insertion of one or more heterologous nucleic acid encoding one or more immune modulating proteins, optionally wherein the one or more immune modulating proteins is IRF3; the inactivating mutation of A35R is by insertion of the one or more heterologous nucleic acid encoding one or more immune modulating proteins, optionally wherein the one or more immune modulating proteins is selected from the group consisting of LIGHT, IRF3, IL-2, IL-12, and CXCL9, optionally wherein the one or more immune modulating proteins is LIGHT; the inactivating mutation of A56R is by insertion of one or more heterologous nucleic acid encoding one or more immune modulating proteins, wherein the one or more immune modulating proteins is IL-2 superkine MDNA11; and optionally wherein the nucleic acid genome of the recombinant oncolytic virus comprises the nucleic acid sequence of SEQ ID NO: 87, or a nucleic acid sequence that has at least 95%, 96%, 97%, 98%, or 99% sequence identity to the nucleic acid sequence set forth in SEQ ID NO: 87.

[0312] In some of any of such embodiments, the recombinant oncolytic virus comprises: an inactivating mutation of at least one viral gene; and at least one heterologous nucleic acid encoding one or more heterologous gene product, optionally wherein the one or more heterologous gene product is or comprises an immune modulating protein, a complement inhibitor, a T cell or NK cell evader, an anti-angiogenic protein, an interferon regulatory factor, or an apoptosis inducible protein, or a combination of any of the foregoing; and wherein: the at least one viral gene is or comprises J2R, B2R, A35R, and A56R; wherein: the inactivating mutation of J2R is by insertion of the one or more heterologous nucleic acid encoding one or more anti-angiogenic protein, optionally wherein the one or more anti-angiogenic protein comprises an inhibitor or VEGF and/or an inhibitor of Ang2, optionally wherein the one or more anti-angiogenic protein is a bispecific anti-VEGF/anti-Ang2 antibody; the inactivating mutation of B2R is by insertion of one or more heterologous nucleic acid encoding one or more immune modulating proteins, optionally wherein the one or more immune modulating proteins is IRF3; the inactivating mutation of A35R is by insertion of the one or more heterologous nucleic acid encoding one or more immune modulating proteins, optionally wherein the one or more immune modulating proteins is selected from the group consisting of LIGHT, IRF3, IL-2, IL-12, and CXCL9, optionally wherein the one or more immune modulating proteins is LIGHT; the inactivating mutation of A56R is by insertion of one or more heterologous nucleic acid encoding one or more immune modulating proteins, wherein the one or more immune modulating proteins is IL-2 superkine MDNA11T, optionally wherein the MDNA11T comprises the amino acid sequence set forth in SEQ ID NO: 98; and optionally wherein the nucleic acid genome of the recombinant oncolytic virus comprises the nucleic acid sequence of SEQ ID NO: 88, or a nucleic acid sequence that has at least 95%, 96%, 97%, 98%, or 99% sequence identity to the nucleic acid sequence set forth in SEQ ID NO: 88.

[0313] In some of any of such embodiments, the recombinant oncolytic virus comprises: an inactivating mutation of at least one viral gene; and at least one heterologous nucleic acid encoding one or more heterologous gene product, optionally wherein the one or more heterologous gene product is or comprises an immune modulating protein, a complement inhibitor, a T cell or NK cell evader, an anti-angiogenic protein, an interferon regulatory factor, or an apoptosis inducible protein, or a combination of any of the foregoing; and wherein: the at least one viral gene is or comprises J2R, B2R, and A56R; wherein: the inactivating mutation of J2R is by insertion of one or more heterologous nucleic acid each encoding one or more T cell or NK cell evader proteins, optionally wherein the one or more T cell or NK cell evader proteins comprises a set of proteins encoded by Cowpox virus ORFs 012, 203 and 018 (CPXV012-203-018); the inactivating mutation of B2R is by insertion of one or more heterologous nucleic acid encoding one or more immune modulating proteins, optionally wherein the one or more immune modulating proteins is IRF3; the inactivating mutation of A56R is by insertion of one or more heterologous nucleic acid each encoding one or more immune modulating proteins, optionally wherein the one or more immune modulating proteins is selected from the group consisting of LIGHT, IRF3, IL-2, IL-12, and CXCL9, optionally wherein the one or more immune modulating proteins is an IL-2 superkine, optionally MDNA11 or MDNA11T; the at least one heterologous nucleic acid encoding one or more heterologous gene product comprises one or more heterologous nucleic acid each encoding one or more complement inhibitor, optionally CRASP-2, that is introduced into a viral membrane gene, optionally F14.5L, to produce a fusion gene encoding a fusion protein, optionally wherein the fusion is at the C-terminus of the F14.5L protein; and optionally wherein the nucleic acid genome of the recombinant oncolytic virus comprises the nucleic acid sequence of SEQ ID NO: 89, or a nucleic acid sequence that has at least 95%, 96%, 97%, 98%, or 99% sequence identity to the nucleic acid sequence set forth in SEQ ID NO: 89.

[0314] In some of any of such embodiments, the recombinant oncolytic virus comprises: an inactivating mutation of at least one viral gene; and at least one heterologous nucleic acid encoding one or more heterologous gene product, optionally wherein the one or more heterologous gene product is or comprises an immune modulating protein, a complement inhibitor, a T cell or NK cell evader, an anti-angiogenic protein, an interferon regulatory factor, or an apoptosis inducible protein, or a combination of any of the foregoing; and wherein: the at least one viral gene is or comprises J2R, B2R, and A56R; wherein: the inactivating mutation of J2R is by insertion of one or more heterologous nucleic acid each encoding one or more T cell or NK cell evader proteins, optionally wherein the one or more T cell or NK cell evader proteins comprises a set of proteins encoded by Cowpox virus ORFs 012, 203 and 018 (CPXV012-203-018); the inactivating mutation of B2R is by insertion of one or more heterologous nucleic acid encoding one or more immune modulating proteins, optionally wherein the one or more immune modulating proteins is IRF3; the inactivating mutation of A56R is by insertion of one or more heterologous nucleic acid encoding one or more immune modulating proteins, optionally wherein the one or more immune modulating proteins comprises two or more immune modulating proteins selected from the group consisting of LIGHT, IRF3, IL-2, IL-12, and CXCL9, optionally wherein the two or more immune modulating proteins comprises IL-12 and CXCL9; the at least one heterologous nucleic acid encoding one or more heterologous gene product comprises one or more heterologous nucleic acid each encoding one or more complement inhibitor, optionally CRASP-2, that is introduced into a viral membrane gene, optionally F14.5L, to produce a fusion gene encoding a fusion protein, optionally wherein the fusion is at the C-terminus of the F14.5L protein; and optionally wherein the nucleic acid genome of the recombinant oncolytic virus comprises the nucleic acid sequence of SEQ ID NO: 90, or a nucleic acid sequence that has at least 95%, 96%, 97%, 98%, or 99% sequence identity to the nucleic acid sequence set forth in SEQ ID NO: 90.

[0315] In some of any of such embodiments, the recombinant oncolytic virus comprises: an inactivating mutation of at least one viral gene; and at least one heterologous nucleic acid encoding one or more heterologous gene product, optionally wherein the one or more heterologous gene product is or comprises an immune modulating protein, a complement inhibitor, a T cell or NK cell evader, an anti-angiogenic protein, an interferon regulatory factor, or an apoptosis inducible protein, or a combination of any of the foregoing; and wherein: the at least one viral gene is or comprises B2R and J2R, and the inactivating mutation of J2R is by insertion of one or more heterologous nucleic acid each encoding one or more immune modulating proteins, optionally wherein the one or more immune modulating proteins is selected from the group consisting of LIGHT, IRF3, IL-2, IL-12, and CXCL9, optionally wherein the one or more immune modulating proteins is IRF3; and optionally wherein the nucleic acid genome of the recombinant oncolytic virus comprises the nucleic acid sequence of SEQ ID NO: 91, or a nucleic acid sequence that has at least 95%, 96%, 97%, 98%, or 99% sequence identity to the nucleic acid sequence set forth in SEQ ID NO: 91.

[0316] In some of any of such embodiments, the recombinant oncolytic virus comprises: an inactivating mutation of at least one viral gene; and at least one heterologous nucleic acid encoding one or more heterologous gene product, optionally wherein the one or more heterologous gene product is or comprises an immune modulating protein, a complement inhibitor, a T cell or NK cell evader, an anti-angiogenic protein, an interferon regulatory factor, or an apoptosis inducible protein, or a combination of any of the foregoing; and wherein: the at least one viral gene is or comprises B2R, J2R, and A56R, and the inactivating mutation of J2R is by insertion of one or more heterologous nucleic acid each encoding one or more immune modulating proteins, optionally wherein the one or more immune modulating proteins is selected from the group consisting of LIGHT, IRF3, IL-2, IL-12, and CXCL9, optionally wherein the one or more immune modulating proteins is IRF3; and the inactivating mutation of A56R is by insertion of one or more heterologous nucleic acid encoding one or more immune modulating proteins, optionally wherein the one or more immune modulating proteins comprises two or more immune modulating proteins selected from the group consisting of LIGHT, IRF3, IL-2, IL-12, and CXCL9, optionally wherein the two or more immune modulating proteins comprises IL-12 and CXCL9; and optionally wherein the nucleic acid genome of the recombinant oncolytic virus comprises the nucleic acid sequence of SEQ ID NO: 92, or a nucleic acid sequence that has at least 95%, 96%, 97%, 98%, or 99% sequence identity to the nucleic acid sequence set forth in SEQ ID NO: 92.

[0317] In some of any of such embodiments, the recombinant oncolytic virus comprises: an inactivating mutation of at least one viral gene; and at least one heterologous nucleic acid encoding one or more heterologous gene product, optionally wherein the one or more heterologous gene product is or comprises an immune modulating protein, a complement inhibitor, a T cell or NK cell evader, an anti-angiogenic protein, an interferon regulatory factor, or an apoptosis inducible protein, or a combination of any of the foregoing; and wherein: the at least one viral gene is or comprises J2R, and the inactivating mutation of J2R is by insertion of one or more heterologous nucleic acid each encoding one or more immune modulating proteins, optionally wherein the one or more immune modulating proteins is selected from the group consisting of LIGHT, IRF3, IL-2, IL-12, and CXCL9, optionally wherein the one or more immune modulating proteins is IRF3; and optionally wherein the nucleic acid genome of the recombinant oncolytic virus comprises the nucleic acid sequence of SEQ ID NO: 93, or a nucleic acid sequence that has at least 95%, 96%, 97%, 98%, or 99% sequence identity to the nucleic acid sequence set forth in SEQ ID NO: 93.

[0318] In some of any of such embodiments, the nucleic acid genome of the recombinant oncolytic virus comprises a nucleic acid sequence set forth in any one of SEQ ID NOs: 48, 80, 82, and 84-93, or a nucleic acid sequence that has at least 95%, 96%, 97%, 98%, or 99% sequence identity to a nucleic acid sequence set forth in any one of SEQ ID NOs 48, 80, 82, and 84-93; and is characterized by one or more of: (i) a variant 017 open reading frame (ORF) encoding an amino acid sequence that has at least 95% sequence identity to SEQ ID NO: 57 and comprises a polar uncharged amino acid at position 66, optionally a threonine (T) at position 66; (ii) a variant 038 (K5L) ORF comprising a nucleotide insertion to effect a frameshift mutation, wherein the 038 (K5L) gene product is altered; (iii) a variant 059 (E2L) ORF encoding an amino acid sequence that is at least 95% sequence identity to SEQ ID NO:60 and comprises a hydrophobic amino acid other than leucine at position 419, optionally a phenylalanine (F) at position 419; (iv) a variant 104 (H4L) ORF encoding an amino acid sequence having at least 95% sequence identity to SEQ ID NO:61 and comprises a negatively charged amino acid at position 591, optionally aspartic acid (D) at position 591; and (v) a variant 182 (A56R) ORF comprising deletion of two nucleotides to effect a frameshift mutation, wherein the 182 (A56R) ORF gene product is altered.

[0319] In some of any of such embodiments, the nucleic acid genome of the recombinant oncolytic virus comprises a nucleic acid sequence set forth in any one of SEQ ID NOs: 48, 80, 82, and 84-93, or a nucleic acid sequence that has at least 95%, 96%, 97%, 98%, or 99% sequence identity to a nucleic acid sequence set forth in any one of SEQ ID NOs 48, 80, 82, and 84-93; and is characterized by one or more of: (i) a guanine (G) at the position corresponding to position 7770 of SEQ ID NO: 1; (ii) a thymine (T) at the position corresponding to position 15261 of SEQ ID NO: 1; (iii) a G at the position corresponding to position 32136 of SEQ ID NO: 1; (iv) a G at the position corresponding to position 49455 of SEQ ID NO: 1; (v) a cytosine (C) at the position corresponding to position 92969 of SEQ ID NO: 1; (vi) the nucleic acid sequence CACTTATATAT at the positions corresponding to positions 106870 to 106880 of SEQ ID NO: 1; (vii) the nucleic acid sequence GTTTTCATTA at the positions corresponding to positions 111267 to 111276 of SEQ ID NO: 1; (viii) an adenine (A) at the position corresponding to position 162715 of SEQ ID NO: 1; (ix) the nucleic acid sequence TACAGACACC at the positions corresponding to positions 165844 to 185853 of SEQ ID NO: 1; and (x) a C at the position corresponding to position 187805 of SEQ ID NO: 1.

[0320] A. Stealth Viruses

[0321] Provided herein, in various embodiments, are recombinant viruses comprising heterologous nucleic acids encoding for “stealth proteins” that can be stably and efficiently expressed in many types of virus infected cells. Such stealth proteins can increase the ability of the virus to evade the host's immune system attack, such as by T cells, e.g., cytotoxic T lymphocytes (CTLs) or natural killer (NK) cells. In some embodiments, such stealth proteins can increase the ability of the recombinant virus to evade the host's complement cascade/system activation.

[0322] Accordingly, in some embodiments, provided herein is a recombinant oncolytic virus comprising at least one heterologous nucleic acid encoding one or more heterologous gene product, wherein the one or more heterologous gene product is or comprises a complement inhibitor or a T cell or NK cell evader (also sometimes referred to as a stealth protein).

[0323] In some embodiments, the recombinant virus includes oncolytic viruses. In some embodiments, the recombinant virus does not include oncolytic viruses. In some embodiments, the recombinant virus incudes any viruses described herein or incorporated by reference herein. In some embodiments, the recombinant virus includes vaccinia viruses. In some embodiments, the recombinant virus includes VIP02-derived viruses.

[0324] Oncolytic viruses (OV) can create a favorable microenvironment for the action of the immune system against unique cancer cell determinants; however, the anti-viral immunity triggered against viral antigens from the resultant infection is also a key player during OV-based therapies. Indeed, induced anti-viral immunity can be detrimental for cancer virotherapy, since the activation of the immune system against the virus itself is expected to restrict the viral replication and spread, leading to a decrease in therapeutic efficacy. Lemos de Matos et al., Mol Ther Methods Clin Dev. 2020 Jun. 12; 17: 349-358. The complement system keeps a constant vigil against viruses. Its ability to recognize viruses and virus-infected cells, and trigger an immune response, results in neutralization of viruses and killing of the infected cells. This selection pressure exerted by complement on viruses has made them evolve a multitude of countermeasures. Agrawal et al., Front Microbiol. 2017; 8: 1117.

[0325] In some embodiments, the stealth protein includes, but it is not limited to, Borrelia burgdorferi complement regulatory-acquiring surface protein-2 (CRASP-2), minimized complement regulator factor H (miniFH) and Cowpox virus ORFs 012, 203 and 018 (CPXV012-203-018). Further details about stealth proteins and mechanisms involved in evasion of the host's immune system, such as evading the host's complement or NK or T cell cytotoxcity, can be found in Monrat Chulanetra and Wanpen Chaicumpa, Front. Cell. Infect. Microbiol., 2021, Front. Cell. Infect. Microbiol. 11:702125, which is hereby incorporated by reference for all purposes.

[0326] The complement system is an important component of the innate immunity that helps eliminate pathogens and, consequently, during the course of evolution, pathogens have developed diverse strategies to avoid destruction by complement activation. One of the strategies is the ability to acquire proteins that allow pathogens to control steps involved in activation of host's immune response upon infection, hereinafter “stealth proteins”. See Kraiczy et al., Infect Immun 2001 December; 69(12): 7800-7809.

[0327] The complement system employs a complex cascade of proteolytic cleavages of more than plasma and cell membrane proteins and leads to induction of an inflammatory response, phagocyte and neutrophil chemotaxis, pathogen neutralization and subsequent opsonization, and lysis of the infected cells. The activation can be initiated via three independent pathways (i) classical, binding of the first component in the cascade C1q to an antibody-antigen complex; (ii) alternative, a spontaneous hydrolysis of the downstream complement component 3 (C3) convertase and its interaction with pathogen surface; (iii) the mannose-binding lectin (MBL) pathway triggered by MBL binding to mannose residues on the pathogen surface. All three pathways converge at the stage of cleavage of C3 into C3a, antimicrobial peptide and C3b, an opsonin that binds to the pathogen and labels it for degradation. Because the effector compounds generated in the complement cascade can be delivered to any surface including host membranes, intact host cells protect themselves by expressing multiple complement regulatory proteins. Janeway et al., Immunobiology: The Immune System in Health and Disease. 5th edition.

[0328] Inadequate control of the complement system is the underlying or aggravating factor in many human diseases. The alternative pathway (AP) of the complement has the unique property of remaining continuously and indiscriminatingly activated, albeit at a low level. In the AP, C3b self-propagates via a positive-feedback amplification loop that requires very tight regulation mediated by two key soluble AP regulators Factor H (FH) and its splice product FH like-1 (FHL-1). A stealth protein, an engineered version of FH, miniFH, contains only the N- and C-terminal portions of FH linked by an optimized peptide and shows ˜10-fold higher ex vivo potency to inhibit complement activation when compared with FH. Markus J. Harder,*J Immunol. Author manuscript; available in PMC 2017 Jan. 15. J Immunol. 2016 Jan. 15; 196(2): 866-876. & Christoph Q. Schmidt/J Immunol. Author manuscript; available in PMC 2014 Jun. 1. J Immunol. 2013 Jun. 1; 190(11): 10.4049/jimmuno1.1203548. Published online 2013 Apr. 24. doi: 10.4049/jimmuno1.1203548.

[0329] A microorganism that has developed during evolution the ability to avoid complement by producing stealth proteins is Borrelia burgdorferi, a spirochete that causes Lyme disease (LD), the most common vector-borne disease in the northern hemisphere, transmitted by ticks. Upon tick feeding, spirochetes are exposed to host blood and thus to the first line of innate immunity, which they must overcome to survive. A key evasion mechanism Borrelia burgdorferi has developed is the production of complement- or CRP-binding proteins, including CRASPs, a stealth protein that can facilitate complement inactivation. See Yi-Pin Lin et al., Front Cell Infect Microbiol. 2020; 10: 1. US20120142023A1. CRASP-2 (also named CspZ) binds to FH/FHL-1 to confer serum resistance in a gain-of-function B. burgdorferi by inhibiting complement activation on the spirochete surface. Infect Immun 2001 December; 69(12): 7800-7809. Peter Kraiczy. US20200323972A1 Composition and method for generating immunity to Borrelia burgdorferi.

[0330] Downregulation of MHC class I on the cell surface is an immune evasion mechanism shared by many DNA viruses, including cowpox virus. CPXVs are members of the Orthopoxvirus genus that includes variola virus, camelpoxvirus, and monkeypox virus and encode an elaborate arsenal of immune-evasion proteins. The ability of CPXV to infect a wide range of mammalian hosts is likely due to the fact that, among the orthopoxviruses, CPXV encodes the most complete set of open reading frames expected to encode immunomodulatory proteins. Among the proteins encoded are CPXV012 and CPXV203, that can prevent cytotoxic T cell recognition by interfering with MHC I—mediated antigen presentation. While CPXV012 inhibits antigenic peptide transport from the cytosol to the ER, CPXV203 blocks MHCI trafficking to the cell surface. Dina Alzhanova and Klaus Frith*Microbes Infect. 2010 Nov.; 12(12-13): 900-909. McCoy et al., Molecular Immunology 55 (2013) 156-158. Furthermore, the Birghton Red strain produces OMCP (also named CPXV018) a 171-residue protein that is abundantly secreted from infected cells and that can block NKG2D mediated target cell killing by Natural Killer Cells in vitro. Cell Host & Microbe Volume 6, Issue 5, 19 Nov. 2009, Pages 422-432/Journal home page for Cell Host & Microbe/Two Mechanistically Distinct Immune Evasion Proteins of Cowpox Virus Combine to Avoid Antiviral CD8 T Cells.

[0331] In some embodiments, the one or more heterologous gene product comprise a complement inhibitor. In some embodiments, the complement inhibitor is Borrelia burgdorferi complement regulatory-acquiring surface protein-2 (CRASP-2) or minimized complement regulator factor H (miniFH). In some embodiments, the complement inhibitor is a CRASP-2 gene product (UniProtKB-050665). The CRASP-2 protein can increase the ability of the recombinant virus to evade the host's complement. Specifically, in some embodiments, the recombinant virus comprises an expression cassette containing a CRASP-2 cDNA fused to the F14.5L gene locus under the control of vaccinia F14.5L gene promoter. In some embodiments, the CRASP-2 molecule includes a full-length CRASP-2. In some embodiments, the complement inhibitor is CRASP-2 and has a sequence of amino acids that exhibits at least 85%, 90% or 95% sequence identity to the sequence set forth in SEQ ID NO:18. In some embodiments, the complement inhibitor has the sequence set forth in SEQ ID NO:18.

[0332] In some embodiments, the recombinant virus comprises a heterologous nucleic acid that encodes a CRASP-2 molecule comprising CRASP-2 cDNA fused to the F14.5L gene locus, wherein the CRASP-2 comprises an amino acid sequence having at least 90% sequence identity to the amino acid sequence of SEQ ID NO: 18.

[0333] In some embodiments, the recombinant virus comprises an amino acid sequence that has at least 70%, such as at least 75%, 80%, 85% or 90% sequence identity to the amino acid sequence of SEQ ID NO: 18. For example, in some embodiments, the recombinant virus comprises an amino acid sequence that has at least 91%, 92%, 93%, 94%, 95%, 95%, 97%, 98%, 99%, 99.1%, 99.2%, 99.3%, 99.4%, 99.5%, 99.6%, 99.7%, 99.8%, 99.9% sequence identity to the amino acid sequence of SEQ ID NO: 18, but is less than 100% identical to the amino acid sequence of SEQ ID NO: 18.

[0334] In some embodiments, the heterologous nucleic acid that encodes the CRASP-2 gene product is operably linked to the F14.5L gene promoter. In some embodiments, the recombinant virus which includes a heterologous nucleic acid that encodes a CRASP-2 gene product (e.g., comprising the amino acid sequence of SEQ ID NO: 18) is derived from the clonal VIP02 (comprising the nucleic acid sequence of SEQ ID NO: 1) strain and includes a sequence of nucleotides that has at least 70%, such as at least 75%, 80%, 85% or 90% sequence identity to SEQ ID NO: 5 (also named VIR27). In some embodiments, the heterologous gene product is CRASP-2 and is operably linked to the F14.5L gene promoter in the genome of the virus. In some embodiments, the recombinant virus comprises a nucleic acid sequence that has at least 91%, 92%, 93%, 94%, 95%, 95%, 97%, 98%, 99%, 99.1%, 99.2%, 99.3%, 99.4%, 99.5%, 99.6%, 99.7%, 99.8%, or 99.9% sequence identity to the nucleic acid sequence of SEQ ID NO: 5, but is less than 100% identical to the nucleic acid sequence of SEQ ID NO: 5. In some embodiments, the nucleic acid genome of the recombinant oncolytic virus comprises a sequence of nucleotides that has at least 95%, at least 96%, at least 97%, at least 98% or at least 99% sequence identity to the sequence set forth in SEQ ID NO:5. In some embodiments, the heterologous gene product is CRASP-2 and is operably linked to the F14.5L gene promoter in the genome of the virus, and the recombinant virus comprises a nucleic acid sequence that has at least 91%, 92%, 93%, 94%, 95%, 95%, 97%, 98%, 99%, 99.1%, 99.2%, 99.3%, 99.4%, 99.5%, 99.6%, 99.7%, 99.8%, or 99.9% sequence identity to the nucleic acid sequence of SEQ ID NO: 5. In some embodiments, the heterologous gene product is CRASP-2 and is operably linked to the F14.5L gene promoter in the genome of the virus, and the recombinant virus comprises the nucleic acid sequence of SEQ ID NO: 5. In some embodiments, the recombinant virus, e.g., recombinant oncolytic virus, comprises the nucleic acid sequence of SEQ ID NO: 5. A recombinant oncolytic virus comprising the nucleic acid sequence of SEQ ID NO: 5 is also referred to herein as VIR27.

[0335] Recombinant viruses provided herein, in various embodiments, exhibit an increased ability to evade the host's complement. In some embodiments, recombinant viruses provided herein can escape complement inhibition in in vivo and in vitro systems. In particular embodiments, VIR27 (comprising the nucleic acid sequence of SEQ ID NO: 5) can escape complement inhibition in an in vitro system of complement inhibition upon incubation of an effective dose of VIR27 (comprising the nucleic acid sequence of SEQ ID NO: 5) with human and/or BABL/c mice serum (FIG. 6). In particular embodiments, administration of an effective dose of VIR27 (comprising the nucleic acid sequence of SEQ ID NO: 5) to a subject inhibits tumor, hyperplasia, or metastasis growth in an in vivo model (FIG. 7).

[0336] In some embodiments, the complement inhibitor is a miniFH gene product. Specifically, in some embodiments, the recombinant virus comprises an expression cassette comprising a miniFH cDNA fused to the F14.5L gene locus under the control of vaccinia F14.5L gene promoter. Further details about minFH can be found in Schmidt et al., J Immunol. 2013 Jun. 1; 190(11): 10.4049/jimmuno1.1203548., which is hereby incorporated by reference for all purposes. In some embodiments, the complement inhibitor is a miniFH gene product comprising an amino acid sequence having at least 85%, 90%, or 95% sequence identity to the amino acid sequence set forth in SEQ ID NO:19. In some embodiments, the complement inhibitor is a miniFH gene product comprising the amino acid sequence set forth in SEQ ID NO:19.

[0337] In some embodiments, the stealth protein includes an FH-based inhibitor, miniFH In some embodiments, the miniFH gene product can increase the ability of the recombinant virus to evade the host's complement. In some embodiments, a recombinant virus is provided which includes a polynucleotide that encodes a miniFH gene product including miniFH cDNA fused to the F14.5L gene locus, wherein the miniFH polypeptide comprises an amino acid sequence having at least 90% sequence identity to the amino acid sequence of SEQ ID NO: 19. In some embodiments, the recombinant virus comprises a polypeptide comprising an amino acid sequence that has at least 70%, such as at least 75%, 80%, 85%, or 90% sequence identity to the amino acid sequence of SEQ ID NO: 19. For example, in some embodiments, the recombinant virus comprises an amino acid sequence that has at least 91%, 92%, 93%, 94%, 95%, 95%, 97%, 98%, 99%, 99.1%, 99.2%, 99.3%, 99.4%, 99.5%, 99.6%, 99.7%, 99.8%, or 99.9% sequence identity to the amino acid sequence of SEQ ID NO: 19, but is less than 100% identical to the amino acid sequence of SEQ ID NO: 19.

[0338] In some embodiments, the nucleic acid genome of the recombinant oncolytic virus comprises a sequence of nucleotides that has at least 95%, at least 96%, at least 97%, at least 98% or at least 99% sequence identity to the nucleic acid sequence set forth in SEQ ID NO:6. In some embodiments, the heterologous gene product is miniFH and is operably linked to the F14.5L gene promoter in the genome of the virus, and the recombinant virus comprises a nucleic acid sequence that has at least 91%, 92%, 93%, 94%, 95%, 95%, 97%, 98%, 99%, 99.1%, 99.2%, 99.3%, 99.4%, 99.5%, 99.6%, 99.7%, 99.8%, or 99.9% sequence identity to the nucleic acid sequence of SEQ ID NO: 6. In some embodiments, the heterologous gene product is miniFH and is operably linked to the F14.5L gene promoter in the genome of the virus, and the recombinant virus comprises the nucleic acid sequence of SEQ ID NO: 6. In some embodiments, the recombinant virus, e.g., recombinant oncolytic virus, comprises the nucleic acid sequence of SEQ ID NO: 6. A recombinant oncolytic virus comprising the nucleic acid sequence of SEQ ID NO: 6 is also referred to herein as VIR37.

[0339] In some embodiments, the polynucleotide that encodes the miniFH molecule is operably linked to the F14.5L gene promoter. In some embodiments, the recombinant virus which includes a polynucleotide that encodes an miniFH molecule (e.g., comprising the amino acid sequence of SEQ ID NO: 19) is derived from the clonal VIP02 (comprising the nucleic acid sequence of SEQ ID NO: 1) strain and includes a nucleic acid sequence that has at least 70%, such as at least 75%, 80%, 85% or 90% sequence identity to SEQ ID NO: 6 (also named VIR37). In some embodiments, the recombinant virus comprises a nucleic acid sequence that has at least 91%, 92%, 93%, 94%, 95%, 95%, 97%, 98%, 99%, 99.1%, 99.2%, 99.3%, 99.4%, 99.5%, 99.6%, 99.7%, 99.8%, or 99.9% sequence identity to the nucleic acid sequence of SEQ ID NO: 6, but is less than 100% identical to SEQ ID NO: 6. In some embodiments, the recombinant virus comprises a nucleic acid sequence that comprises the nucleic acid sequence of SEQ ID NO: 6. In some embodiments, the nucleic acid genome of the recombinant oncolytic virus comprises a sequence of nucleotides that has at least 95%, at least 96%, at least 97%, at least 98%, or at least 99% sequence identity to the sequence set forth in SEQ ID NO:6. In some embodiments, the nucleic acid genome of the recombinant oncolytic virus comprises the nucleic acid sequence of SEQ ID NO: 6.

[0340] Recombinant viruses provided herein, in various embodiments, exhibit an increased ability to evade the host's complement. In some embodiments, recombinant viruses provided herein can escape complement inhibition in in vivo and in vitro systems. In particular embodiments, VIR37 (comprising the nucleic acid sequence of SEQ ID NO: 6) can escape complement inhibition in an in vitro system of complement inhibition upon incubation of an effective dose of VIR37 (comprising the nucleic acid sequence of SEQ ID NO: 6) with human and/or BABL/c mice serum (FIG. 6).

[0341] In some embodiments, the one or more heterologous gene product is a T cell evader or NK cell evader. A T cell evader or NK cell evader gene product can increase the ability of the virus to evade the host's immune system attack, such as by T cells, e.g., cytotoxic T lymphocytes (CTLs) or natural killer (NK) cells. In particular, such T cell evader or NK cell evader gene products can increase the ability of the recombinant virus to evade the host's complement cascade/system activation.

[0342] In some embodiments, the T cell evader or NK cell evader is a set of proteins encoded by Cowpox virus ORFs 012, 203 and 018 (CPXV012-203-018). CPXV012-203-018 is a synthetic DNA fragment. ORFs 012, 203 and 018 are expressed separately under their own promoters within the CPXV012-203-018 synthetic DNA fragment to encode the CPXV012, CPXV203, and CPXV018 proteins. The Cowpox virus evades CTLs by CPXV012 and CPXV203. While CPXV012 inhibits antigenic peptide transport from the cytosol to the endoplasmic reticulum (ER), CPXV203 blocks MHC I trafficking to the cell surface by exploiting the KDEL-receptor recycling pathway. CPXV018 encodes a soluble NKG2D ligand known as the orthopoxvirus major histocompatibility complex (MHC) class I-like protein (OMCP), which can block NKG2D-mediated cytotoxicity.

[0343] Recombinant viruses expressing a CRASP-2 gene product (UniProtKB-050665) and the Cowpox virus Open Reading Frames (ORFs) 012, 203 and 018 (CPXV012-203-018) have been generated herein in various embodiments. Specifically, in some embodiments, the recombinant virus, e.g., recombinant oncolytic virus, comprises an expression cassette containing a CRASP-2 cDNA fused to the F14.5L gene locus under the control of vaccinia F14.5L gene promoter and a contiguous polynucleotide sequence including Open Reading Frames (ORFs) 012, 203 and 018 with their own promoters (CPXV012-203-018) inserted into the J2R gene locus.

[0344] In some embodiments, the stealth protein includes Borrelia burgdorferi complement regulatory-acquiring surface protein-2 (CRASP-2). In some embodiments, expression of CRASP-2 protein can increase the ability of the recombinant virus to evade the host's complement. In some embodiments, a recombinant virus is provided which includes a polynucleotide that encodes a CRASP-2 molecule including CRASP-2 cDNA fused to the F14.5L gene locus, wherein the CRASP-2 polypeptide comprises an amino acid sequence having at least 90% sequence identity to SEQ ID NO: 18. In some embodiments, the stealth protein comprises Cowpox virus Open Reading Frames (ORFs) 012, 203 and 018 with their own promoters (CPXV012-203-018). In some embodiments, expression of the Cowpox virus Open Reading Frames (ORFs) 012, 203 and 018 (CPXV012-203-018) can increase the ability of the recombinant virus to evade the host's T and NK cells. In some embodiments, expression of stealth proteins including CRASP-2 and Cowpox virus Open Reading Frames (ORFs) 012, 203 and 018 can increase the ability of the recombinant virus to evade the host's complement and T and NK cells.

[0345] In some embodiments, the T cell evader or NK cell evader is a set of proteins encoded by Cowpox virus ORFs 012, 203 and 018 (CPXV012-203-018) comprising the amino acid sequences of SEQ ID NOs: 20, 21, and 22, or amino acid sequences having at least 70%, 80%, 85%, 90%, or 95% sequence identity to the amino acid sequences of SEQ ID NOs: 20, 21, and 22. In some embodiments, the recombinant virus comprises a polypeptide that encodes for CPXV012 with a sequence of amino acids that has at least 70%, such as at least 75%, 80%, 85%, or 90% sequence identity to the amino acid sequence of SEQ ID NO: 20. For example, in some embodiments, the recombinant virus comprises a sequence of amino acids that has at least 91%, 92%, 93%, 94%, 95%, 95%, 97%, 98%, 99%, 99.1%, 99.2%, 99.3%, 99.4%, 99.5%, 99.6%, 99.7%, 99.8%, or 99.9% sequence identity to the amino acid sequence of SEQ ID NO: 20, but is less than 100% identical to the amino acid sequence of SEQ ID NO: In some embodiments, the recombinant virus comprises the amino acid sequence of SEQ ID NO: 20. In some embodiments, the recombinant virus comprises a polypeptide that encodes for CPXV203 with a sequence of amino acids that has at least 70%, such as at least 75%, 80%, 85%, or 90% sequence identity to the amino acid sequence of SEQ ID NO: 21. For example, in some embodiments, the recombinant virus comprises a sequence of amino acids that has at least 91%, 92%, 93%, 94%, 95%, 95%, 97%, 98%, 99%, 99.1%, 99.2%, 99.3%, 99.4%, 99.5%, 99.6%, 99.7%, 99.8%, or 99.9% sequence identity to the amino acid sequence of SEQ ID NO: 21, but is less than 100% identical to the amino acid sequence of SEQ ID NO: 21. In some embodiments, the recombinant virus comprises the amino acid sequence of SEQ ID NO: 21. In some embodiments, the recombinant virus comprises a polypeptide sequence that encodes for CPXV018 with a sequence of amino acids that has at least 70%, such as at least 75%, 80%, 85%, or 90% sequence identity to the amino acid sequence of SEQ ID NO: 22. For example, in some embodiments, the recombinant virus comprises a sequence of amino acids that has at least 91%, 92%, 93%, 94%, 95%, 95%, 97%, 98%, 99%, 99.1%, 99.2%, 99.3%, 99.4%, 99.5%, 99.6%, 99.7%, 99.8%, or 99.9% sequence identity to the amino acid sequence of SEQ ID NO: 22, but is less than 100% identical to the amino acid sequence of SEQ ID NO: 22. In some embodiments, the recombinant virus comprises the amino acid sequence of SEQ ID NO: 22.

[0346] In some embodiments, the T cell evader or NK cell evader is a set of proteins encoded by Cowpox virus ORFs 012, 203 and 018 (CPXV012-203-018) and the set of proteins encoded by CPXV012-203-018 comprise a sequence of amino acids that exhibits at least 85%, 90% or 95% sequence identity to the sequence set forth in SEQ ID NO: 20 (CPXV012), a sequence of amino acids that exhibits at least 85%, 90% or 95% sequence identity to the sequence set forth in SEQ ID NO: 21 (CPXV0203), and a sequence of amino acids that exhibits at least 85%, 90% or 95% sequence identity to the sequence set forth in SEQ ID NO: 22 (CPXV018). In some embodiments, the set of proteins encoded by CPXV012-203-018 comprise the sequence of amino acids set forth in SEQ ID NO:20, SEQ ID NO:21, and SEQ ID NO:22.

[0347] In some embodiments, the recombinant virus comprises a polypeptide that encodes for CRASP-2 with a sequence of amino acids that has at least 70%, such as at least 75%, 80%, 85% or 90% sequence identity to SEQ ID NO: 18. For example, in some embodiments, the recombinant virus comprises a nucleic acid sequence that encodes a polypeptide having at least 91%, 92%, 93%, 94%, 95%, 95%, 97%, 98%, 99%, 99.1%, 99.2%, 99.3%, 99.4%, 99.5%, 99.6%, 99.7%, 99.8%, or 99.9% sequence identity to the amino acid sequence of SEQ ID NO: 18, but is less than 100% identical to the amino acid sequence of SEQ ID NO: 18. In some embodiments, the recombinant virus comprises a nucleic acid sequence that encodes the amino acid sequence of SEQ ID NO: 18. In some embodiments, the polynucleotide that encodes the CRASP-2 molecule is operably linked to the F14.5L gene promoter. In some embodiments, the nucleotide sequences encoding CPXV012, CPXV203, and CPXV018 are inserted in the J2R genomic region.

[0348] In some embodiments, the recombinant virus comprising nucleic acid sequences that encode for CRASP-2 (e.g., SEQ ID NO: 18), CPXV012 (e.g., SEQ ID NO: 20), CPXV203 (e.g., SEQ ID NO: 21), and CPXV018 (e.g., SEQ ID NO: 22) is derived from the VIR27 (comprising the nucleic acid sequence of SEQ ID NO: 5) strain and comprises a sequence of nucleotides that has at least 70%, such as at least 75%, 80%, 85% or 90% sequence identity to SEQ ID NO: 10 (also named VIR46). For example, in some embodiments, the recombinant virus comprises a nucleic acid sequence that has at least 91%, 92%, 93%, 94%, 95%, 95%, 97%, 98%, 99%, 99.1%, 99.2%, 99.3%, 99.4%, 99.5%, 99.6%, 99.7%, 99.8%, or 99.9% sequence identity to the nucleic acid sequence of SEQ ID NO: 10, but is less than 100% identical to the nucleic acid sequence of SEQ ID NO: 10. In some embodiments, the recombinant virus comprises the nucleic acid sequence of SEQ ID NO: 10. A recombinant oncolytic virus comprising the nucleic acid sequence of SEQ ID NO: 10 is also referred to herein as VIR46.

[0349] Recombinant viruses provided herein, in various embodiments, exhibit an increased ability to evade the host's complement. In some embodiments, recombinant viruses provided herein can escape complement inhibition in in vivo and in vitro systems. In particular embodiments, administration of an effective dose of VIR46 (comprising the nucleic acid sequence of SEQ ID NO: 10) to a subject inhibits tumor, hyperplasia, or metastasis growth in an in vivo model (FIG. 8).

[0350] B. Immune Modulating Viruses

[0351] Provided herein, in various embodiments, are recombinant viruses comprising heterologous nucleic acids encoding for immune modulating proteins that can be stably and efficiently expressed in many types of virus infected cells. In some embodiments, the immune modulating proteins include cytokines, chemokines, immune receptors, antigens to immune receptors, proteins in immune cell activation pathways, signaling proteins within immune cells which stimulate the immune cell activation or secretion of cytokines from the immune cell, and antigens. In some embodiments, the immune modulating proteins comprise one or more cytokines and/or chemokines. In some embodiments, the one or more cytokines and/or chemokines comprises one or more of chemokine ligand 9 (CXCL9), IL-2, and IL-12. In some embodiments, the immune modulating protein is tumor necrosis factor superfamily member 14 (LIGHT). In some embodiments, the immune modulating protein is an interferon regulatory factor that activates the Toll-like receptor 3 (TLR3)-interferon regulatory factor 3 (IRF3) signaling pathway. In some embodiments, the immune modulating protein is interleukin 12 (IL-12). In some embodiments, the immune modulating protein is chemokine ligand 9 (CXCL9). In some embodiments, the immune modulating protein is IL-2 or an IL-2 superkine. In some embodiments, the immune modulating protein is an interleukin 2 (IL-2) superkine. In some embodiments, the immune modulating protein is MDNA11. In some embodiments, the MDNA11 has been mutated to increase the recombinant viruses anti-tumor potency and the immune modulator protein is MDNA11T. In some embodiments, the recombinant virus comprises heterologous nucleic acids encoding for one or more of the following immune modulating proteins; LIGHT, IRF3, IL-12, CXCL9, MDNA11, MDNA11T and other immune modulatory proteins. In some embodiments, one or more immune modulating proteins is an immune stimulating protein, such as LIGHT.

[0352] In some embodiments, the at least one heterologous nucleic acid encoding one or more heterologous gene product comprises one or more heterologous nucleic acid each encoding one or more immune modulating proteins. In some embodiments, the one or more immune modulating proteins is or comprises one or more cytokines and/or chemokines. In some embodiments, the one or more immune modulating proteins is or comprises one or more interferon regulatory factors, such as IRF3. In some embodiments, the one or more immune modulating proteins comprises one or more immune modulating proteins selected from the group consisting of LIGHT, IRF3, IL-2, IL-12, and CXCL9, such as any of those discussed in further detail below.

[0353] 1. Tumor Necrosis Factor Superfamily Member 14 (LIGHT)

[0354] In some embodiments, the at least one heterologous nucleic acid encoding one or more heterologous gene product comprises one or more heterologous nucleic acid each encoding one or more immune modulating proteins, wherein the one or more immune modulating proteins comprises LIGHT.

[0355] LIGHT has been in pre-clinical development for over a decade and has proven to be a promising approach for treating various types of cancer. LIGHT has been successfully used to clear established solid tumors as well as treat metastatic events. When expressed in tumors, LIGHT molecules cause significant changes in the tumor microenvironment that are primarily driven through vascular normalization and generation of tertiary lymphoid structures (TLS). Formation of such lymphoid structures can be induced by activation of lymphotoxin beta-receptor (LTBR/TNFRSF3), a receptor of the TNF superfamily that can be activated by LIGHT. See Schrama et al., Immunity 14:111-121 (2001); Tang et al., Cell. Mol. Immunol. 14:809-18 (2017). Presence of TLS in the tumor microenvironment typically correlates with immune infiltration and it is associated with better prognosis, suggesting that TLS are involved in anti-tumor immune responses. See Dieu-Nosjean et al., J. Clin. Oncol. 26:4410-17 (2008) and Weinstein and Storkus, Adv. Cancer Res. 128:197-233 (2015). For example, an homotrimeric single-chain LIGHT variant with improved stability and with human and mouse cross-reactivity, termed 3×hmLIGHT fused to an EGFR-specific tumor targeting antibody, induced anti-tumor immunity in mouse and human tumor models by increasing lymphocyte infiltration. Therefore, activation of LTBR has the potential to promote TLS formation in the tumor microenvironment, induce anti-tumor immune responses, and improve current cancer immunotherapies. Further details about the anti-tumorigenic properties of LIGHT can be found in U.S. Publication NO. 2021/0188990, which is hereby incorporated by reference for all purposes.

[0356] Provided herein, in some embodiments, is a recombinant oncolytic virus comprising at least one heterologous nucleic acid encoding one or more heterologous gene product, wherein the one or more heterologous gene product is or comprises an immune stimulating protein.

[0357] In some embodiments, the recombinant virus comprises at least one heterologous nucleic acid encoding for immune stimulating proteins that can be stably and efficiently expressed in many types of virus infected cells. Such immune stimulating proteins can increase the anti-tumorigenic properties of the virus. In particular, such immune stimulating proteins can increase the ability of the recombinant virus to induce tumor lymphocyte infiltration by the host's immune system. In some embodiments, the recombinant virus includes oncolytic virus. In some embodiments, the recombinant virus does not include oncolytic viruses. In some embodiments, the recombinant virus incudes any viruses described herein or incorporated by reference herein. In some embodiments, the virus includes vaccinia viruses. In some embodiments, the virus includes recombinant viruses derived from the VIP02 viral strain.

[0358] In some embodiments, the recombinant virus comprises at least one heterologous nucleic acid encoding for immune stimulating proteins that can be stably and efficiently expressed in many types of virus-infected cells and increase the anti-tumorigenic properties of the virus. Accordingly, in some embodiments, the immune stimulating protein increases or enhances the anti-tumorigenic properties of the virus. In some embodiments, the immune modulating proteins include, but are not limited to, tumor necrosis factor superfamily member 14 (LIGHT), e.g., hmLIGHT. In some embodiments, the immune modulating proteins include, but are not limited to, any immune modulating protein hereby included by reference.

[0359] In some embodiments, the recombinant virus expresses an hmLIGHT gene product (NP_001363816 XP_016882906). Specifically, the generated recombinant virus of some embodiments comprises an expression cassette containing a full length hmLIGHT cDNA under the control of vaccinia PSE gene promoter and inserted into the A35R genomic region. In some embodiments, the immune modulating protein includes hmLIGHT. In some embodiments, the hmLIGHT protein can increase the anti-tumor properties of the recombinant virus.

[0360] In some embodments, the immune stimulating protein is LIGHT. In some embodments, the immune stimulating protein is recombinant LIGHT. In some embodiments, the recombinant LIGHT is a human protein or is a mutant thereof.

[0361] In some embodiments, the recombinant LIGHT comprises an amino acid sequence that has at least 95%, at least 96%, at least 97%, at least 98% or at least 99% sequence identity to the sequence set forth in SEQ ID NO:30. In some embodiments, the recombinant LIGHT comprises the amino acid sequence of SEQ ID NO: 30. In some embodiments, the recombinant LIGHT comprises the amino acid sequence of SEQ ID NO: 30, or an amino acid sequence having at least 90%, 91%, 92%, 93%, 94%, 95%, 96%, 97%, 98%, or 99% sequence identity to the amino acid sequence of SEQ ID NO: 30.

[0362] In some embodiments, the recombinant LIGHT is hmLIGHT that is a human LIGHT mutant that binds human and mouse LTβR and HVEM. In some embodiments, the recombinant LIGHT comprises one or more mutation selected from the group consisting of a threonine at position 138, a glycine at position 160, a glycine at position 221 and a lysine at position 222.

[0363] In some embodiments, the recombinant virus comprises a nucleic acid sequence that encodes an hmLIGHT, wherein the hmLIGHT comprises an amino acid sequence having at least 90% sequence identity to SEQ ID NO: 25. In some embodiments, the recombinant LIGHT comprises the amino acid sequence of SEQ ID NO: 25, or an amino acid sequence having at least 90%, 91%, 92%, 93%, 94%, 95%, 96%, 97%, 98%, or 99% sequence identity to the amino acid sequence of SEQ ID NO: 25. In some embodiments, the recombinant LIGHT comprises an amino acid sequence that has at least 95%, at least 96%, at least 97%, at least 98% or at least 99% sequence identity to the sequence set forth in SEQ ID NO:25. In some embodiments, the recombinant LIGHT comprises the sequence set forth in SEQ ID NO:25.

[0364] In some embodiments, the recombinant virus comprises a polypeptide with a sequence of amino acids that has at least 70%, such as at least 75%, 80%, 85% or 90% sequence identity to the amino acid sequence of SEQ ID NO: 25.

[0365] In some embodiments, the polynucleotide that encodes the hmLIGHT molecule is operably linked to the PSE gene promoter. In some embodiments, the recombinant virus which includes a polynucleotide that encodes an hmLIGHT gene product (e.g., comprising the amino acid sequence of SEQ ID NO: 25) is derived from the VIR13 (comprising the nucleic acid sequence of SEQ ID NO: 4) strain and includes a sequence of nucleotides that has at least 70%, such as at least 75%, 80%, 85% or 90% sequence identity to SEQ ID NO: 11 (also named VIR49). For example, in some embodiments, the recombinant virus comprises a sequence of nucleotides that has at least 91%, 92%, 93%, 94%, 95%, 95%, 97%, 98%, 99%, 99.1%, 99.2%, 99.3%, 99.4%, 99.5%, 99.6%, 99.7%, 99.8%, or 99.9% sequence identity to the nucleic acid sequence of SEQ ID NO: 11, but is less than 100% identical to SEQ ID NO: 11. In some embodiments, the recombinant virus comprises the nucleic acid sequence of SEQ ID NO: 11. A recombinant oncolytic virus comprising the nucleic acid sequence of SEQ ID NO: 11 is also referred to herein as VIR49.

[0366] In some embodiments, the recombinant virus provided herein, e.g., VIR49 (comprising the nucleic acid sequence of SEQ ID NO: 11) or a recombinant virus comprising a nucleic acid sequence having at least 91%, 92%, 93%, 94%, 95%, 95%, 97%, 98%, 99%, 99.1%, 99.2%, 99.3%, 99.4%, 99.5%, 99.6%, 99.7%, 99.8%, or 99.9% sequence identity to the nucleic acid sequence of SEQ ID NO: 11, exhibits increased or enhanced anti-tumorigenic properties. In particular embodiments, administration of an effective dose of VIR49 (comprising the nucleic acid sequence of SEQ ID NO: 11) to a subject inhibits tumor, hyperplasia, or metastasis growth in an in vivo model. In some embodiments, administration of an effective dose of a recombinant virus comprising a nucleic acid sequence having at least 91%, 92%, 93%, 94%, 95%, 95%, 97%, 98%, 99%, 99.1%, 99.2%, 99.3%, 99.4%, 99.5%, 99.6%, 99.7%, 99.8%, or 99.9% sequence identity to the nucleic acid sequence of SEQ ID NO: 11 to a subject inhibits tumor, hyperplasia, and/or metastasis growth.

[0367] In some embodiments, provided herein is a recombinant oncolytic virus comprising at least one heterologous nucleic acid encoding one or more heterologous gene product, wherein the one or more heterologous gene product is or comprises an interferon regulatory factor. As described herein, the clinical usefulness of oncolytic vaccinia viruses (VACVs) is not only related to the virus ability to directly destruct infected cancer cells but also to activate immune responses directed against tumor antigens. One way to elicit a robust antitumor immune response is through activation of the Toll-like receptor 3 (TLR3)-interferon regulatory factor 3 (IRF3) signaling pathway. Thus, virus expressing IRF3 can increase the ability of the virus to activate cellular antitumor immunity. Riederer at al., (2021) Molecular Therapy: Oncolytics, 22: (399-409).

[0368] In some embodiments, the recombinant virus comprises one or more heterologous nucleic acids encoding for one or more immune stimulating proteins, e.g., one or more interferon regulatory factor, that can be stably and efficiently expressed in many types of virus-infected cells and increase the anti-tumorigenic properties of the virus. In some embodiments, the immune modulating proteins, e.g., interferon regulatory factors, include, but are not limited to, interferon regulatory factor 3 (IRF3). As such, in some embodiments, the one or more heterologous gene product comprises an interferon regulatory factor. In some embodiments, the interferon regulatory factor is an interferon regulatory factor 3 (IRF3). In some embodiments, the IRF3 is human IRF3. In some embodiments, the IRF3 is a human IRF3 (hIRF3) and the hIRF3 comprises a sequence of amino acids that has at least 95%, at least 96%, at least 97%, at least 98% or at least 99% sequence identity to the amino acid sequence set forth in SEQ ID NO: 51. In some embodiments, the hIRF3 comprises the amino acid sequence of SEQ ID NO: 51.

[0369] 2 Interferon Regulatory Factor 3 (IRF3)

[0370] In some embodiments, the at least one heterologous nucleic acid encoding one or more heterologous gene product comprises one or more heterologous nucleic acid each encoding one or more immune modulating proteins, wherein the one or more immune modulating proteins comprises interferon regulatory factor 3 (IRF3).

[0371] In some embodiments, the interferon regulatory factor is mouse IRF3. In some embodiments, the recombinant virus comprises an expression cassette containing a full-length mouse IRF3 cDNA under the control of a vaccinia gene promoter and inserted into the J2R genomic region. In some embodiments, the interferon regulatory factor is human IRF3. In some embodiments, the mouse IRF3 protein can increase the anti-tumor properties of the recombinant virus. In some embodiments, a recombinant virus is provided which comprises a polynucleotide that encodes a mouse IRF3 molecule, wherein the IRF3 polypeptide comprises an amino acid sequence having at least 90% sequence identity to SEQ ID NO: 52. In some embodiments, the IRF3 is a mouse IRF3 (mIRF3), and the mIRF3 comprises a sequence of amino acids that has at least 95%, at least 96%, at least 97%, at least 98% or at least 99% sequence identity to the sequence set forth in SEQ ID NO: 52. In some embodiments, the mIRF3 comprises the amino acid sequence of SEQ ID NO: 52.

[0372] In some embodiments, the recombinant virus comprises a polypeptide that encodes a sequence of amino acids that has at least 70%, such as at least 75%, 80%, 85% or 90% sequence identity to SEQ ID NO: 52. For example, in some embodiments, the recombinant virus comprises a sequence of nucleotides that encodes a polypeptide having at least 91%, 92%, 93%, 94%, 95%, 95%, 97%, 98%, 99%, 99.1%, 99.2%, 99.3%, 99.4%, 99.5%, 99.6%, 99.7%, 99.8%, or 99.9% sequence identity to the amino acid sequence of SEQ ID NO: 52, but is less than 100% identical to SEQ ID NO: 52. In some embodiments, the recombinant virus comprises a sequence of nucleotides that encodes a polypeptide comprising the amino acid sequence of SEQ ID NO: 52.

[0373] In some embodiments, the polynucleotide that encodes the IFR3 molecule is operably linked to a gene promoter. In some embodiments, the recombinant virus which includes a polynucleotide that encodes a mIRF3 gene product (e.g., comprising the amino acid sequence of SEQ ID NO: 52) is derived from the VIP02 (comprising the nucleic acid sequence of SEQ ID NO: 1) strain.

[0374] In some embodiments, the interferon regulatory factor is mIRF3 and the recombinant virus, e.g., recombinant oncolytic virus, comprises a sequence of nucleotides having at least 95%, 96%, 97%, 98%, or 99% sequence identity to the nucleic acid sequence of SEQ ID NO: 50. In some embodiments, the nucleic acid genome of the recombinant oncolytic virus comprises a sequence of nucleotide that has at least 95%, at least 96%, at least 97%, at least 98% or at least 99% sequence identity to the sequence set forth in SEQ ID NO: 50. In some embodiments, the recombinant virus, e.g., recombinant oncolytic virus, comprises the sequence of nucleotides of SEQ ID NO: 50. A recombinant oncolytic virus comprising the nucleic acid sequence of SEQ ID NO: 50 is also referred to herein as VIR96.

[0375] In some embodiments, the generated recombinant viruses include an expression cassette containing a full length human IRF3 cDNA under the control of a vaccinia gene promoter and inserted into the J2R genomic region. In some embodiments, the immune modulating protein includes human IRF3. In some embodiments, the human IRF3 protein can increase the anti-tumor properties of the recombinant virus. In some embodiments, a recombinant virus is provided which includes a polynucleotide that encodes a human IRF3 molecule, wherein the IRF3 polypeptide comprises an amino acid sequence having at least 90%, 91%, 92%, 93%, 94%, 95%, 96%, 97%, 98%, or 99% sequence identity to SEQ ID NO: 51.

[0376] In some embodiments, the recombinant virus comprises a polypeptide with a sequence of amino acids that has at least 70%, such as at least 75%, 80%, 85% or 90% sequence identity to the amino acid sequence of SEQ ID NO: 51.

[0377] In some embodiments, the recombinant virus comprises a sequence of nucleotides that has at least 91%, 92%, 93%, 94%, 95%, 95%, 97%, 98%, 99%, 99.1%, 99.2%, 99.3%, 99.4%, 99.5%, 99.6%, 99.7%, 99.8%, or 99.9% sequence identity to the nucleic acid sequence of SEQ ID NOs: 49, 80, 81 82, 84, 85, 86, 88, 87, 89, 90, 91, 92, or 93, but is less than 100% identical to SEQ ID NOs: 49, 80, 81, 82, 84, 85, 86, 87, 88, 89, 90, 91, 92, or 93. In some embodiments, the recombinant virus comprises the nucleic acid sequence of SEQ ID NO: 49, 80, 81, 82, 84, 85, 86, 87, 88, 89, 90, 91, 92, or 93. A recombinant oncolytic virus comprising the nucleic acid sequence of SEQ ID NOs: 49, 80, 81, 82, 84, 85, 86, 87, 88, 89, 90, 91, 92, or 93 is also referred to herein as VIR93, VIR100, VIR102, VIR10³, VIR105, VIR106, VIR109, VIR111, VIR113, VIR114, VIR115, VIR123, VIR127, or VIR128 respectively.

[0378] Recombinant virus provided herein exhibit increase anti-tumorigenic properties. In particular embodiments, administration of an effective dose of VIR93 (comprising the nucleic acid sequence of SEQ ID NO: 49) to a subject inhibits tumor, hyperplasia, or metastasis growth in an in vivo model. In some embodiments, administration of an effective dose of a recombinant virus comprising a nucleic acid sequence having at least 91%, 92%, 93%, 94%, 95%, 95%, 97%, 98%, 99%, 99.1%, 99.2%, 99.3%, 99.4%, 99.5%, 99.6%, 99.7%, 99.8%, or 99.9% sequence identity to the nucleic acid sequence of SEQ ID NO: 49 to a subject inhibits tumor, hyperplasia, and/or metastasis growth.

[0379] 3. Interleukin 12 (IL-12)

[0380] In some embodiments, the at least one heterologous nucleic acid encoding one or more heterologous gene product comprises one or more heterologous nucleic acid each encoding one or more immune modulating proteins, wherein the one or more immune modulating proteins comprises IL-12.

[0381] Interleukin 12 (IL-12) is a cytokine that play a role in shaping the innate and adaptive immune responses and may play a role in controlling cancer and tumor growth. In some embodiments, the IL-12 is human IL-12. In some embodiments, the IL-12 is mouse IL-12. In some embodiments, the recombinant virus comprises an expression cassette containing a full-length mouse IL-12 cDNA under the control of a vaccinia gene promoter and inserted into the A56R genomic region. In some embodiments, the mouse IL-12 protein can increase the anti-tumor properties of the recombinant virus. In some embodiments, a recombinant virus is provided which comprises a polynucleotide that encodes a mouse single chain IL-12 (mscIL-12) molecule, wherein the recombinant virus comprises an nucleic acid sequence having at least 90% sequence identity to SEQ ID NOs: 85, 86, or 90.

[0382] In some embodiments, the IL-12 is a single-chain IL-12. In some embodiments, the single-chain IL-12 is a human single-chain IL-12 (hscIL-12). In some embodiments, the human single-chain IL-12 comprises the amino acid sequence set forth in SEQ ID NO: 103, or an amino acid sequence that has at least 95%, 96%, 97%, 98%, or 99% sequence identity to the amino acid sequence set forth in SEQ ID NO: 103. In some embodiments, the IL-12, e.g., human IL-12, comprises the amino acid sequence set forth in SEQ ID NO: 103, or an amino acid sequence that has at least 95%, 96%, 97%, 98%, or 99% sequence identity to the amino acid sequence set forth in SEQ ID NO: 103.

[0383] In some embodiments, the single-chain IL-12 is a mouse single-chain IL-12 (mscIL-12). In some embodiments, the mouse single-chain IL-12 comprises the amino acid sequence set forth in SEQ ID NO: 102, or an amino acid sequence that has at least 95%, 96%, 97%, 98%, or 99% sequence identity to the amino acid sequence set forth in SEQ ID NO: 102. In some embodiments, the IL-12, e.g., mouse IL-12, comprises the amino acid sequence set forth in SEQ ID NO: 102, or an amino acid sequence that has at least 95%, 96%, 97%, 98%, or 99% sequence identity to the amino acid sequence set forth in SEQ ID NO: 102.

[0384] In some embodiments, the recombinant virus comprises a nucleic acid sequence that that has at least 70%, such as at least 75%, 80%, 85% or 90% sequence identity to SEQ ID NOs: 85, 86, or 90. For example, in some embodiments, the recombinant virus comprises a sequence of least 91%, 92%, 93%, 94%, 95%, 95%, 97%, 98%, 99%, 99.1%, 99.2%, 99.3%, 99.4%, 99.5%, 99.6%, 99.7%, 99.8%, or 99.9% sequence identity to the nucleic acid sequence of SEQ ID NOs: 85, 86, or 90, but is less than 100% identical to SEQ ID NOs: 85, 86, or 90. In some embodiments, the recombinant virus comprises a sequence of nucleotides comprising the sequences of SEQ ID NOs: 85, 86, or 90. In some embodiments, the recombinant viruses comprising mscIL-12 are referred to as VIR106, VIR109, and/or VIR115.

[0385] In some embodiments, the polynucleotide that encodes the mscIL-12 molecule is operably linked to a gene promoter. In some embodiments, the recombinant virus which includes a polynucleotide that encodes a mscIL-12gene product is derived from the VIP02 (comprising the nucleic acid sequence of SEQ ID NO: 1) strain. In some embodiments the mscIL-12 is inserted at A56R genomic region. In some embodiments, the mscIL-12 is operably linked to modified H5 (mH5) promoter.

[0386] In some embodiments, a recombinant virus is provided which comprises a polynucleotide that encodes a human single chain IL-12 (hscIL-12) molecule, wherein the recombinant virus comprises an nucleic acid sequence having at least 90% sequence identity to SEQ ID NO: 92.

[0387] In some embodiments, the recombinant virus comprises a nucleic acid sequence that that has at least 70%, such as at least 75%, 80%, 85% or 90% sequence identity to SEQ ID NO: 92. For example, in some embodiments, the recombinant virus comprises a sequence of least 91%, 92%, 93%, 94%, 95%, 95%, 97%, 98%, 99%, 99.1%, 99.2%, 99.3%, 99.4%, 99.5%, 99.6%, 99.7%, 99.8%, or 99.9% sequence identity to the nucleic acid sequence of SEQ ID NO: 92 but is less than 100% identical to SEQ ID NO: 92. In some embodiments, the recombinant virus comprises a sequence of nucleotides comprising the sequences of SEQ ID NO: 92. In some embodiments, the recombinant virus comprising hscIL-12 is referred to as VIR 115.

[0388] In some embodiments, the polynucleotide that encodes the hscIL-12 molecule is operably linked to a gene promoter. In some embodiments, the recombinant virus which includes a polynucleotide that encodes a hscIL-12gene product is derived from the VIP02 (comprising the nucleic acid sequence of SEQ ID NO: 1) strain. In some embodiments the hscIL-12 is inserted at A56R genomic region. In some embodiments, the hscIL-12 is operably linked to modified H5 (mH5) promoter.

[0389] In some embodiments, the recombinant viruses comprise hscIL-12 and/or mscIL-12 and other immune modulatory genes. In some embodiments, the other immune modulatory genes may comprise any of the immune modulating genes in this application. In some embodiments, the other immune modulating genes may comprise other cytokines or chemokines or antigens.

[0390] In some embodiments recombinant virus provided herein exhibit increase anti-tumorigenic properties. In particular embodiments, administration of an effective dose of VIR106, VIR109, VIR115, and/or VIR127 (comprising the nucleic acid sequence of SEQ ID NOs: 85, 86, 90, and 92 respectively) to a subject inhibits tumor, hyperplasia, or metastasis growth in an in vivo model. In some embodiments, administration of an effective dose of a recombinant virus comprising a nucleic acid sequence having at least 91%, 92%, 93%, 94%, 95%, 95%, 97%, 98%, 99%, 99.1%, 99.2%, 99.3%, 99.4%, 99.5%, 99.6%, 99.7%, 99.8%, or 99.9% sequence identity to the nucleic acid sequences of SEQ ID NOs: 85, 86, 90, and 92 to a subject inhibits tumor, hyperplasia, and/or metastasis growth.

[0391] 4. Chemokine Ligand 9 (CXCL9)

[0392] In some embodiments, the at least one heterologous nucleic acid encoding one or more heterologous gene product comprises one or more heterologous nucleic acid each encoding one or more immune modulating proteins, wherein the one or more immune modulating proteins comprises CXCL9.

[0393] Chemokine ligand 9 (CXCL9) is a chemokine capable of orchestrating cell migration and may be important for shaping the tumor microenvironment. In some embodiments, the CXCL9 is human CXCL9. In some embodiments, the CXCL9 is mouse CXCL9. In some embodiments, the recombinant virus comprises an expression cassette containing a full-length mouse CXCL9 cDNA under the control of a vaccinia gene promoter and inserted into the A56R genomic region. In some embodiments, the mouse CXCL9 protein can increase the anti-tumor properties of the recombinant virus. In some embodiments, a recombinant virus is provided which comprises a polynucleotide that encodes a mouse CXCL9 (mCXCL9) molecule, wherein the recombinant virus comprises an nucleic acid sequence having at least 90% sequence identity to SEQ ID NOs: 85, 86, or 90.

[0394] In some embodiments, the CXCL9 is human CXCL9 (hCXCL9). In some embodiments, the human CXCL9 comprises the amino acid sequence set forth in SEQ ID NO: 99, or an amino acid sequence that has at least 85%, 96%, 97%, 98%, or 99% sequence identity to the amino acid sequence set forth in SEQ ID NO: 99.

[0395] In some embodiments, the CXCL9 is mouse CXCL9 (mCXCL9). In some embodiments, the mouse CXCL9 comprises the amino acid sequence set forth in SEQ ID NO: 106, or an amino acid sequence that has at least 85%, 96%, 97%, 98%, or 99% sequence identity to the amino acid sequence set forth in SEQ ID NO: 106.

[0396] In some embodiments, the recombinant virus comprises a nucleic acid sequence that that has at least 70%, such as at least 75%, 80%, 85% or 90% sequence identity to SEQ ID NOs: 85, 86, or 90. For example, in some embodiments, the recombinant virus comprises a sequence of least 91%, 92%, 93%, 94%, 95%, 95%, 97%, 98%, 99%, 99.1%, 99.2%, 99.3%, 99.4%, 99.5%, 99.6%, 99.7%, 99.8%, or 99.9% sequence identity to the nucleic acid sequence of SEQ ID NOs: 85, 86, or 90, but is less than 100% identical to SEQ ID NOs: 85, 86, or 90. In some embodiments, the recombinant virus comprises a sequence of nucleotides comprising the sequences of SEQ ID NOs: 85, 86, or 90. In some embodiments, the recombinant viruses comprising mCXCL9 are referred to as VIR106, VIR109, and/or VIR115.

[0397] In some embodiments, the polynucleotide that encodes the mCXCL9 molecule is operably linked to a gene promoter. In some embodiments, the recombinant virus which includes a polynucleotide that encodes a mCXCL9 gene product is derived from the VIP02 (comprising the nucleic acid sequence of SEQ ID NO: 1) strain. In some embodiments the mCXCL9 is inserted at A56R genomic region. In some embodiments, the mCXCL9 is operably linked to modified H5 (mH5) promoter.

[0398] In some embodiments, a recombinant virus is provided which comprises a polynucleotide that encodes a human CXCL9 (hCXCL9) molecule, wherein the recombinant virus comprises a nucleic acid sequence having at least 90% sequence identity to SEQ ID NO: 92.

[0399] In some embodiments, the recombinant virus comprises a nucleic acid sequence that that has at least 70%, such as at least 75%, 80%, 85% or 90% sequence identity to SEQ ID NO: 92. For example, in some embodiments, the recombinant virus comprises a sequence of least 91%, 92%, 93%, 94%, 95%, 95%, 97%, 98%, 99%, 99.1%, 99.2%, 99.3%, 99.4%, 99.5%, 99.6%, 99.7%, 99.8%, or 99.9% sequence identity to the nucleic acid sequence of SEQ ID NO: 92 but is less than 100% identical to SEQ ID NO: 92. In some embodiments, the recombinant virus comprises a sequence of nucleotides comprising the sequences of SEQ ID NO: 92. In some embodiments, the recombinant virus comprising hCXCL9 is referred to as VIR 115.

[0400] In some embodiments, the polynucleotide that encodes the hCXCL9 molecule is operably linked to a gene promoter. In some embodiments, the recombinant virus which includes a polynucleotide that encodes a hCXCL9 gene product is derived from the VIP02 (comprising the nucleic acid sequence of SEQ ID NO: 1) strain. In some embodiments the hCXCL9 is inserted at A56R genomic region. In some embodiments, the hCXCL9 is operably linked to modified H5 (mH5) promoter.

[0401] In some embodiments, the recombinant viruses comprise hCXCL9 and/or mCXCL9 and other immune modulatory genes. In some embodiments, the other immune modulatory genes may comprise any of the immune modulating genes in this application. In some embodiments, the other immune modulating genes may comprise other cytokines or chemokines or antigens.

[0402] In some embodiments recombinant virus provided herein exhibit increase anti-tumorigenic properties. In particular embodiments, administration of an effective dose of VIR106, VIR109, VIR115, and/or VIR127 (comprising the nucleic acid sequence of SEQ ID NOs: 85, 86, 90, and 92 respectively) to a subject inhibits tumor, hyperplasia, or metastasis growth in an in vivo model. In some embodiments, administration of an effective dose of a recombinant virus comprising a nucleic acid sequence having at least 91%, 92%, 93%, 94%, 95%, 95%, 97%, 98%, 99%, 99.1%, 99.2%, 99.3%, 99.4%, 99.5%, 99.6%, 99.7%, 99.8%, or 99.9% sequence identity to the nucleic acid sequences of SEQ ID NOs: 85, 86, 90, and 92 to a subject inhibits tumor, hyperplasia, and/or metastasis growth.

[0403] IL-2 and IL-2 Superkines

[0404] In some embodiments, the at least one heterologous nucleic acid encoding one or more heterologous gene product comprises one or more heterologous nucleic acid each encoding one or more immune modulating proteins, wherein the one or more immune modulating proteins comprises IL-2.

[0405] In some embodiments, the recombinant virus comprises one or more heterologous nucleic acid that encodes an immune modulatory protein that is IL-2. In some embodiments, the IL-2 comprises an amino acid sequence set forth in any one of SEQ ID NOs: 98, 100, 101, 104, and 105, or an amino acid sequence that has at least 95%, 96%, 97%, 98%, or 99% sequence identity to the amino acid sequence of any one of SEQ ID NOs: 98, 100, 101, 104, and 105.

[0406] In some embodiments, the IL-2 is an IL-2 superkine, such as H9, H9T, MDNA11, or MDNA11T. Accordingly, in some embodiments, the recombinant virus encodes an immune modulatory protein that is an IL-2 superkine. In some embodiments, the IL-2 superkine comprises the amino acid sequence of any one of SEQ ID NOs: 98, 100, 101, and 104, or an amino acid sequence that has at least 95%, 96%, 97%, 98%, or 99% sequence identity to the amino acid sequence of any one of SEQ ID NOs: 98, 100, 101, and 104.

[0407] In some embodiments, the IL-2 superkine is the H9 IL-2 superkine. In some embodiments, the H9 IL-2 superkine comprises the amino acid sequence of SEQ ID NO: 100, or comprises an amino acid sequence that has at least 95%, 96%, 97%, 98%, or 99% sequence identity to the amino acid sequence of SEQ ID NO: 100. As depicted in FIG. 23B, the H9 IL-2 superkine is a modified variant of wild-type human IL-2 that was generated by introducing the following amino acid substitutions to wildtype human IL-2: L80F, R81D, L85V, I86V, and I92F. In some embodiments, the wild-type human IL-2 comprises the amino acid sequence set forth in SEQ ID NO: 105.

[0408] In some embodiments, the IL-2 superkine is the H9T IL-2 superkine. The H9T IL-2 superkine is generated by introducing a Q126T amino acid substitution into the H9 IL-2 superkine, as depicted in FIG. 23B. In some embodiments, the H9T IL-2 superkine comprises the amino acid sequence of SEQ ID NO: 104, or comprises an amino acid sequence that has at least 95%, 96%, 97%, 98%, or 99% sequence identity to the amino acid sequence of SEQ ID NO: 104.

[0409] In some embodiments, the immune modulatory protein, e.g., the IL-2 superkine, is MDNA11. See, e.g., Merchant et al., Journal for ImmunoTherapy of Cancer, 2022; 10: e003155. In some embodiments, the immune modulatory protein is an IL-2 superkine that is the MDNA11 IL-2 superkine. In some embodiments, MDNA11 comprises the amino acid sequence of SEQ ID NO: 101, or comprises an amino acid sequence that has at least 95%, 96%, 97%, 98%, or 99% sequence identity to the amino acid sequence of SEQ ID NO: 101. As depicted in FIG. 23B, the MDNA11 IL-2 superkine is generated by introducing the following amino acid substitutions into the H9 IL-2 superkine: F42A and E62A.

[0410] In some embodiments, the immune modulatory protein, e.g., the IL-2 superkine, is MDNA11T. In some embodiments, the immune modulatory protein is an IL-2 superkine that is the MDNA11T IL-2 superkine. MDNA11T is generated by introducing a Q126T amino acid substitution into the amino acid sequence of MDNA11, as depicted in FIG. 23B. See, e.g., Mo et al., Nature, 2021, 597(7877): 544-548. In some embodiments, MDNA11T comprises the amino acid sequence of SEQ ID NO: 98, or comprises an amino acid sequence that has at least 95%, 96%, 97%, 98%, or 99% sequence identity to the amino acid sequence of SEQ ID NO: 98. In some embodiments, the IL-2 superkine is H9, MDNA11, or MDNA11T.

[0411] In some embodiments, the recombinant virus comprises an expression cassette containing a full-length MDNA11 cDNA under the control of a vaccinia gene promoter and inserted into the A56R genomic region. In some embodiments, the mouse MDNA11 protein can increase the anti-tumor properties of the recombinant virus. In some embodiments, a recombinant virus is provided which comprises a polynucleotide that encodes a MDNA11 molecule, wherein the recombinant virus comprises an nucleic acid sequence having at least 90% sequence identity to SEQ ID NOs: 84, 87, or 89.

[0412] In some embodiments, the recombinant virus comprises a nucleic acid sequence that has at least 70%, such as at least 75%, 80%, 85% or 90% sequence identity to SEQ ID NOs: 84, 87, or 89. For example, in some embodiments, the recombinant virus comprises a sequence of least 91%, 92%, 93%, 94%, 95%, 95%, 97%, 98%, 99%, 99.1%, 99.2%, 99.3%, 99.4%, 99.5%, 99.6%, 99.7%, 99.8%, or 99.9% sequence identity to the nucleic acid sequence of SEQ ID NOs: 84, 87, or 89, but is less than 100% identical to SEQ ID NOs: 84, 87, or 89. In some embodiments, the recombinant virus comprises a sequence of nucleotides comprising the sequences of SEQ ID NOs: 84, 87, or 89. In some embodiments, the recombinant viruses comprising MDNA11 are referred to as VIR105, VIR111, and/or VIR114.

[0413] In some embodiments, the polynucleotide that encodes the MDNA11 molecule is operably linked to a gene promoter. In some embodiments, the recombinant virus which includes a polynucleotide that encodes a MDNA11 gene product is derived from the VIP02 (comprising the nucleic acid sequence of SEQ ID NO: 1) strain. In some embodiments the MDNA11 is inserted at A56R genomic region. In some embodiments, the MDNA11 is operably linked to an 11K promoter.

[0414] In some embodiments, a recombinant virus is provided which comprises a polynucleotide that encodes mutated MDNA11 molecule. In some embodiments, the mutated MDNA11 molecule is MDNA11T. In some embodiments, the mutation is at amino acid 126 and turns the amino acid into a threonine. In some embodiments, the MDNA11T comprises the amino acid sequence in SEQ ID NO: 98. In some embodiments, the MDNA11T comprises an amino acid sequence that has at least 70%, such as at least 75%, 80%, 85% or 90% sequence identity to SEQ ID NOs: 98. In some embodiments, a recombinant vaccinia virus encoding a mutated MDNA11 increases the anti-tumor potency of the recombinant vaccinia virus compared to a recombinant vaccinia virus encoding an unmutated MDNA11. In some embodiments the recombinant virus comprises a nucleic acid sequence having at least 90% sequence identity to SEQ ID NO: 88.

[0415] In some embodiments, the recombinant virus comprises a nucleic acid sequence that has at least 70%, such as at least 75%, 80%, 85% or 90% sequence identity to SEQ ID NO: 88. For example, in some embodiments, the recombinant virus comprises a sequence of least 91%, 92%, 93%, 94%, 95%, 95%, 97%, 98%, 99%, 99.1%, 99.2%, 99.3%, 99.4%, 99.5%, 99.6%, 99.7%, 99.8%, or 99.9% sequence identity to the nucleic acid sequence of SEQ ID NO: 88 but is less than 100% identical to SEQ ID NO: 88. In some embodiments, the recombinant virus comprises a sequence of nucleotides comprising the sequences of SEQ ID NO: 88. In some embodiments, the recombinant virus comprising MDNA11T is referred to as VIR 113.

[0416] In some embodiments, the polynucleotide that encodes the MDNA11T molecule is operably linked to a gene promoter. In some embodiments, the recombinant virus which includes a polynucleotide that encodes a MDNA11T gene product is derived from the VIP02 (comprising the nucleic acid sequence of SEQ ID NO: 1) strain. In some embodiments the MDNA11T is inserted at A56R genomic region. In some embodiments, the MDNA11T is operably linked to an 11K promoter.

[0417] In some embodiments, the recombinant viruses comprise MDNA11T and/or MDNA11 and other immune modulatory genes. In some embodiments, the other immune modulatory genes may comprise any of the immune modulating genes in this application. In some embodiments, the other immune modulating genes may comprise other cytokines or chemokines or antigens.

[0418] In some embodiments recombinant virus provided herein exhibit increase anti-tumorigenic properties. In particular embodiments, administration of an effective dose of VIR105, VIR111, VIR114, and/or VIR113 (comprising the nucleic acid sequence of SEQ ID NOs: 84, 87, 89, and 88 respectively) to a subject inhibits tumor, hyperplasia, or metastasis growth in an in vivo model. In some embodiments, administration of an effective dose of a recombinant virus comprising a nucleic acid sequence having at least 91%, 92%, 93%, 94%, 95%, 95%, 97%, 98%, 99%, 99.1%, 99.2%, 99.3%, 99.4%, 99.5%, 99.6%, 99.7%, 99.8%, or 99.9% sequence identity to the nucleic acid sequences of SEQ ID NOs: 84, 87, 89, and 88 to a subject inhibits tumor, hyperplasia, and/or metastasis growth.

[0419] C. Angiogenesis Modulating Viruses

[0420] In some embodiments, the at least one heterologous nucleic acid encoding one or more heterologous gene product comprises one or more heterologous nucleic acid each encoding one or more anti-angiogenic protein, such as a VEGF inhibitor, an angiopoietin inhibitor, and/or versikine.

[0421] Accordingly, provided herein, in various embodiments, are recombinant viruses comprising heterologous nucleic acids encoding for an angiogenesis modulating protein that can be stably and efficiently expressed in many types of virus infected cells. Angiogenesis, a multi-step process that leads to the formation and growth of new blood vessels, is tightly regulated by several pro- and anti-angiogenic factors. The balance between these pro and anti-angiogenic factors is usually altered by cancer cells and is an essential step during the progression and metastasis of a malignant tumor, as angiogenesis can provide the oxygen and nutrients required for tumor growth. The mechanism of tumor angiogenesis is complicated and thus, involves different signal pathways including many pro- and anti-angiogenic factors such as Fibroblast Growth Factor (FGF), trombospondins, angiostatin, and endostatin, among others. Further details about anti-angiogenic and pro-angiogenic factors, can be found in Huang and Bao, World J Gastroenterol. 10(4): 463-470 (2004), which is hereby incorporated by reference for all purposes.

[0422] One of the many pro-angiogenic factors, Vascular Endothelial Growth Factor (VEGF), is secreted by tumor cells and surrounding stroma, stimulating the proliferation and survival of endothelial cells and leading to the formation of new blood vessels that support tumor and metastasis development and growth. See Rivera-Soto and Damania, Front. Microbiol. 10:1544 (2019). Another pro-angiogenic factor, Angiopoietin-2 (Ang-2), is a key regulator of blood vessel remodeling and maturation, usually up regulated in tumors and an unfavorable prognostic factor. Thus, many strategies to inhibit VEGF and Ang-2 have been attempted as part of cancer treatment protocols, including the generation of antibodies against VEGF and Ang-2. Further details about strategies to inhibit VEGF and Ang-2, can be found in Scheuer et al., MAbs, 8(3): 562-573 (2016), which is hereby incorporated by reference for all purposes.

[0423] Progression of inflammatory diseases such as cancer is closely related to the composition of the extracellular matrix surrounding the tumor. One extracellular matrix protein common to many inflammatory diseases is Versican. Papadas et al., Journal of Histochemistry & Cytochemistry 68(12) 871-885 (2020). In addition to the various isoforms of Versican, products from its proteolytic cleavage within the tumor microenvironment termed Versikines are implicated in generating anti-tumor immunity, for example, by promoting tumor cell apoptosis in cancer. In addition, Versican proteolysis can also drive new blood vessel formation (angiogenesis). Hirani et al., Front. Oncol. 11:712807(2021). Various modifications of Versikine, including point mutations, insertions, deletions and substitutions, and fusions of Versikine to various polypeptides that can affect Versikine anti-tumorigenic abilities have been described and are included herein. Further details about Versikine modifications and fusions, can be found in U.S. Patent Application No. 2017/0258898, which is hereby incorporated by reference for all purposes.

[0424] Accordingly, provided herein, in some embodiments, is a recombinant oncolytic virus comprising at least one heterologous nucleic acid encoding one or more heterologous gene product, wherein the one or more heterologous gene product is or comprises one or more anti-angiogenic protein.

[0425] In some embodiments, the one or more heterologous nucleic acids encode for anti-angiogenic proteins that can be stably and efficiently expressed in many types of virus infected cells. Such anti-angiogenic proteins can inhibit the host's angiogenic pathways that favor tumor growth and development. In particular, the recombinant viruses including anti-angiogenic proteins provided herein can increase the ability of the recombinant virus to inhibit tumor angiogenesis and reduced tumor and metastasis growth in a host. In some embodiments, the recombinant viruses include oncolytic viruses. In some embodiments, the recombinant viruses do not include oncolytic viruses. In some embodiments, the viruses include vaccinia viruses. In some embodiments, the recombinant viruses include VIP02 derived recombinant viruses. In some embodiments, the recombinant viruses include any viruses described herein or incorporated by reference herein.

[0426] In some embodiments, the one or more anti-angiogenic protein is a VEGF inhibitor, an angiopoietin inhibitor, versikine or a fusion protein of any two or more of the foregoing. In some embodiments, the one or more anti-angiogenic protein comprises a VEGF inhibitor and/or an Angiopoietin-2 (Ang2) inhibitor. In some embodiments, the anti-angiogenic proteins include, but are not limited to, an anti-VEGF single chain antibody (anti-VEGF scAb), an anti-Angiopoietin-2 single chain antibody (anti-Ang2 scAb), and/or Versikine. In some embodiments, the VEGF inhibitor is an anti-VEGF antibody, optionally an anti-VEGF-single chain antibody (scAb). In some embodments, the VEGF inhibitor is an anti-VEGF-single chain antibody (scAb). In some embodiments, the angiopoietin inhibitor is an anti-Angriopoietin-2 (Ang2) antibody, optionally an anti-Ang2 single chain antibody (scAb). In some embodiments, the angiopoietin inhibitor is an anti-Ang2 single chain antibody (scAb). In some embodiments, the anti-angiogenic protein includes any of the proteins and/or factors included herein or incorporated hereby by reference. See Huang and Bao., World J Gastroenterol. 10(4): 463-470 (2004).

[0427] In some embodiments, the recombinant viruses including heterologous nucleic acids encoding for anti-angiogenic proteins encode for an anti-VEGF scAb and anti-Ang2 scAb. In some embodiments, the one or more anti-angiogenic protein is a bispecific anti-VEGF/anti-Ang2 antibody. In some embodiments, the bispecific anti-VEGF/anti-Ang2 antibody comprises a sequence of amino acids that has at least 95%, at least 96%, at least 97%, at least 98% or at least 99% sequence identity to the sequence set forth in SEQ ID NO:23. In some embodiments, the bispecific anti-VEGF/anti-Ang2 antibody comprises the sequence set forth in SEQ ID NO:23.

[0428] In some embodiments, the one or more anti-angiogenic protein further comprises versikine. In some embodiments, the versikine is human versikine. In some embodiments, the versikine has a sequence of amino acids that has at least 95%, at least 96%, at least 97%, at least 98% or at least 99% sequence identity to the sequence set forth in SEQ ID NO:24. In some embodiments, the versikine has the sequence of amino acids set forth in SEQ ID NO:24.

[0429] In some embodiments, the recombinant viruses comprise heterologous nucleic acids encoding for anti-angiogenic proteins, such as an anti-VEGF scAb, an anti-Ang2 scAb, and/or Versikine. In some embodiments, the recombinant viruses including heterologous nucleic acids encoding for anti-angiogenic proteins encode for an anti-VEGF scAb. In some embodiments, the recombinant viruses including heterologous nucleic acids encoding for anti-angiogenic proteins encode for an anti-Ang2 scAb. In some embodiments, the recombinant viruses including heterologous nucleic acids encoding for anti-angiogenic proteins encode for Versikine. In some embodiments, the recombinant viruses including heterologous nucleic acids encoding for anti-angiogenic proteins encode for an anti-Ang2 scAb and Versikine. In some embodiments, the recombinant viruses including heterologous nucleic acids encoding for anti-angiogenic proteins encode for an anti-VEGF scAb and Versikine.

[0430] In some embodiments, the recombinant virus expresses an anti-VEGF single scAb gene product, an anti-Ang2 gene product, and a Versikine gene product (NP_001157569). Specifically, in some embodiments, the recombinant virus comprises an expression cassette containing an anti-VEGF scAb gene product and an anti-Ang2 scAb gene product cDNA under the control of vaccinia modified H5 (mH5) gene promoter, and a cDNA including the Versikine gene product under the control of vaccinia PSEL promoter. The full cassette including the cDNA including an anti-VEGF scAb gene product, an anti-Ang2 gene product, and a Versikine gene product is inserted into vaccinia J2R genomic region. In addition, the recombinant viruses expressing an anti-VEGF scAb gene product, an anti-Ang2 scAb gene product and a Versikine gene product include a deletion of the A35R genomic region.

[0431] In some embodiments, the anti-angiogenic protein includes an anti-VEGF-anti-Ang2 scAb fusion single chain antibody polypeptide and a Versikine polypeptide. In some embodiments, the anti-VEGF-anti-Ang2 scAb polypeptide can increase the ability of the recombinant virus to inhibit angiogenesis. In some embodiments, the Versikine polypeptide can increase the ability of the recombinant virus to inhibit angiogenesis. In some embodiments, the Versikine polypeptide can enhance the anti-tumorigenic and/or anti-angiogenic properties of the anti-VEGF-anti-Ang2 scAb polypeptide. In some embodiments, a recombinant virus is provided which includes a polynucleotide that encodes an anti-VEGF-anti-Ang2 scAb molecule, wherein the anti-VEGF-anti-Ang2 scAb molecule comprises an amino acid sequence having at least 90% sequence identity to SEQ ID NO: 23. In some embodiments, a recombinant virus is provided which includes a polynucleotide that encodes a Versikine molecule, wherein the Versikine molecule comprises an amino acid sequence having at least 90%, 91%, 92%, 93%, 94%, 95%, 96%, 97%, 98%, or 99% sequence identity to SEQ ID NO: 24. In some embodiments, a recombinant virus is provided which includes a polynucleotide that encodes an anti-VEGF-anti-Ang2 scAb molecule, wherein the anti-VEGF-anti-Ang2 scAb molecule comprises an amino acid sequence having at least 90%, 91%, 92%, 93%, 94%, 95%, 96%, 97%, 98%, or 99% sequence identity to SEQ ID NO: 23, and a polynucleotide that encodes a Versikine molecule, wherein the Versikine molecule comprises an amino acid sequence having at least 90%, 91%, 92%, 93%, 94%, 95%, 96%, 97%, 98%, or 99% sequence identity to SEQ ID NO: 24.

[0432] In some embodiments, the recombinant virus expresses an anti-VEGF single chain antibody (scAb) gene product, an Angiopoietin-2 (Ang-2) gene product, and a Versikine gene product (NP_001157569). Specifically, in some embodiments, the recombinant virus comprises an expression cassette containing an anti-VEGF single chain antibody (scAb) gene product and an Angiopoietin-2 (Ang-2) gene product cDNA under the control of vaccinia modified H5 (mH5) gene promoter, and a cDNA including the Versikine gene product under the control of vaccinia PSEL promoter. The full cassette including the cDNA including an anti-VEGF single chain antibody (scAb) gene product, an Angiopoietin-2 (Ang-2) gene product, and a Versikine gene product is inserted into vaccinia J2R genomic region. In addition, the recombinant viruses expressing an anti-VEGF single chain antibody (scAb) gene product, an Angiopoietin-2 (Ang-2) gene product, and a Varsikine gene product include a deletion of the A35R genomic region.

[0433] In some embodiments, the anti-angiogenic protein includes an anti-VEGF-Ang-2 single chain antibody polypeptide and a Versikine polypeptide. In some embodiments, the anti-VEGF-Ang-2 single chain antibody polypeptide can increase the ability of the recombinant virus to inhibit angiogenesis. In some embodiments, the Versikine polypeptide can increase the ability of the recombinant virus to inhibit angiogenesis. In some embodiments, the Versikine polypeptide can enhance the anti-tumorigenic and/or anti-angiogenic properties of the anti-VEGF-Ang-2 single chain antibody polypeptide. In some embodiments, a recombinant virus is provided which includes a polynucleotide that encodes an anti-VEGF-Ang-2 single chain antibody molecule, wherein the anti-VEGF-Ang-2 single chain antibody molecule comprises an amino acid sequence having at least 90%, 91%, 92%, 93%, 94%, 95%, 96%, 97%, 98%, or 99% sequence identity to SEQ ID NO: 23. In some embodiments, a recombinant virus is provided which includes a polynucleotide that encodes a Versikine molecule, wherein the Versikine molecule comprises an amino acid sequence having at least 90%, 91%, 92%, 93%, 94%, 95%, 96%, 97%, 98%, or 99% sequence identity to SEQ ID NO: 24. In some embodiments, a recombinant virus is provided which includes a polynucleotide that encodes an anti-VEGF-Ang-2 single chain antibody molecule, wherein the anti-VEGF-Ang-2 single chain antibody molecule comprises an amino acid sequence having at least 90%, 91%, 92%, 93%, 94%, 95%, 96%, 97%, 98%, or 99% sequence identity to SEQ ID NO: 23, and a polynucleotide that encodes a Versikine molecule, wherein the Versikine molecule comprises an amino acid sequence having at least 90%, 91%, 92%, 93%, 94%, 95%, 96%, 97%, 98%, or 99% sequence identity to SEQ ID NO: 24.

[0434] In some embodiments, the recombinant virus comprises a polypeptide with a sequence of amino acids that has at least 70%, such as at least 75%, 80%, 85% or 90% sequence identity to SEQ ID NO: 23. For example, in some embodiments, the recombinant virus comprises a sequence of nucleotides that has at least 91%, 92%, 93%, 94%, 95%, 95%, 97%, 98%, 99%, 99.1%, 99.2%, 99.3%, 99.4%, 99.5%, 99.6%, 99.7%, 99.8%, or 99.9% sequence identity to the amino acid sequence of SEQ ID NO: 23, but is less than 100% identical to the amino aicd sequence of SEQ ID NO: 23. In some embodiments, the recombinant virus comprises the amino acid sequence of SEQ ID NO: 23. In some embodiments, the recombinant virus comprises a polypeptide with a sequence of amino acids that has at least 70%, such as at least 75%, 80%, 85% or 90% sequence identity to the amino acid sequence of SEQ ID NO: 24. For example, in some embodiments, the recombinant virus comprises a sequence of nucleotides that encodes a polypeptide having at least 91%, 92%, 93%, 94%, 95%, 95%, 97%, 98%, 99%, 99.1%, 99.2%, 99.3%, 99.4%, 99.5%, 99.6%, 99.7%, 99.8%, or 99.9% sequence identity to the amino acid sequence of SEQ ID NO: 24, but is less than 100% identical to SEQ ID NO: 24. In some embodiments, the recombinant virus comprises a sequence of nucleotides that encodes the amino acid sequence of SEQ ID NO: 24.

[0435] In some embodiments, the recombinant virus which includes a polynucleotide that encodes an anti-VEGF-Ang-2 single chain antibody molecule (e.g., comprising the amino acid sequence of SEQ ID NO: 23) and Versikine molecule (e.g., comprising the amino acid sequence of SEQ ID NO: 24) is derived from the VIR11 (comprising the nucleic acid sequence of SEQ ID NO: 3) strain and includes a sequence of nucleotides that has at least 70%, such as at least 75%, 80%, 85% or 90% sequence identity to SEQ ID NO: 13 (VIR71). For example, in some embodiments, the recombinant virus comprises a sequence of nucleotides that has at least 91%, 92%, 93%, 94%, 95%, 95%, 97%, 98%, 99%, 99.1%, 99.2%, 99.3%, 99.4%, 99.5%, 99.6%, 99.7%, 99.8%, or 99.9% sequence identity to the nucleic acid sequence of SEQ ID NO: 13, but is less than 100% identical to SEQ ID NO: 13. In some embodiments, the recombinant virus comprises a sequence of nucleotides comprising the nucleic acid sequence of SEQ ID NO: 13. In some embodiments, the VIR71 virus (comprising the nucleic acid sequence of SEQ ID NO: 13) includes a deletion of the genomic region corresponding to the A35R gene. In some embodiments, the polynucleotide that encodes the anti-VEGF-Ang-2 single chain antibody molecule (comprising the amino acid sequence of SEQ ID NO: 23) is operably linked to the mH5 gene promoter. In some embodiments, the polynucleotide that encodes the Versikine molecule (comprising the amino acid sequence of SEQ ID NO: 24) is operably linked to the PSEL gene promoter.

[0436] In some embodiments, the nucleic acid genome of the recombinant virus, e.g., recombinant oncolytic virus, comprises a sequence of nucleotides that has at least 95%, at least 96%, at least 97%, at least 98% or at least 99% sequence identity to the sequence set forth in SEQ ID NO:13. In some embodiments, the nucleic acid genome of the recombinant virus, e.g., recombinant oncolytic virus, comprises the nucleic acid sequence of SEQ ID NO: 13. A recombinant oncolytic virus comprising the nucleic acid sequence of SEQ ID NO: 13 is also referred to herein as VIR71.

[0437] In some embodiments, the recombinant viruses provided herein are derived from the VIR11 (comprising the nucleic acid sequence of SEQ ID NO: 3) strain and comprises a sequence of nucleotides that has at least 70%, such as at least 75%, 80%, 85% or 90% sequence identity to SEQ ID NO: 12 (also named VIR52). For example, in some embodiments, the recombinant virus comprises a sequence of nucleotides that has at least 91%, 92%, 93%, 94%, 95%, 95%, 97%, 98%, 99%, 99.1%, 99.2%, 99.3%, 99.4%, 99.5%, 99.6%, 99.7%, 99.8%, or 99.9% sequence identity to the nucleic acid sequence of SEQ ID NO: 12, but is less than 100% identical to the nucleic acid sequence of SEQ ID NO: 12. In some embodiments, the VIR52 virus (comprising the nucleic acid sequence of SEQ ID NO: 12) includes a deletion of the genomic region corresponding to the A35R gene and a deletion of the genomic region corresponding to the J2R gene.

[0438] In some embodiments, the recombinant virus provided herein exhibit increased anti-tumor properties, such as by improved anti-angiogenesis inhibiting properties. In some embodiments, recombinant viruses provided herein can inhibit tumor, hyperplasia, or metastasis growth in an in vivo model. In particular embodiments, administration of an effective dose of VIR71 (comprising the nucleic acid sequence of SEQ ID NO: 13) to a subject inhibits tumor, hyperplasia, or metastasis growth in an in vivo model. In some embodiments, administration of an effective dose of a recombinant virus comprising a nucleic acid sequence having at least 91%, 92%, 93%, 94%, 95%, 95%, 97%, 98%, 99%, 99.1%, 99.2%, 99.3%, 99.4%, 99.5%, 99.6%, 99.7%, 99.8%, or 99.9% sequence identity to the nucleic acid sequence of SEQ ID NO: 13 to a subject inhibits tumor, hyperplasia, and/or metastasis growth.

[0439] Also provided herein are recombinant viruses including heterologous nucleic acids encoding for immune stimulating proteins and angiogenesis modulating proteins that can be stably and efficiently expressed in many types of virus-infected cells and increase the anti-tumorigenic properties of the virus. Accordingly, in some embodiments, the recombinant oncolytic virus comprises at least one heterologous nucleic acid encoding one or more heterologous gene product, wherein the one or more heterologous gene product comprises one or more immune stimulating protein and one or more anti-angiogenic protein. In some embodiments, the immune modulating proteins include, but are not limited to, hmLIGHT. In some embodiments, the immune modulating proteins include, but are not limited to, anti-VEGF single chain antibody (scAb) and Angiopoietin-2 (Ang-2). In some embodiments, the immune modulating proteins include, but are not limited to, hmLIGHT and the angiogenesis modulating proteins include, but are not limited to, anti-VEGF single chain antibody (scAb) and Angiopoietin-2 (Ang-2). In some embodiments, the immune modulating proteins include, but are not limited to, any immune modulating protein hereby included by reference. In some embodiments, the angiogenesis modulating proteins include, but are not limited to, any angiogenesis modulating protein hereby included by reference.

[0440] Recombinant viruses expressing an hmLIGHT gene product (NP_001363816 XP_016882906), an anti-VEGF single chain antibody (scAb) gene product and an Angiopoietin-2 (Ang-2) gene product have been generated herein in various embodiments. Specifically, the generated recombinant viruses include two expression cassettes; one expression cassette is inserted into the A35R genomic region and contains a full length hmLIGHT cDNA under the control of vaccinia SSE gene promoter; and the second cassette is inserted in the J2R genomic regions and contains an anti-VEGF single chain antibody (scAb) gene product and an Angiopoietin-2 (Ang-2) gene product cDNA under the control of vaccinia modified H5 (mH5) gene promoter and a cDNA including the Versikine gene product under the control of vaccinia SEL promoter.

[0441] In some embodiments, the immune modulating protein includes hmLIGHT and the angiogenesis modulating protein includes anti-VEGF single chain antibody (scAb) and Angiopoietin-2 (Ang-2). In some embodiments, the hmLIGHT protein, the anti-VEGF single chain antibody (scAb) protein and/or the Angiopoietin-2 (Ang-2) gene product can increase the anti-tumor properties of the recombinant virus and/or inhibit host's angiogenesis. In some embodiments, a recombinant virus is provided which includes a polynucleotide that encodes an hmLIGHT molecule, anti-VEGF single chain antibody (scAb) molecule, an Angiopoietin-2 (Ang-2) molecule, and a Versikine molecule, wherein the hmLIGHT polypeptide comprises an amino acid sequence having at least 90% sequence identity to SEQ ID NO: 25, the anti-VEGF single chain antibody (scAb) Angiopoietin-2 (Ang-2) polypeptide comprises an amino acid sequence having at least 90% sequence identity to SEQ ID NO: 23, and the Versikine polypeptide comprises an amino acid sequence having at least 90% sequence identity to SEQ ID NO: 24.

[0442] In some embodiments, the recombinant virus includes a polypeptide with a sequence of amino acids that has at least 70%, such as at least 75%, 80%, 85% or 90% sequence identity to SEQ ID NO: 25. For example, the recombinant viruses have a sequence of nucleotides that has at least 91%, 92%, 93%, 94%, 95%, 95%, 97%, 98%, 99%, 99.1%, 99.2%, 99.3%, 99.4%, 99.5%, 99.6%, 99.7%, 99.8%, 99.9%, but are less than 100% identical to SEQ ID NO: 25. In some embodiments, the recombinant virus includes a polypeptide with a sequence of amino acids that has at least 70%, such as at least 75%, 80%, 85% or 90% sequence identity to SEQ ID NO: 23. For example, the recombinant viruses have a sequence of nucleotides that has at least 91%, 92%, 93%, 94%, 95%, 95%, 97%, 98%, 99%, 99.1%, 99.2%, 99.3%, 99.4%, 99.5%, 99.6%, 99.7%, 99.8%, 99.9%, but are less than 100% identical to SEQ ID NO: 23. In some embodiments, the recombinant virus includes a polypeptide with a sequence of amino acids that has at least 70%, such as at least 75%, 80%, 85% or 90% sequence identity to SEQ ID NO: 24. For example, the recombinant viruses have a sequence of nucleotides that has at least 91%, 92%, 93%, 94%, 95%, 95%, 97%, 98%, 99%, 99.1%, 99.2%, 99.3%, 99.4%, 99.5%, 99.6%, 99.7%, 99.8%, 99.9%, but are less than 100% identical to SEQ ID NO: 24.

[0443] In some embodiments, the polynucleotide that encodes the hmLIGHT molecule is operably linked to the SSE gene promoter and the polynucleotide that encodes the anti-VEGF single chain antibody (scAb)—Angiopoietin-2 (Ang-2) molecule is operably linked to the mH5 promoter, and the Versikine molecule is operably linked to the SEL promoter. In some embodiments, the recombinant virus which includes a polynucleotide that encodes an hmLIGHT molecule (e.g., comprising the sequence of SEQ ID NO: 25), the anti-VEGF single chain antibody (scAb)/Angiopoietin-2 (Ang-2) molecule (e.g., comprising the sequence of SEQ ID NO: 23), and the Versikine molecule (e.g., comprising the sequence of SEQ ID NO: 24) is derived from the VIR49 (comprising the nucleic acid sequence of SEQ ID NO: 11) strain and includes a sequence of nucleotides that has at least 70%, such as at least 75%, 80%, 85% or 90% sequence identity to SEQ ID NO: 47 (also named VIR86). For example, the recombinant virus have a sequence of nucleotides that has at least 91%, 92%, 93%, 94%, 95%, 95%, 97%, 98%, 99%, 99.1%, 99.2%, 99.3%, 99.4%, 99.5%, 99.6%, 99.7%, 99.8%, 99.9%, but are less than 100% identical to SEQ ID NO: 47. In some embodiments, the nucleic acid genome of the recombinant oncolytic virus comprises a sequence of nucleotides that has at least 95%, at least 96%, at least 97%, at least 98% or at least 99% sequence identity to the sequence set forth in SEQ ID NO:47. In some embodiments, the nucleic acid genome of the recombinant oncolytic virus comprises the sequence of nucleotides of SEQ ID NO: 47.

[0444] Recombinant virus provided herein exhibit increase anti-tumorigenic properties and anti-angiogenesis properties. In particular embodiments, administration of an effective dose of VIR86 (SEQ ID NO: 47) to a subject inhibits tumor, hyperplasia, or metastasis growth in an in vivo model.

[0445] D. Apoptosis Modulating Viruses

[0446] In some embodiments, the at least one heterologous nucleic acid encoding one or more heterologous gene product comprises one or more heterologous nucleic acid each encoding an apoptosis-inducible protein, such as iDED, iFas, and/or iCas9.

[0447] Accordingly, provided herein are recombinant viruses including heterologous nucleic acids encoding for an inducible “safety switch” mechanism that can be stably and efficiently expressed in many types of virus infected cells upon induction with an inducing agent.

[0448] Viral therapies hold great promise for the treatment of human disease. Significant toxicities from the viruses themselves or from the heterologous gene products they carry have hampered clinical investigation. Thus, there is considerable interest in developing “safety switches” by which cells infected with a therapeutic virus may be ablated, or “turned off,” should problems arise with their use. Safety-switch systems have been investigated in a variety of cells. Safety-switch genes have been used, for example, in T lymphocytes to treat viral infections and malignancies and in T-cell infusions to treat recurrent malignancy. Another option is based on the induction of genes that activate apoptosis pathways in human T cells; See Straathof et al., Blood (2005), 105:11, 4247-4254).

[0449] One way to eliminate unwanted cells is by inducing cell apoptosis, a type of programed cell death or cellular suicide, a vital component of various cellular processes including normal cell turnover, proper development and functioning of the immune system, hormone-dependent atrophy, embryonic development and chemical-induced cell death. Inappropriate apoptosis (either too little or too much) is a factor in many human conditions including neurodegenerative diseases, ischemic damage, autoimmune disorders and many types of cancer. Therefore, modulation of apoptosis seems a convenient candidate for a “safety switch” system meant to kill a cell upon switching the system on. See S. Elmore, Toxicol Pathol. 2007; 35(4): 495-516.

[0450] In humans, apoptosis can be induced through stimulation of the Fas receptor that results in recruitment of the initiator caspase 8, through interaction with the adaptor molecule Fas-associated death domain protein (FADD) by means of its death domains (DDs) and death effector domains (DEDs). In addition, apoptosis can be activated by disruption of the mitochondrial membrane that leads to activation of caspase 9. Both reduced and increased apoptosis can result in pathologies. Furthermore, mutations that affect apoptosis pathways are one of the hallmarks of cancer development. See Hanahan et al., Cell (2011) 144:5, 646-674.

[0451] Inducible systems including apoptotic effector proteins have been described; for example, inducible systems have been explored in human T lymphocytes using caspase 9, Fas or the death effector domain (DED) of the Fas-associated death domain-containing protein (FADD). However, no “safety switch” system including apoptosis effectors is believed to have yet been engineered into viral systems.

[0452] Provided herein, are recombinant viruses including heterologous nucleic acids encoding for an inducible “safety switch” mechanism including an inducible Caspase 9, and inducible Fas, or an inducible DED gene fused to F36V-FKBP, a mutant version of human FK506 binding protein (FKBP12). This inducible “safety switch” allows for conditional dimerization upon induction with AP1903, an FDA approved drug for use in humans. See Straathof et al., Blood (2005) 105:11, 4247-4254. This inducible system has advantages that can make it a good candidate for viral therapy: it includes human gene products with potential low immunogenicity, and administration of AP1903 has no effects other than the selective elimination of targeted cells. Administration of this small molecule results in cross-linking and activation of the proapoptotic fusion molecules iCasp9 (caspase 9 fused to F36V-FKBP), iDED (DED fused to F36V-FKBP) and iFas (Fas fused to F36V-FKBP).

[0453] Accordingly, provided herein, in some embodiments, is a recombinant oncolytic virus comprising at least one heterologous nucleic acid encoding one or more heterologous gene product, wherein the one or more heterologous gene product is or comprises an apoptosis-inducible protein. In some embodiments, the apoptosis-inducible protein comprises a proapoptotic molecule fused with an FKBP variant that is able to bind a chemical inducer of dimerization (CID). In some embodiments, the FKBP variant is FKBP-F36V. In some embodiments, the FKBP variant is FKBP-F36V, and the FKBP-F36V comprises the sequence of amino acids set forth in SEQ ID NO: 56. In some embodiments, the chemical inducer of dimerization is AP1903 (Rimiducid). In some embodiments, the proapoptotic molecule is Fas, the death effector domain (DED) of the Fas-associated death domain-containing protein (FADD), or a caspase, optionally wherein the caspase is caspase 9.

[0454] In some embodiments, the apoptosis-inducible protein allows for an inducible system that includes a chimeric polypeptide that includes a multimerization region fused to a proapoptotic polypeptide. Such inducible system can be activated or “switched on” upon binding of a multimeric ligand to the multimerization region. In some embodiments, the apoptosis-inducible protein comprises a multimerization region fused to a proapoptotic polypeptide. In some embodiments, the multimerization region includes any one of FKBP12, F36V-FKBP, cyclophilin receptor, steroid receptor, tetracycline receptor, heavy chain antibody subunit, light chain antibody subunit, single chain antibodies comprised of heavy and light chain variable regions in tandem separated by a flexible linker domain, and mutated sequences thereof. In some embodiments, the multimerization region is a F36V-FKBP region. In some embodiments, the multimerization region is an FKBP12 region. In some embodiments, the FKBP12 region is an FKBP12v36 region. In some embodiments, the multimerization region is Fv′Fvls. In some embodiments, the multimerization region binds a ligand selected from the group consisting of an FK506 dimer and a dimeric FK506 analog ligand. In some embodiments, the ligand is AP1903 (Rimiducid). In some embodiments, the ligand is AP20187.

[0455] In some embodiments, the multimerization region includes a ligand-binding domain. Such ligand-binding domain can be any convenient domain that will allow for induction of the inducible system using a natural or unnatural ligand, for example, an unnatural synthetic ligand. Examples of ligand-binding domains include, but are not limited to, cyclophilin receptor ligand-binding domain, steroid receptor ligand-binding domain, cyclophilin receptor ligand-binding domain, and tetracycline receptor ligand-binding domain. In some embodiments, the ligand-binding domain includes a ligand-binding domain of FK506 binding protein (FKBP12). In some embodiments, the ligand-binding domain includes a ligand-binding domain of the FKBP12 variant FK506-BP12. Further details about inducible systems using ligand-binding domains can be found in US Patent Publication No. 2020/0230216, which is hereby incorporated by reference for all purposes. In some embodiments, the FKB12 variant includes, but is not limited to, iCaspase9, iCasp9, iC9, CaspaClDe. Further details about inducible systems using ligand-binding domains can be found in WIPO Patent Publication WO 2016/100241, which is hereby incorporated by reference for all purposes.

[0456] In some embodiments, the inducible system can be activated or “switched on” upon administration of multimeric ligand that results in multimerization of multimerization regions and activation of the inducible system. In some embodiments, the ligand is a small molecule. In some embodiments, the ligand is dimeric. In some embodiments, the ligand is dimeric FK506, or a dimeric FK506-like analog. In certain embodiments, the multimeric ligand is AP1903, a synthetic drug that has proven safe in healthy volunteers. In some embodiments, AP1903 administration results in dimerization and cross-linking of the proapoptotic polypeptide and activation of the inducible system. In some embodiments, the multimeric ligand is AP20187 (ARIAD Pharmaceuticals, Cambridge, MA), a nontoxic synthetic FK506 analog that has been modified to reduce interactions with endogenous FKBP12s, while enhancing binding to this FK506-BP12 variant. Administration of the multimeric ligand results in the aggregation of inducible proapoptotic polypeptides, leading to their activation.

[0457] Provided herein, in various embodiments, are recombinant viruses including heterologous nucleic acids encoding for an inducible “safety switch” mechanism including an inducible Caspase 9, and inducible Fas, or an inducible DED gene fused to F36V-FKBP, a mutant version of human FK506 binding protein (FKBP12). This inducible “safety switch” allows for conditional multimerization upon induction with AP1903, an FDA approved drug for use in humans. See Straathof et al., Blood (2005) 105:11, 4247-4254. This inducible system has advantages that can make it a good candidate for viral therapy: it includes human gene products with a potential for low immunogenicity, and administration of AP1903 has no effects other than the selective elimination of targeted cells. Administration of this small molecule results in cross-linking and activation of the proapoptotic fusion molecules iCasp9 (caspase 9 fused to F36V-FKBP), iDED (DED fused to F36V-FKBP) and iFas (Fas fused to F36V-FKBP).

[0458] 1. Casp9 Inducible System

[0459] Provided herein, in some embodiments, is a Casp9 inducible system. In some embodiments, the Casp9 inducible “safety switch” mechanism comprises an inducible Caspase 9 gene fused to F36V-FKBP, which is a mutated version of human FK506 binding protein (FKBP12) that allows for conditional dimerization of F36V-FKBP upon induction of the system with AP1903, which is an FDA approved drug for use in humans. See Straathof et al., Blood (2005) 105:11, 4247-4254. Administration of this small molecule results in cross-linking and activation of the proapoptotic fusion molecule iCasp9 (caspase 9 fused to F36V-FKBP). Methods for inducing selective apoptosis using a Caspase-9 system, using ligand-mediated dimerization and activation of a chimeric Caspase-9 polypeptide are discussed in U.S. patent application Ser. No. 13/112,739, filed May 20, 2011, and entitled METHODS FOR INDUCING SELECTIVE APOPTOSIS, naming Malcolm K. Brenner as inventor, which is hereby incorporated by reference herein in its entirety for all purposes. See also Straathof et al., Blood (2005), 105:11, 4247-4254). Further details about inducible systems using ligand-binding domains can be found in U.S. Pat. No. 9,434,935, which is hereby incorporated by reference for all purposes.

[0460] In some embodiments, the apoptosis-inducible protein comprises a proapoptotic molecule fused with an FKBP variant that is able to bind a chemical inducer of dimerization (CID). In some embodiments, the FKBP variant is FKBP-F36V. In some embodiments, the FKBP variant is FKBP-F36V, and the FKBP-F36V comprises the sequence of amino acids set forth in SEQ ID NO: 56.

[0461] In some embodiments, the chemical inducer of dimerization is AP1903 (Rimiducid).

[0462] In some embodiments, the proapoptotic molecule is Fas, the death effector domain (DED) of the Fas-associated death domain-containing protein (FADD), or a caspase, optionally wherein the caspase is caspase 9.

[0463] In some embodiments, the proapoptotic molecule is caspase and the caspase is caspase 9. In some embodiments, the apoptosis-inducible protein is an inducible caspase 9 (iCasp9). In some embodiments, the recombinant virus expresses an inducible iCasp9 system. In some embodiments, the iCasp9 comprises a proapoptotic molecule fused with an FKBP variant that is able to bind a chemical inducer of dimerization (CID). Specifically, in some embodiments, the recombinant virus comprises an expression cassette containing an inducible Casp9 cDNA molecule under the control of a vaccinia synthetic early promoter PSE inserted into the J2R gene locus. The iCasp9 molecule includes a caspase 9 (aa 135-416) without its caspase activation and recruitment domain (CARD; GenBank NM001 229) linked to a F36V-FKBP, a mutant version of human FK506 binding protein (FKBP12; GenBank AH002 818) that contain an F36V mutation (F36V-FKBP).

[0464] In some embodiments, a recombinant virus is provided which comprises a polynucleotide that encodes an iCasp9 molecule comprising a portion of caspase 9 (amino acid residues 135-416) linked to a F36V-FKBP, wherein the iCasp9 polypeptide comprises an amino acid sequence having at least 90%, 91%, 92%, 93%, 94%, 95%, 95%, 97%, 98%, or 99% sequence identity to the amino acid sequence of SEQ ID NO: 26. In some embodiments, the portion of caspase 9 contains amino acid residues 135 to 416 of full-length caspase 9. Accordingly, in some embodiments, the apoptosis-inducible protein is an inducible caspase 9 (iCas9) comprising the amino acid sequence set forth in SEQ ID NO: 26, or a sequence of amino acids that has at least 85%, 90%, or 95% sequence identity to the amino acid sequence of SEQ ID NO:26. In some embodiments, the recombinant virus includes a polypeptide with a sequence of amino acids that has at least 70%, such as at least 75%, 80%, 85% or 90% sequence identity to SEQ ID NO: 26. For example, the recombinant viruses have a sequence of nucleotides that has at least 91%, 92%, 93%, 94%, 95%, 95%, 97%, 98%, 99%, 99.1%, 99.2%, 99.3%, 99.4%, 99.5%, 99.6%, 99.7%, 99.8%, 99.9%, but are less than 100% identical SEQ ID NO: 26. In some embodiments, the polynucleotide that encodes the iCasp9 molecule is operably linked to the PSE promoter.

[0465] In some embodiments, the recombinant virus which comprises a polynucleotide that encodes an iCasp9 molecule (e.g., comprising the amino acid sequence of SEQ ID NO: 26) is derived from the clonal VIP02 (comprising the nucleic acid sequence of SEQ ID NO: 1) strain, and the recombinant virus comprises a sequence of nucleotides that has at least 70%, such as at least 75%, 80%, 85% or 90% sequence identity to the nucleic acid sequence of SEQ ID NO: 7 (also named VIR40). For example, the recombinant virus comprises a sequence of nucleotides that has at least 91%, 92%, 93%, 94%, 95%, 95%, 97%, 98%, 99%, 99.1%, 99.2%, 99.3%, 99.4%, 99.5%, 99.6%, 99.7%, 99.8%, or 99.9% sequence identity to the nucleic acid sequence of SEQ ID NO: 7, but is less than 100% identical to the nucleic acid sequence of SEQ ID NO: 7. In some embodiments, the nucleic acid genome of the recombinant oncolytic virus comprises a sequence of nucleotide that has at least 95%, at least 96%, at least 97%, at least 98% or at least 99% sequence identity to the sequence set forth in SEQ ID NO: 7. In some embodiments, the recombinant virus, e.g., recombinant oncolytic virus, comprises the nucleic acid sequence of SEQ ID NO: 7. A recombinant oncolytic virus comprising the nucleic acid sequence of SEQ ID NO: 7 is also referred to herein as VIR40.

[0466] In some embodiments, the recombinant virus is derived from the clonal VIP02 (comprising the nucleic acid sequence of SEQ ID NO: 1) strain and includes a deletion of the J2R gene. In some embodiments, the recombinant virus is derived from the clonal VIP02 (comprising the nucleic acid sequence of SEQ ID NO: 1) strain and virus includes a sequence of nucleotides that has at least 70%, such as at least 75%, 80%, 85% or 90% sequence identity to SEQ ID NO: 4 (also named VIR13). For example, in some embodiments, the recombinant virus comprises a sequence of nucleotides that has at least 91%, 92%, 93%, 94%, 95%, 95%, 97%, 98%, 99%, 99.1%, 99.2%, 99.3%, 99.4%, 99.5%, 99.6%, 99.7%, 99.8%, 99.9%, but are less than 100% identical to SEQ ID NO: 4. In some embodiments, subjects infected with an effective dose of VIR13 exhibit a remarkable reduction of tumor progression as compared to subjects infected with a vehicle solution as shown in FIG. 20.

[0467] In some embodiments, the recombinant virus is derived from the VIR13 (SEQ ID NO: 4) strain and includes a deletion of the J2R gene and a deletion of the B2R gene. In some embodiments, the recombinant virus is derived from the VIR13 (SEQ ID NO: 4) strain and virus includes a sequence of nucleotides that has at least 70%, such as at least 75%, 80%, 85% or 90% sequence identity to SEQ ID NO: 48 (also named VIR94). For example, the recombinant virus have a sequence of nucleotides that has at least 91%, 92%, 93%, 94%, 95%, 95%, 97%, 98%, 99%, 99.1%, 99.2%, 99.3%, 99.4%, 99.5%, 99.6%, 99.7%, 99.8%, 99.9%, but are less than 100% identical to SEQ ID NO: 48. In some embodiments, subjects infected with an effective dose of VIR94 exhibit a remarkable reduction of tumor progression as compared to subjects infected with a vehicle solution.

[0468] In some embodiments, VIR40 exhibits enhanced anti-tumorigenic activity compared to VIR13 after induction with an effective dose of Rimiducid. In some embodiments, VIR40 exhibits less anti-tumorigenic activity compared to VIR13 after induction with an effective dose of Rimiducid. In some embodiments, VIR40 exhibits similar anti-tumorigenic activity compared to VIR13 after induction with an effective dose of Rimiducid.

[0469] In some embodiments, the recombinant virus includes a nucleic acid having a nucleotide sequence that encodes a chimeric protein comprising a multimeric ligand binding region and a modified Caspase-9 polypeptide, and comprises at least one amino acid substitution selected from the group consisting of N405Q, D330A, F404Y, F406L, F406T, F404W, T317A, S144A, S144D, S196A, S183A, S195A, F404T, F404W, N405F, F406T, D315A, A316G, T3175, F319W, 5307A, Y153A, and Y153F. In some embodiments, the chimeric protein has a basal activity less than that of the wild type Caspase-9 polypeptide. In some embodiments, the chimeric protein comprising the modified Caspase-9 polypeptide has a basal activity of less than 5%, 10%, 15%, 20%, 25%, 30%, 35%, 40%, 45%, 50%, 55%, 60%, 65%, 70%, 75%, 80%, 85%, or 90% that of a chimeric protein comprising a non-modified Caspase-9. Further details about inducible systems using ligand-binding domains can be found in U.S. Pat. No. 9,932,572, which is hereby incorporated by reference for all purposes.

[0470] Caspase polypeptides other than Caspase-9 that may be encoded by the chimeric polypeptides of the current technology include, for example, Caspase-1, Caspase-3, and Caspase-8. Discussions of these Caspase polypeptides may be found in, for example, MacCorkle, R. A., et al., Proc. Natl. Acad. Sci. U.S.A. (1998) 95:3655-3660; and Fan, L., et al. (1999) Human Gene Therapy 10:2273-2285). Further details about inducible systems using ligand-binding domains can be found in U.S. Pat. No. 10,525,110, which is hereby incorporated by reference for all purposes.

[0471] 2. iDED Inducible System

[0472] The Death effector domains (DED) are found in inactive procaspases (cysteine proteases) and proteins that regulate caspase activation in the apoptosis cascade such as FAS-associating death domain-containing protein (FADD). FADD is a signaling adaptor protein, which mediates the activation of caspase 8 during death receptor-induced apoptosis. In addition to their role in apoptosis and cancer, these proteins have been shown to have important roles in regulating other forms of cell death, including necroptosis, and in regulating other important cellular processes, including autophagy and inflammation. Moreover, these proteins also have prominent roles in innate and adaptive immunity and during embryonic development. See J S Riley, A Malik, C Holohan & D B Longley Cell Death & Disease volume 6, pagee1866 (2015) and Imtiyaz et al., J Immunol. 2006 Jun. 1; 176(11): 6852-6861.

[0473] Accordingly, provided herein, in some embodiments, is a recombinant oncolytic virus comprising at least one heterologous nucleic acid encoding one or more heterologous gene product, wherein the one or more heterologous gene product is or comprises an apoptosis-inducible protein. In some embodiments, the apoptosis-inducible protein comprises a proapoptotic molecule fused with an FKBP variant that is able to bind a chemical inducer of dimerization (CID). In some embodiments, the FKBP variant is FKBP-F36V. In some embodiments, the FKBP variant is FKBP-F36V, and the FKBP-F36V comprises the sequence of amino acids set forth in SEQ ID NO: 56. In some embodiments, the chemical inducer of dimerization is AP1903 (Rimiducid). In some embodiments, the proapoptotic molecule is the death effector domain (DED) of the Fas-associated death domain-containing protein (FADD).

[0474] In some embodiments, the apoptosis-inducible protein is an inducible DED (iDED). In some embodiments, the iDED comprises a proapoptotic molecule fused with an FKBP variant that is able to bind a chemical inducer of dimerization (CID).

[0475] In some embodiments, the recombinant virus comprises heterologous nucleic acids encoding for an inducible “safety switch” mechanism comprising an inducible DED fused to two copies of F36V-FKBP, a mutant version of the human FKBP506-binding protein, and v-src (amino acid residues 1-14), thereby providing an inducible mechanism that can be triggered upon the addition of chemical inducers of dimerization, such as AP1903, an FDA approved drug for use in humans. Further details about iDED inducible systems are discussed in Junker et al., (2003) Gene Therapy, 10, 1189-1197, which is hereby incorporated by reference for all purposes.

[0476] Recombinant viruses expressing an inducible iDED system have been generated herein. Specifically, in some embodiments, the generated recombinant viruses comprise an expression cassette containing an inducible DED (death effector domain (DED) of the Fas-associated protein with death Domain, FADD) cDNA molecule under the control of a vaccinia synthetic early promoter PSE inserted into the J2R gene locus. The iDED molecule includes a death effector domain (DED) of the Fas-associated protein with death Domain, FADD, fused to two copies of F36V-FKBP, a mutated version of human FKBP12 (e.g., GenBank AH002 818) that contain an F36V mutation and a v-src (amino acid residues 1-14).

[0477] In some embodiments, the recombinant virus comprises a polynucleotide that encodes an iDED molecule comprising a death effector domain (DED) of the Fas-associated protein with death Domain, FADD, linked to 2 F36V-FKBP, and a mutated version of human FKBP12, wherein the iDED polypeptide comprises an amino acid sequence having at least 90% sequence identity to SEQ ID NO: 27. In some embodiments, the apoptosis-inducible protein is an inducible DED (iDED) comprising the sequence set forth in SEQ ID NO:27 or a sequence of amino acids that has at least 85%, 90%, or 95% sequence identity to SEQ ID NO:27. In some embodiments, the apoptosis-inducible protein is an inducible DED (iDED) comprising the sequence set forth in SEQ ID NO:27. In some embodiments, the recombinant virus comprises a polypeptide, e.g., an apoptosis-inducible protein, comprising a sequence of amino acids that has at least 70%, such as at least 75%, 80%, 85%, or 90% sequence identity to the amino acid sequence of SEQ ID NO: 27. In some embodiments, the polynucleotide that encodes the iDED molecule is operably linked to the PSE promoter.

[0478] In some embodiments, the recombinant virus, which comprises a polynucleotide that encodes an iDED molecule is derived from the clonal VIP02 (comprising the nucleic acid sequence of SEQ ID NO: 1) strain and includes a sequence of nucleotides that has at least 70%, such as at least 75%, 80%, 85% or 90% sequence identity to SEQ ID NO: 8 (also named VIR41). For example, in some embodiments, the recombinant virus comprises a sequence of nucleotides that has at least 91%, 92%, 93%, 94%, 95%, 95%, 97%, 98%, 99%, 99.1%, 99.2%, 99.3%, 99.4%, 99.5%, 99.6%, 99.7%, 99.8%, or 99.9% sequence identity to the nucleic acid sequence of SEQ ID NO: 8, but is less than 100% identical SEQ ID NO: 8. In some embodiments, the recombinant virus comprises the nucleic acid sequence of SEQ ID NO: 8. In some embodiments, the nucleic acid genome of the recombinant oncolytic virus comprises a sequence of nucleotide that has at least 95%, at least 96%, at least 97%, at least 98% or at least 99% sequence identity to the sequence set forth in SEQ ID NO:8. In some embodiments, the nucleic acid genome of the recombinant oncolytic virus comprises the nucleic acid sequence of SEQ ID NO: 8. In some embodiments, the recombinant virus, e.g., recombinant oncolytic virus, comprises an iDED, and the nucleic acid genome of the recombinant oncolytic virus comprises a sequence of nucleotide that has at least 95%, at least 96%, at least 97%, at least 98% or at least 99% sequence identity to the sequence set forth in SEQ ID NO:8. A recombinant oncolytic virus comprising the nucleic acid sequence of SEQ ID NO: 8 is also referred to herein as VIR41.

[0479] Viral therapies hold great promise for the treatment of human diseases including cancer; however, significant toxic levels from the viruses themselves or from the heterologous gene products they carry still remains a challenge for clinical application of such therapies. Thus, a “safety switch” that allows for selective inactivation of virus replication and propagation in healthy cells upon activation of the “safety switch” but that exhibits strong anti-tumorigenic properties in malignant cells upon infection, although unexpected, would constitute an important improvement to existing methods of treatment not only of cancer, but also of other conditions as well. Provided herein, in various embodiments, are recombinant viruses that upon treatment with Rimiducid, healthy cells infected with said viruses exhibit a significant inhibition of virus replication while cancer cells do not show a significant inhibition of virus-mediated cytotoxicity.

[0480] In particular, as discussed in Example 6, upon induction of iDED with Rimiducid, healthy cells infected with VIR41 exhibited a significant inhibition of virus replication while cancer cells did not show a significant inhibition of virus-mediated cytotoxicity. Therefore, the viruses described herein in various embodiments, and VIR41 particularly, are an improvement to the current methodologies for the treatment of cancer, hyperplasia, tumors, metastasis and other conditions thereof.

[0481] Specifically, in some embodiments, induction of iDED mediated apoptosis in cultures of human primary bronchial/tracheal epithelial cells, human primary mammary epithelial cells, and murine primary mammary epithelial cells, lead to a significant inhibition of virus replication in cells infected with VIR41, indicating that iDED inhibits viral replication in healthy cells (Example 6.A. and FIG. 14). In addition, Rimiducid treatment did not significantly inhibit virus replication in breast, lung, melanoma and microsatellite instable (MSI) colorectal cancer cells infected with VIR41 (Example 6.B) as demonstrated by BT-549 breast cancer cells (FIG. 15A), Hs578T breast cancer cells (FIG. 15B), MCF-7 and 4T1breast cancer cells (FIG. 15C), A549 and M14 lung and melanoma cancer cells (FIG. 15D), HCT-15 MSI colon cancer cells (FIG. 15E), HCT-116 MSI colon cancer cells (FIG. 15F), and KM12 MSI colon cancer cells (FIG. 15G). Therefore, activation of iDED mediated apoptosis in breast, lung, melanoma and MSI colon cancer cells does not inhibit viral replication.

[0482] Microsatellite Stable (MSS) colon cancer is a type of difficult to treat cancer that does not respond to checkpoint inhibitors. As discussed in Example 6 and shown in FIG. 16, MSS colon cells infected with VIR41 responded differently than MSI colon cancer cells upon induction of iDED mediated apoptosis with Rimiducid. Rimiducid treatment significantly inhibited virus replication in MSS colorectal cells infected with VIR41, as demonstrated by COL0205 cancer cells (FIG. 16A), HCC-2998 cancer cells (FIG. 16B), and HT-29 cancer cells (FIG. 16C), indicating iDED mediated apoptosis activation inhibits virus replication in MSS colorectal cancer cells after treatment with Rimiducid, an unexpected finding. Although the exact mechanism is unknown it is likely that MSS colorectal cancer cells contain a relatively intact apoptosis pathway since it is known that MSS colorectal cancer cells have a lot less genomic mutations than MSI colorectal cancer cells. Consistent with this, the cytotoxicity experiments described in FIG. 19 show that VIR41 can kill MSS colorectal cancer cells much better than the control virus VIR13. It may be that the low level of activated iDED in the absence of Rimiducid can cause apoptosis in MSS colorectal cancer cells.

[0483] Moreover, as shown in Example 6, in the absence of Rimiducid, VIR41 also demonstrated unexpected strong oncolytic activity against MSS colorectal cancer. Since MSS colorectal cancer does not respond to immune checkpoint inhibitors, VIR41 is an ideal agent to treat MSS colorectal cancer, in addition to being suitable for use in treating various other types of cancers. In the presence of Rimiducid, the replication of VIR41 is selectively inhibited in healthy cells, but not in cancer cells, as also shown in Example 6. This supports that VIR41 can be used to safely treat cancer patients with severe immune deficiency who are sensitive to infection from vaccinia virus or other types of viruses. In such a situation, VIR41 and Rimiducid can be simultaneously administered into these patients.

[0484] 3. iFas Inducible System

[0485] The Fas receptor (Fas) is a membrane signaling protein that mediates a death signal following its aggregation by the Fas ligand (FasL), a member of the tumor necrosis factor family that initiates apoptosis by activation of caspases and the release of cytochrome c from the mitochondria, that leads to additional caspase activation followed by cellular degradation and death. See Savurma et al., Cell Death & Differentiation volume 10, pages 36-44 (2003).

[0486] Provided herein, in various embodiments, are recombinant viruses including heterologous nucleic acids encoding for an inducible “safety switch” mechanism including an inducible iFas gene fused to F36V-FKBP, a mutated version of human FK506 binding protein (FKBP12) that allows for conditional dimerization of F36V-FKBP upon induction of the system with AP1903, an FDA approved drug for use in humans. See Straathof et al., Blood (2005) 105:11, 4247-4254. Administration of this small molecule results in cross-linking and activation of the proapoptotic fusion molecule iFas (Fas fused to F36V-FKBP). Further details about iFas inducible systems are discussed in Belshaw et al. Chemistry & Biology Sep. 1996, 3:731-738, which is hereby incorporated by reference for all purposes.

[0487] Accordingly, provided herein, in some embodiments, is a recombinant oncolytic virus comprising at least one heterologous nucleic acid encoding one or more heterologous gene product, wherein the one or more heterologous gene product is or comprises an apoptosis-inducible protein. In some embodiments, the apoptosis-inducible protein comprises a proapoptotic molecule fused with an FKBP variant that is able to bind a chemical inducer of dimerization (CID). In some embodiments, the FKBP variant is FKBP-F36V. In some embodiments, the FKBP variant is FKBP-F36V, and the FKBP-F36V comprises the sequence of amino acids set forth in SEQ ID NO: 56. In some embodiments, the chemical inducer of dimerization is AP1903 (Rimiducid). In some embodiments, the proapoptotic molecule is Fas.

[0488] In some embodiments, the apoptosis-inducible protein is an inducible Fas (iFas). In some embodiments, the iFas comprises a proapoptotic molecule fused with an FKBP variant that is able to bind a chemical inducer of dimerization (CID). In some embodiments, the apoptosis-inducible protein is an inducible Fas (iFas) comprising the sequence set forth in SEQ ID NO:28, or is a sequence of amino acids that has at least 85%, 90% or 95% sequence identity to the amino acid sequence of SEQ ID NO:28.

[0489] As such, in some embodiments, the recombinant virus expresses an inducible iFas system. Specifically, in some embodiments, the recombinant viruses comprise an expression cassette containing an inducible Fas (Fas receptor) cDNA molecule under the control of a vaccinia synthetic early promoter PSE inserted into the J2R gene locus. The iFas molecule includes a Fas receptor protein linked to 2 F36V-FKBP, a mutated version of human FK506 binding protein (FKBP12; GenBank AH002 818) that contain an F36V mutation.

[0490] In some embodiments, the recombinant virus comprises a polynucleotide that encodes an Fas molecule linked to 2 F36V-FKBP, wherein the iFas polypeptide comprises an amino acid sequence having at least 90%, 91%, 92%, 93%, 94%, 95%, 95%, 97%, 98%, or 99% sequence identity to the amino acid sequence of SEQ ID NO: 28. In some embodiments, the recombinant virus includes a polypeptide with a sequence of amino acids that has at least 70%, such as at least 75%, 80%, 85% or 90% sequence identity to SEQ ID NO: 28.

[0491] In some embodiments, the recombinant virus comprises a sequence of nucleotides that has at least 91%, 92%, 93%, 94%, 95%, 95%, 97%, 98%, 99%, 99.1%, 99.2%, 99.3%, 99.4%, 99.5%, 99.6%, 99.7%, 99.8%, or 99.9% sequence identity to the nucleic acid sequence of SEQ ID NO: 9, but is less than 100% identical SEQ ID NO: 9. In some embodiments, the recombinant virus comprises the sequence of nucleotides of SEQ ID NO: 9. In some embodiments, the polynucleotide that encodes the iFas molecule is operably linked to the PSE promoter.

[0492] In some embodiments, the recombinant virus, which includes a polynucleotide that encodes an iFas molecule (SEQ ID NO: 28) is derived from the clonal VIP02 (SEQ ID NO: 1) strain and includes a sequence of nucleotides that has at least 70%, such as at least 75%, 80%, 85% or 90% sequence identity to SEQ ID NO: 9 (also named VIR42).

[0493] In some embodiments, the recombinant virus, e.g., recombinant oncolytic virus, comprises an iFas, and the nucleic acid genome of the recombinant oncolytic virus comprises a sequence of nucleotide that has at least 95%, at least 96%, at least 97%, at least 98% or at least 99% sequence identity to the sequence set forth in SEQ ID NO:9. A recombinant oncolytic virus comprising the nucleic acid sequence of SEQ ID NO: 9 is also referred to herein as VIR42.

[0494] In some embodiments, VIR42 exhibits enhanced anti-tumorigenic activity compared to VIR13 after induction with an effective dose of Rimiducid. In some embodiments, VIR42 exhibits less anti-tumorigenic activity compared to VIR13 after induction with an effective dose of Rimiducid. In some embodiments, VIR42 exhibits similar anti-tumorigenic activity compared to VIR13 after induction with an effective dose of Rimiducid.

### IV. Propagation and Production of Viruses

[0495] The clonal virus strains or recombinant virus strains thereof provided herein can be propagated in an appropriate host cell. Such cells can be a group of a single type of cells or a mixture of different types of cells. Host cells can include cultured cell lines primary cells, and proliferative cells. These host cells can include any of a variety of animal cells, such as mammalian, avian and insect cells and tissues that are susceptible to the virus, such as vaccinia virus, infection, including chicken embryo, rabbit, hamster, and monkey kidney cells. Suitable host cells include, but are not limited to, hematopoietic cells (totipotent, stem cells, leukocytes, lymphocytes, monocytes, macrophages, APC, dendritic cells, non-human cells and the like), pulmonary cells, tracheal cells, hepatic cells, epithelial cells, endothelial cells, muscle cells (e.g., skeletal muscle, cardiac muscle or smooth muscle), fibroblasts, and cell lines including, for example, CV-1, BSC40, Vero, and BSC-1, and human HeLa cells. Typically, viruses are propagated in cell lines that can be grown at monolayers or in suspension. For example, exemplary cell lines for the propagation of vaccinia viruses include, but are not limited to, CV-1, BSC40, Vero, BGM, BSC-1 and RK-13 cells. Exemplary cell lines for the propagation of adenovirus include, but are not limited to, HeLa, MK, HEK 293 and HDF cells. Exemplary cell lines for the propagation of herpesviruses include, but are not limited to, WI-38 and HeLa cells. Other cell lines suitable for the propagation of a variety of viruses are well known in the art. Purification of the cultured strain from the system can be effected using standard methods.

[0496] The concentration of virus in a solution, or virus titer, can be determined by a variety of methods known in the art. In some methods, a determination of the number of infectious virus particles is made (typically termed plaque forming units, or PFU), while in other methods, a determination of the total number of viral particles, either infectious or not, is made. Methods that calculate the number of infectious virions include, but are not limited to, the endpoint dilution method, which determines the titer within a certain range, such as one log, and the plaque assay, in which titrations of the virus are grown on cell monolayers and the number of plaques is counted after several days to several weeks. Methods that determine the total number of viral particles, including infectious and non-infectious, include, but are not limited to, immunohistochemical staining methods that utilize antibodies that recognize a viral antigen and which can be visualized by microscopy or FACS™ analysis; optical absorbance, such as at 260 nm; and measurement of viral nucleic acid, such as by PCR, RT-PCR, or quantitation by labeling with a fluorescent dye.

[0497] Once the virus has been purified (or to a desired purity) and the titer has been determined, the virus can be stored in conditions which optimally maintain its infectious integrity. Typically, viruses are stored in the dark, because light serves to inactivate the viruses over time. Viral stability in storage is usually dependent upon temperatures. Although some viruses are thermostable, most viruses are not stable for more than a day at room temperature, exhibiting reduced viability (Newman et al., (2003) J. Inf. Dis. 187:1319-1322). For short-term storage of viruses, for example, 1 day, 2 days, 4 days or 7 days, temperatures of approximately 4° C. are generally recommended. For long-term storage, most viruses can be kept at −20° C., −70° C., or −80° C. When frozen in a simple solution such as PBS or Tris solution (20 mM Tris pH 8.0, 200 NaCl, 2-3% glycerol or sucrose) at these temperatures, the virus can be stable for 6 months to a year, or even longer. Repeated freeze-thaw cycles are generally avoided, however, since it can cause a decrease in viral titer. The virus also can be frozen in media containing other supplements in the storage solution, which can further preserve the integrity of the virus. For example, the addition of serum or bovine serum albumin (BSA) to a viral solution stored at −80° C. can help retain virus viability for longer periods of time and through several freeze-thaw cycles. In other examples, the virus sample is dried for long-term storage at ambient temperatures. Viruses can be dried using various techniques including, but not limited to, freeze-drying, foam-drying, spray-drying and desiccation. Other methods for the storage of viruses at ambient, refrigerated or freezing temperatures are known in the art, and include, but are not limited to, those described in U.S. Pat. Nos. 5,149,653; 6,165,779; 6,255,289; 6,664,099; 6,872,357; and 7,091,030; and in U.S. Pat. Pub. Nos. 2003-0153065 and 2005-0032044.

[0498] Viruses can react differently to each storage method. For example, polio virus is readily degraded at room temperature in aqueous suspension, is stable for only two weeks at 0° C., and is destroyed by lyophilization. For this particular virus, methods of storage typically involve freezing at −70° C. or refrigeration at 4° C. In contrast, vaccinia virus is considered very stable, and can be stored in solution at 4° C., frozen at, for example −20° C., −70° C. or −80° C., or lyophilized with little loss of viability (Newman et al., (2003) J. Inf. Dis. 187:1319-1322, Hruby et al., (1990) Clin. Microb. Rev. 3:153-170). Methods and conditions suitable for the storage of particular viruses are known in the art, and can be used to store the viruses used in the methods presented herein.

[0499] Water is a reactant in nearly all of the destructive pathways that degrade viruses in storage. Further, water acts as a plasticizer, which allows unfolding and aggregation of proteins. Since water is a participant in almost all degradation pathways, reduction of the aqueous solution of viruses to a dry powder provides an alternative formulation methodology to enhance the stability of such samples. Lyophilization, or freeze-drying, is a drying technique used for storing viruses (see, e.g., Cryole et al., (1998) Pharm. Dev. Technol., 3(3), 973-383). There are three stages to freeze-drying: freezing, primary drying, and secondary drying. During these stages, the material is rapidly frozen and dehydrated under high vacuum. Once lyophilized, the dried virus can be stored for long periods of time at ambient temperatures, and reconstituted with an aqueous solution when needed. Various stabilizers can be included in the solution prior to freeze-drying to enhance the preservation of the virus. For example, it is known that high molecular weight structural additives, such as serum, serum albumin or gelatin, aid in preventing viral aggregation during freezing, and provide structural and nutritional support in the lyophilized or dried state. Amino acids such as arginine and glutamate, sugars, such as trehalose, and alcohols such as mannitol, sorbitol and inositol, can enhance the preservation of viral infectivity during lyophilization and in the lyophilized state. When added to the viral solution prior to lyophilization, urea and ascorbic acid can stabilize the hydration state and maintain osmotic balance during the dehydration period. Typically, a relatively constant pH of about 7.0 is maintained throughout lyophilization.

[0500] Immediately prior to use, the virus can be prepared at an appropriate concentration in suitable media, and can be maintained at a cool temperature, such as on ice, until use. If the virus was lyophilized or otherwise dried for storage, then it can be reconstituted in an appropriate aqueous solution. The aqueous solution in which the virus is prepared is typically the medium used in the assay (e.g., DMEM or RPMI) or one that is compatible, such as a buffered saline solution (e.g., PBS, TBS, Hepes solution). For pharmaceutical applications, the virus can be immediately prepared or reconstituted in a pharmaceutical solution. Numerous pharmaceutically acceptable solutions for use are well known in the art (see e.g. Remington's Pharmaceutical Sciences (18th edition) ed. A. Gennaro, 1990, Mack Publishing Co., Easton, Pa.). In one example, the viruses can be diluted in a physiologically acceptable solution, such as sterile saline or sterile buffered saline, with or without an adjuvant or carrier. In other examples, the pharmaceutical solution can contain a component that provides viscosity (e.g. glycerol) and/or component that has bactericidal properties (e.g. phenol). In some examples, the virus is prepared in a relatively concentrated solution so that only a small volume is required in the assay. For example, if 1×106 pfu of virus is being added to tumor cells in a 96 well plate, then the virus can be prepared at a concentration of 1×108 pfu/mL so that only 10 μl is added to each well. The particular concentration can be empirically determined by one of skill in the art depending on the particular application.

[0501] In some embodiments, the recombinant oncolytic virus or the clonal VACV strain, such as any of those provided herein, exhibits enhanced production of extracellular enveloped virions (EEV) after cell infection, optionally as determined by percentage of EEV, wherein the percentage of EEV is determined by the formula: viral titer in supernatant/(viral titer in supernatant+viral titer in cell lysate)*100. Enhanced production can be determined, e.g., in comparison to a normal virus counterpart, wildtype virus counterpart, or unmodified counterpart of the recombinant oncolytic virus, or by having a percentage of at least 5%, 10%, or 15% of infectious particles being EEV.

### V. Pharmaceutical Compositions, Combinations and Kits

[0502] Provided herein are pharmaceutical compositions, combinations and kits containing a virus, e.g., recombinant virus or recombinant oncolytic virus, provided herein. Pharmaceutical compositions can include a virus provided herein and a pharmaceutical carrier. Combinations can include, for example, two or more viruses, a virus and a detectable compound, a virus and a therapeutic compound, a virus and a viral expression modulating compound, or any combination thereof. Kits can include one or more pharmaceutical compositions or combinations provided herein, and one or more components, such as instructions for use, a device for administering the pharmaceutical composition or combination to a subject, a device for administering a therapeutic or diagnostic compound to a subject or a device for detecting a virus in a subject.

[0503] A virus contained in a pharmaceutical composition, combination or kit can include any virus provided herein, including any isolated clonal virus strain described herein, and any virus, e.g., recombinant virus or recombinant oncolytic virus as described in Section III. The pharmaceutical compositions, combinations or kits can include one or more additional viruses that can be selected from a virus provided herein or other therapeutic or diagnostic virus.

[0504] A. Pharmaceutical Compositions

[0505] Provided herein are pharmaceutical compositions containing a virus provided herein and a suitable pharmaceutical carrier. A pharmaceutically acceptable carrier includes a solid, semi-solid or liquid material that acts as a vehicle carrier or medium for the virus. Pharmaceutical compositions provided herein can be formulated in various forms, for example in solid, semi-solid, aqueous, liquid, powder or lyophilized form. Exemplary pharmaceutical compositions containing a virus provided herein include, but are not limited to, sterile injectable solutions, sterile packaged powders, eye drops, tablets, pills, powders, lozenges, sachets, cachets, elixirs, suspensions, emulsions, solutions, syrups, aerosols (as a solid or in a liquid medium), ointments, soft and hard gelatin capsules, and suppositories.

[0506] Examples of suitable pharmaceutical carriers are known in the art and include, but are not limited to, water, buffers, saline solutions, phosphate buffered saline solutions, various types of wetting agents, sterile solutions, alcohols, gum arabic, vegetable oils, benzyl alcohols, gelatin, glycerin, carbohydrates, such as lactose, sucrose, dextrose, amylose or starch, sorbitol, mannitol, magnesium stearate, talc, silicic acid, viscous paraffin, perfume oil, fatty acid monoglycerides and diglycerides, pentaerythritol fatty acid esters, hydroxy methylcellulose, powders, among others. Pharmaceutical compositions provided herein can contain other additives including, for example, antioxidants, preserving agents, analgesic agents, binders, disintegrants, coloring, diluents, excipients, extenders, glidants, solubilizers, stabilizers, tonicity agents, vehicles, viscosity agents, flavoring agents, sweetening agents, emulsions, such as oil/water emulsions, emulsifying and suspending agents, such as acacia, agar, alginic acid, sodium alginate, bentonite, carbomer, carrageenan, carboxymethylcellulose, cellulose, cholesterol, gelatin, hydroxyethyl cellulose, hydroxypropyl cellulose, hydroxypropyl methylcellulose, methylcellulose, octoxynol 9, oleyl alcohol, povidone, propylene glycol monostearate, sodium lauryl sulfate, sorbitan esters, stearyl alcohol, tragacanth, xanthan gum, and derivatives thereof, solvents, and miscellaneous ingredients, such as, but not limited to, crystalline cellulose, microcrystalline cellulose, citric acid, dextrin, liquid glucose, lactic acid, lactose, magnesium chloride, potassium metaphosphate, starch, among others. Such carriers and/or additives can be formulated by conventional methods and can be administered to the subject at a suitable dose. Stabilizing agents such as lipids, nuclease inhibitors, polymers, and chelating agents can preserve the compositions from degradation within the body. Other suitable formulations for use in a pharmaceutical composition can be found, for example, in Remington: The Science and Practice of Pharmacy (2005, Twenty-first edition, Gennaro & Gennaro, eds., Lippencott Williams and Wilkins).

[0507] Pharmaceutical formulations that include a virus provided herein for injection or mucosal delivery typically include aqueous solutions of the virus provided in a suitable buffer for injection or mucosal administration or lyophilized forms of the virus for reconstitution in a suitable buffer for injection or mucosal administration. Such formulations optionally can contain one or more pharmaceutically acceptable carriers and/or additives as described herein or known in the art. Liquid compositions for oral administration generally include aqueous solutions, suitably flavored syrups, aqueous or oil suspensions, and flavored emulsions with edible oils such as corn oil, cottonseed oil, sesame oil, coconut oil, or peanut oil, as well as elixirs and similar pharmaceutical vehicles.

[0508] Pharmaceutical compositions provided herein can be formulated to provide quick, sustained or delayed released of a virus as described herein by employing procedures known in the art. For preparing solid compositions such as tablets, a virus provided herein is mixed with a pharmaceutical carrier to form a solid composition. Optionally, tablets or pills are coated or otherwise compounded to provide a dosage form affording the advantage of prolonged action in the subject. For example, a tablet or pill comprises an inner dosage and an outer dosage component, the latter being in the form of an envelope over the former. The two components can be separated by an enteric layer, for example, which serves to resist disintegration in the stomach and permit the inner component to pass intact into the duodenum or to be delayed in release. A variety of materials are used for such enteric layers or coatings, including, for example, a number of polymeric acids and mixtures of polymeric acids with such materials as shellac, cetyl alcohol, and cellulose acetate.

[0509] Compositions for inhalation or insufflation include solutions and suspensions in pharmaceutically acceptable, aqueous or organic solvents, or mixtures thereof, and powders. These liquid or solid compositions optionally can contain suitable pharmaceutically acceptable excipients and/or additives as described herein or known in the art. Such compositions are administered, for example, by the oral or nasal respiratory route for local or systemic effect. Compositions in pharmaceutically acceptable solvents are nebulized by use of inert gases. Nebulized solutions are inhaled, for example, directly from the nebulizing device, from an attached facemask tent, or from an intermittent positive pressure-breathing machine. Solution, suspension, or powder compositions are administered, orally or nasally, for example, from devices, which deliver the formulation in an appropriate manner such as, for example, use of an inhaler.

[0510] Pharmaceutical compositions provided herein can be formulated for transdermal delivery via transdermal delivery devices (“patches”). Such transdermal patches are used to provide continuous or discontinuous infusion of a virus provided herein. The construction and use of transdermal patches for the delivery of pharmaceutical agents are performed according to methods known in the art. See, for example, U.S. Pat. No. 5,023,252. Such patches are constructed for continuous, pulsatile, or on-demand delivery of a virus provided herein.

[0511] Colloidal dispersion systems that can be used for delivery of viruses include macromolecule complexes, nanocapsules, microspheres, beads and lipid-based systems including oil-in-water emulsions (mixed), micelles, liposomes and lipoplexes. An exemplary colloidal system is a liposome. Organ-specific or cell-specific liposomes can be used in order to achieve delivery only to the desired tissue. The targeting of liposomes can be carried out by the person skilled in the art by applying commonly known methods. This targeting includes passive targeting (utilizing the natural tendency of the liposomes to distribute to cells of the RES in organs which contain sinusoidal capillaries) or active targeting (for example, by coupling the liposome to a specific ligand, for example, an antibody, a receptor, sugar, glycolipid and protein by methods know to those of skill in the art). Monoclonal antibodies can be used to target liposomes to specific tissues, for example, tumor tissue, via specific cell-surface ligands.

[0512] B. Host Cells

[0513] Host cells that contain a virus provided herein are provided. Such cells can be employed in vitro use or in vivo use, for example, as described in the diagnostic or therapeutic methods provided herein. The host cells can be a group of a single type of cells or a mixture of different types of cells. Host cells can include cultured cell lines, primary cells and proliferative cells. The host cells can include any of a variety of animal cells, such as mammalian, avian and insect cells and tissues that are susceptible to infection by the virus, including, but not limited to, human, primate, rodent (e.g. mouse, rate, hamster, or rabbit) and chicken embryo cells. Suitable host cells include, but are not limited to, hematopoietic cells (totipotent, stem cells, leukocytes, lymphocytes, monocytes, macrophages, APC, dendritic cells, non-human cells and the like), pulmonary cells, tracheal cells, hepatic cells, epithelial cells, endothelial cells, muscle cells (e.g., skeletal muscle, cardiac muscle or smooth muscle), fibroblasts, tumor cells and cell lines including, for example, CV-1, BSC40, Vero, BSC40 and BSC-1, and human HeLa cells. Methods for infecting and/or transforming host cells, phenotypically selecting infected cells or transformants, and other such methods are known in the art.

[0514] C. Combinations

[0515] Provided are combinations of a virus provided herein and a second agent, such as a second virus or other therapeutic or diagnostic agent.

[0516] Accordingly, in some embodiments, the methods, e.g., therapeutic methods, provided herein further comprise administering a second therapeutic agent for the treatment of the proliferative disorder.

[0517] In some embodiments, the methods provided herein further comprise another treatment. In some embodiments, the another treatment is selected from among surgery, radiation therapy, immunosuppressive therapy and administration of an anticancer agent. In some embodiments, the another (further) treatment is administration of an anticancer agent selected from among a cytokine, a chemokine, a growth factor, a photosensitizing agent, a toxin, an anti-cancer antibiotic, a chemotherapeutic compound, a radionuclide, an angiogenesis inhibitor, a signaling modulator, an anti-metabolite, an anti-cancer vaccine, an anti-cancer oligopeptide, a mitosis inhibitor protein, an antimitotic oligopeptide, an anticancer antibody, an anti-cancer antibiotic, or an immunotherapeutic agent, and a combination of any of the preceding thereof.

[0518] A combination can include a virus provided herein with one or more additional viruses, including, for example, one or more additional diagnostic or therapeutic viruses. A combination can contain pharmaceutical compositions containing a virus provided herein or host cells containing a virus as described herein. A combination can also include any virus or reagent for effecting the anti-tumorigenic and toxicity reducing activities described herein in accordance with the methods provided herein. Combinations can also contain a compound used for the modulation of gene expression from endogenous or heterologous genes encoded by the virus. Combinations can also contain a compound used for the modulation of protein activation such as compounds that can induce protein multimerization including AP1903 and AP20187.

[0519] Combinations provided herein can contain a virus and a therapeutic compound. Therapeutic compounds for the compositions provided herein can be, for example, an anti-cancer or chemotherapeutic agent or compound. Exemplary therapeutic agents or compounds include, for example, cytokines, growth factors, photosensitizing agents, radionuclides, toxins, siRNA molecules, enzyme/prodrug pairs, anti-metabolites, signaling modulators, anti-cancer antibiotics, anti-cancer antibodies, checkpoint inhibitors (e.g. as anti-programmed death 1 (PD-1) receptor and anti-programmed death ligand 1 (PD-L1)/L2 inhibitors), angiogenesis inhibitors, chemotherapeutic compounds, antimetastatic compounds or a combination of any thereof. Viruses provided herein can be combined with an anti-cancer compound, such as a platinum coordination complex. Exemplary platinum coordination complexes include, for example, cisplatin, carboplatin, oxaliplatin, DWA2114R, NK121, IS 3 295, and 254-S. Exemplary chemotherapeutic agents also include, but are not limited to, methotrexate, vincristine, adriamycin, non-sugar containing chloroethylnitrosoureas, 5-fluorouracil, mitomycin C, bleomycin, doxorubicin, dacarbazine, Taxol®, fragyline, Meglumine GLA, valrubicin, carmustine, polifeprosan, MM1270, BAY 12-9566, RAS farnesyl transferase inhibitor, farnesyl transferase inhibitor, MMP, MTA/LY231514, lometrexol/LY264618, Glamolec, CI-994, TNP-470, Hycamtin®/topotecan, PKC412, Valspodar/PSC833, Novantrone®/mitoxantrone, Metaret®/suramin, BB-94/batimastat, E7070, BCH-4556, CS-682, 9-AC, AG3340, AG3433, Incel™/VX-710, VX-853, ZD0101, IS1641, ODN 698, TA 2516/marimastat, BB2516/marimastat, CDP 845, D2163, PD183805, DX8951f, Lemonal DP 2202, FK 317, picibanil/OK-432, valrubicin/AD 32, strontium-89/Metastron®, Temodal®/temozolomide, Yewtaxan/paclitaxel, Taxol®/paclitaxel, Paxex/paclitaxel, Cyclopax/oral paclitaxel, Xeloda®/capecitabine, Furtulon™/doxifluridine, oral taxoids, SPU-077/cisplatin, HMR 1275/flavopiridol, CP-358 (774)/EGFR, CP-609 (754)/RAS oncogene inhibitor, BMS-182751/oral platinum, UFT(Tegafur/Uracil), Ergamisol®/levamisole, Campto®/levamisole, Eniluraci1/776C85/5FU enhancer, Camptosar®/irinotecan, Tomudex®/raltitrexed, Leustatin®/cladribine, Caelyx®/liposomal doxorubicin, Myocetliposomal doxorubicin, Doxilliposomal doxorubicin, Evacet™/liposomal doxorubicin, Fludara®/fludarabine, Pharmorubicinepirubicin, DepoCyt®, ZD1839, LU 79553/Bis-Naphthalimide, LU 103793/Dolastain, Gemzar®/gemcitabine, ZD 0473/Anormed, YM 116, Iodine seeds, CDK4 and CDK2 inhibitors, PARP inhibitors, D4809/dexifosfamide, Ifex®/Mesnex®/ifosfamide, Vumon®/teniposide, Paraplatin®/carboplatin, Platinol®/cisplatin, VePesid®/Eposin®/Etopophos®/etoposide, ZD 9331, Taxotere®/docetaxel, prodrugs of guanine arabinoside, taxane analogs, nitrosoureas, alkylating agents such as melphalan and cyclophosphamide, aminoglutethimide, asparaginase, busulfan, carboplatin, chlorambucil, cytarabine HCl, dactinomycin, daunorubicin HCl, estramustine phosphate sodium, etoposide (VP16-213), floxuridine, fluorouracil (5-FU), flutamide, hydroxyurea (hydroxycarbamide), ifosfamide, interferon alfa-2a, interferon alfa-2b, leuprolide acetate (LHRH-releasing factor analogue), lomustine (CCNU), mechlorethamine HCl (nitrogen mustard), mercaptopurine, mesna, mitotane (o,p′-DDD), mitoxantrone HCl, octreotide, plicamycin, procarbazine HCl, streptozocin, tamoxifen citrate, thioguanine, thiotepa, vinblastine sulfate, amsacrine (m-AMSA), azacitidine, erythropoietin, hexamethylmelamine (HMM), interleukin 2, mitoguazone (methyl-GAG; methyl glyoxal bis-guanylhydrazone; MGBG), pentostatin (2′deoxycoformycin), semustine (methyl-CCNU), teniposide (VM-26) and vindesine sulfate. Additional exemplary therapeutic compounds for the use in pharmaceutical compositions and combinations provided herein can be found elsewhere herein (see e.g., Section I for exemplary cytokines, growth factors, photosensitizing agents, radionuclides, toxins, siRNA molecules, enzyme/pro-drug pairs, anti-metabolites, signaling modulators, anti-cancer antibiotics, anti-cancer antibodies, angiogenesis inhibitors, and chemotherapeutic compounds).

[0520] In some examples, the combination can include additional therapeutic agents or compounds such as, for example, agents or compounds that are substrates for enzymes encoded and expressed by the virus, or other therapeutic compounds provided herein or known in the art to act in concert with a virus. For example, the virus can express an enzyme that converts a prodrug into an active chemotherapy drug for killing the cancer cell. Hence, combinations provided herein can contain a therapeutic agent or compound, such as a prodrug. An exemplary virus/therapeutic agent or compound combination can include a virus encoding Herpes simplex virus thymidine kinase with the prodrug ganciclovir. Additional exemplary enzyme/pro-drug pairs, for the use in combinations provided include, but are not limited to, varicella zoster thymidine kinase/ganciclovir, cytosine deaminase/5-fluorouracil, purine nucleoside phosphorylase/6-methylpurine deoxyriboside, beta lactamase/cephalosporin-doxorubicin, carboxypeptidase G2/4-[(2-chloroethyl)(2-mesyloxyethypamino]benzoyl-L-glutamic acid, cytochrome P450/acetominophen, horseradish peroxidase/indole-3-acetic acid, nitroreductase/C B1954, rabbit carboxylesterase/7-ethyl-10-[4-(1-piperidino)-1-piperidino]carbonyloxycamptothecin (CPT-11), mushroom tyrosinase/bis-(2-chloroethyl)amino-4-hydroxyphenylaminomethanone 28, beta galactosidase/1-chloromethyl-5-hydroxy-1,2-dihydro-3H-benz[e]indole, beta glucuronidase/epirubicin-glucuronide, thymidine phosphorylase/5′-deoxy-5-fluorouridine, deoxycytidine kinase/cytosine arabinoside, beta-lactamase and linamerase/linamarin Additional exemplary prodrugs, for the use in combinations can also be found elsewhere herein (see, e.g., Section I). Any of a variety of known combinations provided herein or otherwise known in the art can be included in the combinations provided herein.

[0521] In some examples, the combination can include agents or compounds that can kill or inhibit viral growth or toxicity. Such agents or compounds can be used to alleviate one or more adverse side effects that can result from viral infection (see, e.g. U.S. Patent Pub. No. US 2009-016228-A1). Combinations provided herein can contain antibiotic, antifungal, anti-parasitic or antiviral compounds for treatment of infections. In some examples, the antiviral compound is a chemotherapeutic agent that inhibits viral growth or toxicity. Exemplary antibiotics which can be included in a combination with a virus provided herein include, but are not limited to, ceftazidime, cefepime, imipenem, aminoglycoside, vancomycin and antipseudomonal β-lactam. Exemplary antifungal agents which can be included in a combination with a virus provided herein include, but are not limited to, amphotericin B, dapsone, fluconazole, flucytosine, griseofulvin, itraconazole, ketoconazole, miconazole, clotrimazole, nystatin, and combinations thereof. Exemplary antiviral agents can be included in a combination with a virus provided herein include, but are not limited to, cidofovir, alkoxyalkyl esters of cidofovir (CDV), cyclic CDV, and (S)-9-(3-hydroxy-2 phosphonylmethoxypropyl)adenine, 5-(dimethoxymethyl)-2′-deoxyuridine, isatin-beta-thiosemicarbazone, N-methanocarbathymidine, brivudine, 7-deazaneplanocin A, ST-246, Gleevec®, 2′-beta-fluoro-2′,3′-dideoxyadenosine, indinavir, nelfinavir, ritonavir, nevirapine, AZT, ddI, ddC, and combinations thereof. Typically, combinations with an antiviral agent contain an antiviral agent known to be effective against the virus of the combination. For example, combinations can contain a vaccinia virus with an antiviral compound, such as cidofovir, alkoxyalkyl esters of cidofovir, ganciclovir, acyclovir, ST-246, Gleevec®, and derivatives thereof.

[0522] In some examples, the combination can include a detectable compound. A detectable compound can include, for example, a ligand, substrate or other compound that can interact with and/or bind specifically to a protein or RNA encoded and expressed by the virus, and can provide a detectable signal, such as a signal detectable by tomographic, spectroscopic, magnetic resonance, or other known techniques. In some examples, the protein or RNA is an exogenous protein or RNA. In some examples, the protein or RNA expressed by the virus modifies the detectable compound where the modified compound emits a detectable signal. Exemplary detectable compounds can be, or can contain, an imaging agent such as a magnetic resonance, ultrasound or tomographic imaging agent, including a radionuclide. The detectable compound can include any of a variety of compounds as provided elsewhere herein or are otherwise known in the art. Exemplary proteins that can be expressed by the virus and a detectable compound combinations employed for detection include, but are not limited to luciferase and luciferin, β-galactosidase and (4,7,10-tri(acetic acid)-1-(2-β-galactopyranosylethoxy)-1,4,7,10-tetraazacyclododecane) gadolinium (Egad), and other combinations known in the art.

[0523] In some examples, the combination can include a gene expression modulating compound that regulates expression of one or more genes encoded by the virus. Compounds that modulate gene expression are known in the art, and include, but are not limited to, transcriptional activators, inducers, transcriptional suppressors, RNA polymerase inhibitors and RNA binding compounds such as siRNA or ribozymes. Any of a variety of gene expression modulating compounds known in the art can be included in the combinations provided herein. Typically, the gene expression modulating compound included with a virus in the combinations provided herein will be a compound that can bind, inhibit or react with one or more compounds, active in gene expression such as a transcription factor or RNA of the virus of the combination. An exemplary virus/expression modulator combinations can be a virus encoding a chimeric transcription factor complex having a mutant human progesterone receptor fused to a yeast GAL4 DNA-binding domain an activation domain of the herpes simplex virus protein VP16 and also containing a synthetic promoter containing a series of GAL4 recognition sequences upstream of the adenovirus major late E1B TATA box, where the compound can be RU486 (see, e.g., Yu et al., (2002) Mol Genet Genomics 268:169-178). A variety of other virus/expression modulator combinations known in the art also can be included in the combinations provided herein.

[0524] In some examples, the combination can contain nanoparticles. Nanoparticles can be designed such that they carry one or more therapeutic agents provided herein. Additionally, nanoparticles can be designed to carry a molecule that targets the nanoparticle to the tumor cells. In one non-limiting example, nanoparticles can be coated with a radionuclide and, optionally, an antibody immunoreactive with a tumor-associated antigen.

[0525] In some examples, the combination can contain one or more additional therapeutic and/or diagnostic viruses or other therapeutic and/or diagnostic microorganism (e.g. therapeutic and/or diagnostic bacteria) for diagnosis or treatment. Exemplary therapeutic and/or diagnostic viruses are known in the art and include, but are not limited to, therapeutic and/or diagnostic poxviruses, herpesviruses, adenoviruses, adeno-associated viruses, and reoviruses.

[0526] D. Kits

[0527] The viruses, cells, pharmaceutical compositions or combinations provided herein can be packaged as kits. Kits can optionally include one or more components such as instructions for use, devices and additional reagents, and components, such as tubes, containers and syringes for practice of the methods. Exemplary kits can include any virus provided herein, and can optionally include instructions for use, a device for detecting a virus in a subject, a device for administering the virus to a subject, or a device for administering an additional agent or compound to a subject.

[0528] In one example, a kit can contain instructions. Instructions typically include a tangible expression describing the virus and, optionally, other components included in the kit, and methods for administration, including methods for determining the proper state of the subject, the proper dosage amount, and the proper administration method, for administering the virus. Instructions can also include guidance for monitoring the subject over the duration of the treatment time.

[0529] In another example, a kit can contain a device for detecting a virus in a subject. Devices for detecting a virus in a subject can include a low light imaging device for detecting light, for example, emitted from luciferase, or fluoresced from fluorescent protein, such as a green or red fluorescent protein, a magnetic resonance measuring device such as an MRI or NMR device, a tomographic scanner, such as a PET, CT, CAT, SPECT or other related scanner, an ultrasound device, or other device that can be used to detect a protein expressed by the virus within the subject. Typically, the device of the kit will be able to detect one or more proteins expressed by the virus of the kit. Any of a variety of kits containing viruses and detection devices can be included in the kits provided herein, for example, a virus expressing luciferase and a low light imager or a virus expressing fluorescent protein, such as a green or red fluorescent protein, and a low light imager.

[0530] Kits provided herein also can include a device for administering a virus to a subject. Any of a variety of devices known in the art for administering medications, pharmaceutical compositions and vaccines can be included in the kits provided herein. Exemplary devices include, but are not limited to, a hypodermic needle, an intravenous needle, a catheter, a needle-less injection device, an inhaler and a liquid dispenser, such as an eyedropper. For example, a virus to be delivered systemically, for example, by intravenous injection, can be included in a kit with a hypodermic needle and syringe. Typically, the device for administering a virus of the kit will be compatible with the virus of the kit; for example, a needle-less injection device such as a high-pressure injection device can be included in kits with viruses not damaged by high-pressure injection, but is typically not included in kits with viruses damaged by high-pressure injection.

[0531] Kits provided herein can also include a device for administering an additional agent or compound to a subject. Any of a variety of devices known in the art for administering medications to a subject can be included in the kits provided herein. Exemplary devices include, but are not limited to, a hypodermic needle, an intravenous needle, a catheter, a needle-less injection device, an inhaler and a liquid dispenser, such as an eyedropper. Typically, the device for administering the compound of the kit will be compatible with the desired method of administration of the compound. For example, a compound to be delivered systemically or subcutaneously can be included in a kit with a hypodermic needle and syringe.

### VI. Therapeutic, Diagnostic and Monitoring Methods

[0532] The viruses provided herein, including the clonal virus strains and the recombinant viral strains provided herein, can be used in diagnostic, monitoring, and therapeutic methods. For example, in therapeutic methods the viruses provided herein, including the clonal virus strains and recombinant viral strains, can be used for the treatment of proliferative disorders or conditions, including the treatment of cancerous cells, hyperplasia, neoplasms, tumors, metastases and other immunoprivileged cells or tissues, such as wounded or inflamed tissues. The viruses provided herein, including the clonal virus strains and the recombinant viral strains provided herein, can be used in diagnostic methods for detecting and imaging of cancerous cells, hyperplasia, tumors and metastases monitoring treatment. In other examples, the viruses provided herein, including the clonal virus strains and recombinant strains, can be used in diagnostic or monitoring methods to detect virus activity in the host. The diagnostic and therapeutic methods provided herein include, but are not limited to, administering a virus provided herein to a subject containing a tumor, an hyperplasia, a cancer, and/or metastases. In other examples, the viruses provided herein, including the clonal virus strains and the recombinant viral strains provided herein, can be used as vaccines in vaccination methods.

[0533] The administered viruses possess one or more characteristics including attenuated pathogenicity, low toxicity, enhanced anti-tumorigenicity, preferential accumulation in tumors, ability to activate an immune response against tumor cells, replication competence, ability to express additional exogenous diagnostic and/or therapeutic genes, ability to inhibit tumor, hyperplasia, metastasis and/or cancer in a subject, ability to induce apoptosis in an infected cell and/or subject, ability to avoid the host's complement, ability to avoid the immunogenic response from a subject, and ability to enhance a subject's immune response against an hyperplasia, tumor, cancer and/or metastasis. The viruses can be administered for diagnosis, monitoring, such as monitoring therapy, and/or therapy of subjects, such as, but not limited to humans and other mammals, including, but not limited to, rodents, dogs, cats, primates and livestock. The viruses provided herein can be used or modified for use in any known methods (or uses) in which viruses have been employed or can be employed. Any virus, including the VIP02, VIR11, VIR13, VIR 25, VIR27, VIR37, VIR40, VIR41, VIR42, VIR46, VIR49, VIR52, VIR57, VIR71, VIR86, VIR93, VIR94, VIR96, VIR100, VIR10³, VIR105, VIR106, VIR109, VIR111, VIR113, VIR114, VIR115, VIR123, VIR127, and/or VIR128 viruses and derivatives thereof, including a virus comprising a nucleic acid sequence having at least 95%, 96%, 97%, 98%, 99%, 99.1%, 99.2%, 99.3%, 99.4%, 99.5%, 99.6%, 99.7%, 99.8%, or 99.9% sequence identity to the genomic sequence of virus selected from the group consisting of VIP02, VIR11, VIR13, VIR 25, VIR27, VIR37, VIR40, VIR41, VIR42, VIR46, VIR49, VIR52, VIR57, VIR71, VIR86, VIR93, VIR94, VIR96, VIR100, VIR10³, VIR105, VIR106, VIR109, VIR111, VIR113, VIR114, VIR115, VIR123, VIR127, and/or VIR128 can be used and/or modified for use in the therapeutic and diagnostic methods described below and discussed throughout the disclosure herein.

[0534] A. Therapeutic Methods

[0535] The viruses provided herein, including the clonal virus strains and the recombinant viral strains provided herein, including any of the viruses, e.g., recombinant viruses or recombinant oncolytic viruses as described in Section III, for example, can be used for the treatment of proliferative disorders or conditions, including the treatment (such as inhibition) of cancerous cells, hyperplasia, neoplasms, tumors, metastases, cancer stem cells, and other immunoprivileged cells or tissues, such as wounded or inflamed tissues.

[0536] Accordingly, provided herein, in some embodiments, is a method of treating a proliferative disorder in a subject, comprising administering to the subject a virus, e.g., a recombinant virus or a recombinant oncolytic virus or an oncolytic virus, as described herein.

[0537] Also provided herein, in some embodiments, is a method of treating a proliferative disorder in a subject, comprising administering to the subject any composition, e.g., any of the pharmaceutical compositions, as described herein.

[0538] Also provided herein is a method of inhibiting virus replication, the method comprising contacting cells infected with a virus, e.g., a recombinant oncolytic virus, with AP1903 (Rimiducid), wherein the recombinant oncolytic virus comprises a heterologous nucleic acid encoding an apoptosis inducible protein. Also provided herein is a method of inhibiting virus replication in a subject, the method comprising administering to a subject AP1903 (Rimiducid), wherein the subject has been previously administered a recombinant oncolytic virus comprising a heterologous nucleic acid encoding an apoptosis inducible protein. The apoptosis-inducible protein can be any apoptosis-inducible protein as described herein, e.g., as described in Section III(D). In some embodiments, the contacting occurs in vivo in a subject, wherein the AP1903 (Rimiducid) has been administered to a subject previously administered with a recombinant oncolytic virus comprising the heterologous nucleic acid encoding an apoptosis inducible protein.

[0539] In some embodiments, the viruses provided herein preferentially accumulate in tumors or metastases. In some embodiments, the method inhibits virus replication preferentially in non-cancer cells. In some embodiments, the administration of a virus provided herein results in a slowing of tumor growth, without significantly affecting healthy, non-cancerous, and/or normal cells. In other embodiments, the administration of a virus provided herein results in a decrease in tumor volume without significantly affecting healthy, non-cancerous, and/or normal cells, including elimination or eradication of the tumor. The therapeutic methods and uses provided herein, however, do not require the administered virus to kill tumor cells or decrease the tumor size. Instead, the methods provided herein include, in some embodiments, administering to a subject a virus provided herein that can cause or enhance an anti-tumor immune response in the subject without significantly affecting healthy, non-cancerous, and/or normal cells. In some embodiments, the viruses provided herein can be administered to a subject without causing viral-induced disease in the subject. In some embodiments, the viruses provided herein can be administered to a subject without causing viral-induced disease in the subject, for example, without significantly affecting healthy, non-cancerous, and/or normal cells. In some embodiments, the viruses can elicit an anti-tumor immune response in the subject, without significantly affecting healthy, non-cancerous, and/or normal cells, where typically the viral-mediated anti-tumor immune response can develop, for example, over several days, a week or more, 10 days or more, two weeks or more, or a month or more. In some exemplary methods, the virus can be present in the tumor, and can cause an anti-tumor immune response without the virus itself causing enough tumor cell death to prevent tumor growth. In some embodiments, the tumor is a monotherapeutic tumor or monotherapeutic cancer, where the tumor or cancer does not decrease in volume when treated with the virus or a therapeutic agent alone.

[0540] In some examples, the therapeutic methods provided herein inhibit tumor growth in a subject, without significantly affecting healthy, non-cancerous, and/or normal cells, where the methods include administering to a subject a virus that can accumulate in a tumor and/or metastasis, and can cause or enhance an anti-tumor immune response. The anti-tumor immune response induced as a result of tumor or metastases-accumulated viruses can result in inhibition of tumor growth.

[0541] In some embodiments, the therapeutic methods provided herein inhibit growth or formation of a metastases in a subject, without significantly affecting healthy, non-cancerous, and/or normal cells, where the methods include administering to a subject a virus provided herein that can accumulate in a tumor and/or metastasis, and can cause or enhance an anti-tumor immune response. The anti-tumor immune response induced as a result of tumor or metastasis-accumulated viruses can result in inhibition of metastasis growth or formation.

[0542] In other embodiments, the therapeutic methods provided herein decrease the size of a tumor and/or metastasis in a subject, without significantly affecting healthy, non-cancerous, and/or normal cells, where the methods include administering to a subject a virus provided herein that can accumulate in a tumor and/or metastasis, and can cause or enhance an anti-tumor immune response. The anti-tumor immune response induced as a result of tumor or metastasis-accumulated viruses can result in a decrease in the size of the tumor and/or metastasis.

[0543] In some embodiments, the therapeutic methods provided herein eliminate a tumor and/or metastasis from a subject, without significantly affecting healthy, non-cancerous, and/or normal cells, where the methods include administering to a subject a virus provided herein that can accumulate in a tumor and/or metastasis, and can cause or enhance an anti-tumor immune response. The anti-tumor immune response induced as a result of tumor or metastasis-accumulated viruses can result in elimination of the tumor and/or metastasis from the subject. In some examples, the therapeutic methods provided herein induce apoptosis in a tumor, cancer, hyperplasia, and or metastasis in a subject, without significantly affecting healthy, non-cancerous, and/or normal cells, where the methods include administering to a subject a virus that can accumulate in a tumor, cancer, hyperplasia, and or metastasis, and can cause or enhance apoptosis. The increased apoptosis induced as a result of tumor or metastases-accumulated viruses can result in inhibition of tumor growth. In some embodiments, the therapeutic methods provided herein induce apoptosis in a tumor, cancer, hyperplasia, and or metastasis in a subject, without significantly affecting healthy, non-cancerous, and/or normal cells, where the methods include administering to a subject a virus that can accumulate in a tumor, cancer, hyperplasia, and or metastasis, and can cause or enhance apoptosis. The increased apoptosis induced as a result of tumor or metastases-accumulated viruses can result in inhibition of metastasis growth or formation. In some examples, the therapeutic methods provided herein induce apoptosis in a tumor, cancer, hyperplasia, and or metastasis in a subject, without significantly affecting healthy, non-cancerous, and/or normal cells, where the methods include administering to a subject a virus that can accumulate in a tumor, cancer, hyperplasia, and or metastasis, and can cause or enhance apoptosis. The increased apoptosis induced as a result of tumor or metastases-accumulated viruses can result in decrease in the size of the tumor and/or metastasis.

[0544] In some embodiments, the therapeutic methods provided herein inhibits angiogenesis in a tumor, cancer, hyperplasia, and or metastasis in a subject, without significantly affecting healthy, non-cancerous, and/or normal cells, where the methods include administering to a subject a virus that can accumulate in a tumor, cancer, hyperplasia, and or metastasis, and can cause or inhibit angiogenesis. The reduced angiogenesis induced as a result of tumor or metastases-accumulated viruses can result in inhibition of tumor growth. In some examples, the therapeutic methods provided herein inhibit angiogenesis in a tumor, cancer, hyperplasia, and or metastasis in a subject, without significantly affecting healthy, non-cancerous, and/or normal cells, where the methods include administering to a subject a virus that can accumulate in a tumor, cancer, hyperplasia, and or metastasis, and can inhibit angiogenesis. The reduced angiogenesis induced as a result of tumor or metastases-accumulated viruses can result in inhibition of metastasis growth or formation. In some embodiments, the therapeutic methods provided herein inhibit angiogenesis in a tumor, cancer, hyperplasia, and or metastasis in a subject, without significantly affecting healthy, non-cancerous, and/or normal cells, where the methods include administering to a subject a virus that can accumulate in a tumor, cancer, hyperplasia, and or metastasis, and can inhibit angiogenesis. The reduced angiogenesis induced as a result of tumor or metastases-accumulated viruses can result in decrease in the size of the tumor and/or metastasis.

[0545] In some embodiments, the therapeutic methods provided herein enhance the immune response against a tumor, cancer, hyperplasia, and or metastasis in a subject, without significantly affecting healthy, non-cancerous, and/or normal cells, where the methods include administering to a subject a virus that can accumulate in a tumor, cancer, hyperplasia, and or metastasis, and can cause or enhance an immune response. The enhanced immune response induced as a result of tumor or metastases-accumulated viruses can result in inhibition of tumor growth. In some examples, the therapeutic methods provided herein enhance the immune response against a tumor, cancer, hyperplasia, and or metastasis in a subject, without significantly affecting healthy, non-cancerous, and/or normal cells, where the methods include administering to a subject a virus that can accumulate in a tumor, cancer, hyperplasia, and or metastasis, and can cause or enhance an immune response. The enhanced immune response induced as a result of tumor or metastases-accumulated viruses can result in inhibition of metastasis growth or formation. In some examples, the therapeutic methods provided herein enhance the immune response against a tumor, cancer, hyperplasia, and or metastasis in a subject, without significantly affecting healthy, non-cancerous, and/or normal cells, where the methods include administering to a subject a virus that can accumulate in a tumor, cancer, hyperplasia, and or metastasis, and can cause or enhance an immune response. The enhanced immune response induced as a result of tumor or metastases-accumulated viruses can result in decrease in the size of the tumor and/or metastasis. In some embodiments, the therapeutic methods provided herein enhance the immune response against a tumor, cancer, hyperplasia, and or metastasis in a subject, without significantly affecting healthy, non-cancerous, and/or normal cells, where the methods include administering to a subject a virus that can accumulate in a tumor, cancer, hyperplasia, and or metastasis, and can cause or enhance an immune response. The enhanced immune response induced as a result of tumor or metastases-accumulated viruses can result in elimination of the tumor and/or metastasis from the subject.

[0546] In some embodiments, the therapeutic methods provided herein reduce virus toxicity to healthy cells while effecting a toxic and/or anti-tumorigenic effect in a tumor and/or metastasis from a subject, where the methods include administering to a subject a virus provided herein that can accumulate in a tumor and/or metastasis, and can cause or enhance an anti-tumor immune response. The anti-tumor immune response induced as a result of tumor or metastasis-accumulated viruses can result in elimination of the tumor and/or metastasis from the subject without significantly affecting non-cancerous, healthy, and/or normal cells.

[0547] Methods of reducing or inhibiting tumor growth, inhibiting metastasis growth and/or formation, decreasing the size of a tumor or metastasis, eliminating a tumor or metastasis and/or cancer stem cell, without significantly affecting healthy, non-cancerous, and/or normal cells, or other tumor therapeutic methods provided herein include causing or enhancing an anti-tumor immune response, inducing apoptosis, and/or inhibiting angiogenesis in the host without significantly affecting healthy, non-cancerous, and/or normal cells in the host. The immune response of the host, being anti-tumor in nature, can be mounted against tumors and/or metastases in which viruses have accumulated, and can also be mounted against tumors and/or metastases in which viruses have not accumulated, including tumors and/or metastases that form after administration of the virus to the subject. Accordingly, a tumor and/or metastasis whose growth or formation is inhibited, or whose size is decreased, or that is eliminated, can be a tumor and/or metastasis in which the viruses have accumulated, or can also be a tumor and/or metastasis in which the viruses have not accumulated. Accordingly, provided herein are methods of reducing or inhibiting tumor growth, inhibiting metastasis growth and/or formation, decreasing the size of a tumor or metastasis, eliminating a tumor or metastasis, without significantly affecting healthy, non-cancerous, and/or normal cells, or other tumor therapeutic methods provided herein include causing or enhancing an anti-tumor immune response, inducing apoptosis, and/or inhibiting angiogenesis in the host without significantly affecting healthy, non-cancerous, and/or normal cells in the host, where the method includes administering to a subject a virus provided herein, where the virus accumulates in at least one tumor or metastasis and causes or enhances an anti-tumor immune response in the subject, and the immune response is also mounted against a tumor and/or metastasis in which the virus cell did not accumulate. In another embodiments, methods are provided for inhibiting or preventing recurrence of a neoplastic disease or inhibiting or preventing new tumor growth, where the methods include administering to a subject a virus provided herein that can accumulate in a tumor and/or metastasis, and can cause or enhance an anti-tumor immune response, and the anti-tumor immune response can inhibit or prevent recurrence of a neoplastic disease or inhibit or prevent new tumor growth.

[0548] The tumor or neoplastic disease therapeutic methods provided herein, such as methods of reducing or inhibiting tumor growth, inhibiting metastasis growth and/or formation, decreasing the size of a tumor or metastasis, eliminating a tumor or metastasis, without significantly affecting healthy, non-cancerous, and/or normal cells, or other tumor therapeutic methods provided herein include causing or enhancing an anti-tumor immune response, inducing apoptosis, avoiding host's complement, and/or inhibiting angiogenesis in the host without significantly affecting healthy, non-cancerous, and/or normal cells in the host, can also include administering to a subject a virus provided herein that can cause tumor cell lysis or tumor cell death, including cell suicide by apoptosis. Such a virus can be the same virus as the virus that can cause or enhance an anti-tumor immune response in the subject. Viruses, such as the viruses provided herein, can cause cell lysis or tumor cell death as a result of expression of an endogenous gene or as a result of an exogenous gene. Endogenous or exogenous genes can cause tumor cell lysis or inhibit cell growth as a result of direct or indirect actions, as is known in the art, including lytic channel formation or activation of an apoptotic pathway. Gene products, such as exogenous gene products can function to activate a prodrug to an active, cytotoxic form, resulting in cell death where such genes are expressed.

[0549] Such methods of tumor and/or metastasis treatment can include administration of a virus provided herein for therapy, such as for gene therapy, for cancer gene therapy, or for vaccine therapy. Such a virus can be used to stimulate humoral and/or cellular immune response, induce strong cytotoxic T lymphocytes responses in subjects who can benefit from such responses. For example, the virus can provide prophylactic and therapeutic effects against a tumor infected by the virus or other infectious diseases, by rejection of cells from tumors or lesions using viruses that express immunoreactive antigens (Earl et al., Science 234: 728-831 (1986); Lathe et al., Nature (London) 32: 878-880 (1987)), cellular tumor-associated antigens (Bernards et al., Proc. Natl. Acad. Sci. USA 84: 6854-6858 (1987); Estin et al., Proc. Natl. Acad. Sci. USA 85: 1052-1056 (1988); Kantor et al., J. Natl. Cancer Inst. 84: 1084-1091 (1992); Roth et al., Proc. Natl. Acad. Sci. USA 93: 4781-4786 (1996)) and/or cytokines (e.g., IL-2, IL-12), costimulatory molecules (B7-1, B7-2) (Rao et al., J. Immunol. 156: 3357-3365 (1996); Chamberlain et al., Cancer Res. 56: 2832-2836 (1996); Oertli et al., J. Gen. Virol. 77: 3121-3125 (1996); Qin and Chatterjee, Human Gene Ther. 7: 1853-1860 (1996); McAneny et al., Ann. Surg. Onco1.3: 495-500 (1996)), or other therapeutic proteins.

[0550] As shown previously, solid tumors can be treated with viruses, such as vaccinia viruses, resulting in an enormous tumor-specific virus replication, which can lead to tumor protein antigen and viral protein production in the tumors (U.S. Patent Publication No. 2005-0031643, now U.S. Pat. Nos. 7,588,767, 7,588,771, 7,662,398), which provide and exemplify the GLV-1h68 virus and derivatives thereof. Vaccinia virus administration to mice resulted in lysis of the infected tumor cells and a resultant release of tumor-cell-specific antigens. Continuous leakage of these antigens into the body led to a very high level of antibody titer (in approximately 7-14 days) against tumor proteins, viral proteins, and the virus encoded engineered proteins in the mice. The newly synthesized anti-tumor antibodies and the enhanced macrophage, neutrophils count were continuously delivered via the vasculature to the tumor and thereby provided for the recruitment of an activated immune system against the tumor. The activated immune system then eliminated the foreign compounds of the tumor including the viral particles. This interconnected release of foreign antigens boosted antibody production and continuous response of the antibodies against the tumor proteins to function like an autoimmunizing vaccination system initiated by vaccinia viral infection and replication, followed by cell lysis, protein leakage and enhanced antibody production. Thus, the viruses provided herein and the viruses generated using the methods provided herein can be administered in a complete process that can be applied to all tumor systems with immunoprivileged tumor sites as site of privileged viral growth, which can lead to tumor elimination by the host's own immune system.

[0551] In some embodiments, the proliferative disorder is a tumor or a metastasis. In some embodiments, the proliferative disorder is a cancer. The cancer is not limited in this respect, and other metastatic diseases can be treated by the combinations provided herein. In some embodiments, the tumor or metastasis treated can be a solid tumor, such as of the lung and bronchus, breast, colon and rectum, kidney, stomach, esophagus, liver and intrahepatic bile duct, urinary bladder, brain and other nervous system, head and neck, oral cavity and pharynx, cervix, uterine corpus, thyroid, ovary, testes, prostate, malignant melanoma, cholangiocarcinoma, thymoma, non-melanoma skin cancers, as well as hematologic tumors and/or malignancies, such as childhood leukemia and lymphomas, multiple myeloma, Hodgkin's disease, lymphomas of lymphocytic and cutaneous origin, acute and chronic leukemia such as acute lymphoblastic, acute myelocytic or chronic myelocytic leukemia, plasma cell neoplasm, lymphoid neoplasm and cancers associated with AIDS. Exemplary tumors include, for example, pancreatic tumors, ovarian tumors, lung tumors, colon tumors, prostate tumors, cervical tumors and breast tumors, and metastases thereof.

[0552] In some embodiments, the tumor or the metastasis is a tumor or metastasis of a cancer selected from the group consisting of pancreatic cancer, ovarian cancer, lung cancer, colon cancer, prostate cancer, cervical cancer, breast cancer, rectal cancer, renal (kidney) cancer, gastric cancer, esophageal cancer, hepatic (liver) cancer, endometrial cancer, bladder cancer, brain cancer, head and neck cancer, oral cancer (e.g., oral cavity cancer), cervical cancer, uterine cancer, thyroid cancer, testicular cancer, prostate cancer, skin cancers, such as melanoma, e g, malignant melanoma, cholangiocarcinoma (bile duct cancer), thymic epithelial cancer, e.g., thymoma, leukemia, lymphoma, multiple myeloma, Hodgkin's lymphoma, and non-Hodgkin's lymphoma.

[0553] In some embodiments, the cancer is a breast cancer, prostate cancer, ovarian cancer, lung cancer, colon cancer, or pancreatic cancer. In some embodiments, the cancer is MSS colorectal cancer. In some embodiments, the tumor or metastasis treated is a cancer such as pancreatic cancer, non-small cell lung cancer, multiple myeloma or leukemia. In some embodiments, the tumor is a carcinoma such as, for example, an ovarian tumor or a pancreatic tumor.

[0554] In other examples, methods are provided for treating a subject, where the methods include administering to the subject a virus that expresses one or more of the constructs described herein against which antigens the subject will develop an immune response. The immunizing antigens can be endogenous to the virus, such as vaccinia antigens on a vaccinia virus used to immunize against smallpox, measles, mumps, or the immunizing antigens can be exogenous antigens expressed by the virus, such as influenza or HIV antigens expressed on a viral capsid surface. In the case of smallpox, for example, a tumor specific protein antigen can be carried by an attenuated vaccinia virus (encoded by the viral genome) for a smallpox vaccine. Thus, the viruses provided herein, including the modified vaccinia viruses can be used as vaccines.

[0555] In some examples, provided herein are methods for eliciting or enhancing antibody production against a selected antigen or a selected antigen type in a subject, where the methods include administering to a subject a virus that can accumulate in a tumor and/or metastasis, and can cause release of a selected antigen or selected antigen type from the tumor, resulting in antibody production against the selected antigen or selected antigen type. Any of a variety of antigens can be targeted in the methods provided herein, including a selected antigen such as an exogenous gene product expressed by the virus, or a selected antigen type such as one or more tumor antigens release from the tumor as a result of viral infection of the tumor (e.g., by lysis, apoptosis, secretion or other mechanism of causing antigen release from the tumor).

[0556] In some examples, it can be desirable to maintain release of the selected antigen or selected antigen type over a series of days, for example, at least a week, at least ten days, at least two weeks or at least a month. Provided herein are methods for providing a sustained antigen release within a subject, where the methods include administering to a subject a virus that can accumulate in a tumor and/or metastasis, and can cause sustained release of an antigen, resulting in antibody production against the antigen. The sustained release of antigen can result in an immune response by the viral-infected host, in which the host can develop antibodies against the antigen, and/or the host can mount an immune response against cells expressing the antigen, including an immune response against tumor cells. Thus, the sustained release of antigen can result in immunization against tumor cells. In some examples, the viral-mediated sustained antigen release-induced immune response against tumor cells can result in complete removal or killing of all tumor cells.

[0557] In some embodiments, the subject has a cancer selected from the group consisting of pancreatic cancer, ovarian cancer, lung cancer, colon cancer, prostate cancer, cervical cancer, breast cancer, rectal cancer, renal (kidney) cancer, gastric cancer, esophageal cancer, hepatic (liver) cancer, endometrial cancer, bladder cancer, brain cancer, head and neck cancer, oral cancer (e.g., oral cavity cancer), cervical cancer, uterine cancer, thyroid cancer, testicular cancer, prostate cancer, skin cancers, such as melanoma, e.g., malignant melanoma, cholangiocarcinoma (bile duct cancer), thymic epithelial cancer, e.g., thymoma, leukemia, lymphoma, multiple myeloma, Hodgkin's lymphoma, and non-Hodgkin's lymphoma.

[0558] In some embodiments, the subject exhibits severe immune deficiency and is sensitive to virus infection.

[0559] In some embodiments, the proliferative disorder is MSS colorectal cancer and the nucleic acid genome of the recombinant oncolytic virus comprises a sequence of nucleotide that has at least 95%, at least 96%, at least 97%, at least 98% or at least 99% sequence identity to the sequence set forth in SEQ ID NO:8. In some embodiments, the proliferative disorder is MSS colorectal cancer and the nucleic acid genome of the recombinant oncolytic virus comprises the sequence of nucleotides set forth in SEQ ID NO: 8. In some embodiments, the subject exhibits severe immune deficiency and is sensitive to virus infection, the proliferative disorder is MSS colorectal cancer, and the nucleic acid genome of the recombinant oncolytic virus comprises a sequence of nucleotide that has at least 95%, at least 96%, at least 97%, at least 98% or at least 99% sequence identity to the sequence set forth in SEQ ID NO:8.

[0560] In some embodiments, the methods provided herein, e.g., methods of treatment, further comprise administering AP1903 (Rimiducid) to the subject.

[0561] B. Administration

[0562] A virus provided herein can be administered to a subject, including a subject having a tumor, cancer, hyperplasia, metastasis, or having neoplastic cells, or a subject to be immunized. An administered virus can be a virus provided herein or any other virus generated using the methods provided herein. In some examples, the virus administered is a virus containing a characteristic such as attenuated pathogenicity, low toxicity, preferential accumulation in tumor, ability to activate an immune response against tumor cells, ability to induce apoptosis, high immunogenicity, replication competence and ability to express exogenous proteins, and combinations thereof.

[0563] 1. Steps Prior to Administering the Virus

[0564] In some examples, one or more steps can be performed prior to administration of the virus to the subject. Any of a variety of preceding steps can be performed, including, but not limited to diagnosing the subject with a condition appropriate for virus administration, determining the immunocompetence of the subject, immunizing the subject, treating the subject with a chemotherapeutic agent, treating the subject with radiation, or surgically treating the subject.

[0565] For examples that include administering a virus to a tumor-bearing subject for therapeutic purposes, the subject has typically been previously diagnosed with a neoplastic condition. Diagnostic methods also can include determining the type of neoplastic condition, determining the stage of the neoplastic conditions, determining the size of one or more tumors in the subject, determining the presence or absence of metastatic or neoplastic cells in the lymph nodes of the subject, or determining the presence of metastases of the subject. Some examples of therapeutic methods for administering a virus to a subject can include a step of determination of the size of the primary tumor or the stage of the neoplastic disease, and if the size of the primary tumor is equal to or above a threshold volume, or if the stage of the neoplastic disease is at or above a threshold stage, a virus is administered to the subject. In a similar example, if the size of the primary tumor is below a threshold volume, or if the stage of the neoplastic disease is at or below a threshold stage, the virus is not yet administered to the subject; such methods can include monitoring the subject until the tumor size or neoplastic disease stage reaches a threshold amount, and then administering the virus to the subject. Threshold sizes can vary according to several factors, including rate of growth of the tumor, ability of the virus to infect a tumor, and immunocompetence of the subject. Generally the threshold size will be a size sufficient for a virus to accumulate and replicate in or near the tumor without being completely removed by the host's immune system, and will typically also be a size sufficient to sustain a virus infection for a time long enough for the host to mount an immune response against the tumor cells, typically about one week or more, about ten days or more, or about two weeks or more. Exemplary threshold tumor sizes for viruses, such as vaccinia viruses, are at least about 100 mm³, at least about 200 mm³, at least about 300 mm³, at least about 400 mm³, at least about 500 mm³, at least about 750 mm³, at least about 1000 mm³, or at least about 1500 mm³. Threshold neoplastic disease stages also can vary according to several factors, including specific requirement for staging a particular neoplastic disease, aggressiveness of growth of the neoplastic disease, ability of the virus to infect a tumor or metastasis, and immunocompetence of the subject. Generally the threshold stage will be a stage sufficient for a virus to accumulate and replicate in a tumor or metastasis without being completely removed by the host's immune system, and will typically also be a size sufficient to sustain a virus infection for a time long enough for the host to mount an immune response against the neoplastic cells, typically about one week or more, about ten days or more, or about two weeks or more. Exemplary threshold stages are any stage beyond the lowest stage (e.g., Stage I or equivalent), or any stage where the primary tumor is larger than a threshold size, or any stage where metastatic cells are detected.

[0566] In other embodiments, prior to administering to the subject a virus, the immunocompetence of the subject can be determined. The methods of administering a virus to a subject provided herein can include causing or enhancing an immune response in a subject. Accordingly, prior to administering a virus to a subject, the ability of a subject to mount an immune response can be determined. Any of a variety of tests of immunocompetence known in the art can be performed in the methods provided herein. Exemplary immunocompetence tests can examine ABO hemagglutination titers (IgM), leukocyte adhesion deficiency (LAD), granulocyte function (NBT), T and B cell quantitation, tetanus antibody titers, salivary IgA, skin test, tonsil test, complement C3 levels, factor B levels, and lymphocyte count. One skilled in the art can determine the desirability to administer a virus to a subject according to the level of immunocompetence of the subject, according to the immunogenicity of the virus, and, optionally, according to the immunogenicity of the neoplastic disease to be treated. Typically, a subject can be considered immunocompetent if the skilled artisan can determine that the subject is sufficiently competent to mount an immune response against the virus.

[0567] In some embodiments, the subject can be immunized prior to administering to the subject a virus according to the methods provided herein Immunization can serve to increase the ability of a subject to mount an immune response against the virus, or increase the speed at which the subject can mount an immune response against a virus Immunization also can serve to decrease the risk to the subject of pathogenicity of the virus. In some embodiments, the immunization can be performed with an immunization virus that is similar to the therapeutic virus to be administered. For example, the immunization virus can be a replication-incompetent variant of the therapeutic virus. In other embodiments, the immunization material can be digests of the therapeutic virus to be administered. Any of a variety of methods for immunizing a subject against a known virus are known in the art and can be used herein. In one embodiment, vaccinia viruses treated with, for example, 1 microgram of psoralen and ultraviolet light at 365 nm for 4 minutes, can be rendered replication incompetent. In another embodiment, the virus can be selected as the same or similar to a virus against which the subject has been previously immunized, e.g., in a childhood vaccination.

[0568] In another embodiment, the subject can have administered thereto a virus without any previous steps of cancer treatment such as chemotherapy, radiation therapy or surgical removal of a tumor and/or metastases. The methods provided herein take advantage of the ability of the viruses to enter or localize near a tumor, where the tumor cells can be protected from the subject's immune system; the viruses can then proliferate in such an immune-protected region and can also cause the release, typically a sustained release, of tumor antigens from the tumor to a location in which the subject's immune system can recognize the tumor antigens and mount an immune response. In such methods, existence of a tumor of sufficient size or sufficiently developed immunoprotected state can be advantageous for successful administration of the virus to the tumor, and for sufficient tumor antigen production. If a tumor is surgically removed, the viruses may not be able to localize to other neoplastic cells (e.g., small metastases) because such cells have not yet have matured sufficiently to create an immune-protective environment in which the viruses can survive and proliferate, or even if the viruses can localize to neoplastic cells, the number of cells or size of the mass can be too small for the viruses to cause a sustained release of tumor antigens in order for the host to mount an anti-tumor immune response. Thus, for example, provided herein are methods of treating a tumor, cancer, metastasis, or neoplastic disease in which viruses are administered to a subject with a tumor or neoplastic disease without removing the primary tumor, or to a subject with a tumor or neoplastic disease in which at least some tumors or neoplastic cells are intentionally permitted to remain in the subject. In other typical cancer treatment methods such as chemotherapy or radiation therapy, such methods typically have a side effect of weakening the subject's immune system. This treatment of a subject by chemotherapy or radiation therapy can reduce the subject's ability to mount an anti-tumor immune response. Thus, for example, provided herein are methods of treating a hyperplasia, tumor, cancer, metastasis, or neoplastic disease in which viruses are administered to a subject with a tumor or neoplastic disease without treating the subject with an immune system-weakening therapy, such as chemotherapy or radiation therapy.

[0569] In an alternative embodiment, prior to administration of a virus to the subject, the subject can be treated in one or more cancer treatment steps that do not remove the primary tumor or that do not weaken the immune system of the subject. A variety of more sophisticated cancer treatment methods are being developed in which the tumor can be treated without surgical removal or immune-system weakening therapy. Exemplary methods include administering a compound that decreases the rate of proliferation of the tumor, cancer, metastasis, or neoplastic cells without weakening the immune system (e.g., by administering tumor suppressor compounds, such as apoptosis inducing compounds, or by administering tumor cell-specific compounds, such as anti-programmed death 1 (PD-1) receptor and anti-programmed death ligand 1 (PD-L1)/L2 inhibitors) or administering an angiogenesis-inhibiting compound. Thus, combined methods that include administering a virus to a subject can further improve cancer therapy. Thus, provided herein are methods of administering a virus to a subject, along with prior to or subsequent to, for example, administering a compound that slows tumor growth without weakening the subject's immune system or a compound that inhibits vascularization of the tumor.

[0570] 2 Mode of Administration

[0571] Any mode of administration of a virus to a subject can be used, provided the mode of administration permits the virus to enter a tumor, hyperplasia, cancer, or metastasis. Modes of administration can include, but are not limited to, systemic, parenteral, intravenous, intraperitoneal, subcutaneous, intramuscular, transdermal, intradermal, intra-arterial (e.g., hepatic artery infusion), intravesical perfusion, intrapleural, intraarticular, topical, intratumoral, intralesional, endoscopic, multipuncture (e.g., as used with smallpox vaccines), inhalation, percutaneous, subcutaneous, intranasal, intratracheal, oral, intracavity (e.g., administering to the bladder via a catheter, administering to the gut by suppository or enema), vaginal, rectal, intracranial, intraprostatic, intravitreal, aural, or ocular administration. In some embodiments, a diagnostic or therapeutic agent as described elsewhere herein also can be similarly administered. In particular embodiments, the virus is administered intravenously.

[0572] One skilled in the art can select any mode of administration compatible with the subject and the virus, and that also is likely to result in the virus reaching tumors and/or metastases. The route of administration can be selected by one skilled in the art according to any of a variety of factors, including the nature of the disease, the kind of tumor, and the particular virus contained in the pharmaceutical composition. Administration to the target site can be performed, for example, by ballistic delivery, as a colloidal dispersion system, or systemic administration can be performed by injection into an artery.

[0573] 3. Dosages and Dosage Regime

[0574] The dosage regimen can be any of a variety of methods and amounts, and can be determined by one skilled in the art according to known clinical factors. As is known in the medical arts, dosages for any one patient can depend on many factors, including the subject's species, size, body surface area, age, sex, immunocompetence, and general health, the particular virus to be administered, duration and route of administration, the kind and stage of the disease, for example, tumor size, and other treatments or compounds, such as chemotherapeutic drugs, being administered concurrently. In addition to the above factors, such levels can be affected by the infectivity of the virus, and the nature of the virus, as can be determined by one skilled in the art.

[0575] In the present methods, appropriate minimum dosage levels and dosage regimes of viruses can be levels sufficient for the virus to survive, grow and replicate in a tumor or metastasis. Generally, the virus is administered in an amount that is at least or about or 1×10⁵ pfu at least one time over a cycle of administration. Exemplary minimum levels for administering a virus to a 65 kg human can include at least about 1×10⁵ plaque forming units (pfu), at least about 5×10⁵ pfu, at least about 1×10⁶ pfu, at least about 5×10⁶ pfu, at least about 1×10⁷ pfu, at least about 1×10⁸ pfu, at least about 1×10⁹ pfu, or at least about 1×10¹⁰ pfu. For example, in some embodiments, the virus is administered in an amount that is at least or about or is 1×10⁵ pfu, 1×10⁶ pfu, 1×10⁷ pfu, 1×10⁸ pfu, 1×10⁹ pfu, 1×10¹⁰ pfu, 1×10¹¹ pfu, 1×10¹² pfu, 1×10¹³ pfu, or 1×10¹⁴ pfu at least one time over a cycle of administration. In some embodiments, the virus is administered in an amount from 1×10⁵ pfu to 1×10¹⁴ pfu.

[0576] In the dosage regime, the amount of virus can be administered as a single administration or multiple times over the cycle of administration. Hence, the methods provided herein can include a single administration of a virus to a subject or multiple administrations of a virus to a subject. In some examples, a single administration is sufficient to establish a virus in a tumor, where the virus can proliferate and can cause or enhance an anti-tumor response in the subject; such methods do not require additional administrations of a virus in order to cause or enhance an anti-tumor response in a subject, which can result, for example in inhibition of tumor growth, inhibition of metastasis growth or formation, reduction in tumor or size, elimination of a tumor or metastasis, inhibition or prevention of recurrence of a neoplastic disease or new tumor formation, or other cancer therapeutic effects.

[0577] In other examples, a virus can be administered on different occasions, separated in time typically by at least one day. For example, a virus can be administered two times, three times, four times, five times, or six times or more, with one day or more, two days or more, one week or more, or one month or more time between administrations. Separate administrations can increase the likelihood of delivering a virus to a tumor or metastasis, where a previous administration has been ineffective in delivering a virus to a tumor or metastasis. Separate administrations can increase the locations on a tumor or metastasis where virus proliferation can occur or can otherwise increase the titer of virus accumulated in the tumor, which can increase the scale of release of antigens or other compounds from the tumor in eliciting or enhancing a host's anti-tumor immune response, and also can, optionally, increase the level of virus-based tumor lysis or tumor cell death. Separate administrations of a virus can further extend a subject's immune response against viral antigens, which can extend the host's immune response to tumors or metastases in which viruses have accumulated, and can increase the likelihood of a host mounting an anti-tumor immune response.

[0578] When separate administrations are performed, each administration can be a dosage amount that is the same or different relative to other administration dosage amounts. In one example, all administration dosage amounts are the same. In other examples, a first dosage amount can be a larger dosage amount than one or more subsequent dosage amounts, for example, at least 10× larger, at least 100× larger, or at least 1000× larger than subsequent dosage amounts. In one example of a method of separate administrations in which the first dosage amount is greater than one or more subsequent dosage amounts, all subsequent dosage amounts can be the same, smaller amount relative to the first administration.

[0579] Separate administrations can include any number of two or more administrations, including two, three, four, five or six administrations. One skilled in the art can readily determine the number of administrations to perform or the desirability of performing one or more additional administrations according to methods known in the art for monitoring therapeutic methods and other monitoring methods provided herein. Accordingly, the methods provided herein include methods of providing to the subject one or more administrations of a virus, where the number of administrations can be determined by monitoring the subject, and, based on the results of the monitoring, determining whether or not to provide one or more additional administrations. Deciding on whether or not to provide one or more additional administrations can be based on a variety of monitoring results, including, but not limited to, indication of tumor growth or inhibition of tumor growth, appearance of new metastases or inhibition of metastasis, the subject's anti-virus antibody titer, the subject's anti-tumor antibody titer, the overall health of the subject, the weight of the subject, the presence of virus solely in tumor and/or metastases, the presence of virus in normal tissues or organs.

[0580] The time period between administrations can be any of a variety of time periods. The time period between administrations can be a function of any of a variety of factors, including monitoring steps, as described in relation to the number of administrations, the time period for a subject to mount an immune response, the time period for a subject to clear the virus from normal tissue, or the time period for virus proliferation in the tumor or metastasis. In one example, the time period can be a function of the time period for a subject to mount an immune response; for example, the time period can be more than the time period for a subject to mount an immune response, such as more than about one week, more than about ten days, more than about two weeks, or more than about a month; in another example, the time period can be less than the time period for a subject to mount an immune response, such as less than about one week, less than about ten days, less than about two weeks, or less than about a month. In another example, the time period can be a function of the time period for a subject to clear the virus from normal tissue; for example, the time period can be more than the time period for a subject to clear the virus from normal tissue, such as more than about a day, more than about two days, more than about three days, more than about five days, or more than about a week. In another example, the time period can be a function of the time period for virus proliferation in the tumor or metastasis; for example, the time period can be more than the amount of time for a detectable signal to arise in a tumor or metastasis after administration of a virus expressing a detectable marker, such as about 3 days, about 5 days, about a week, about ten days, about two weeks, or about a month.

[0581] For example, an amount of virus is administered two times, three times, four times, five times, six times or seven times over a cycle of administration. The amount of virus can be administered on the first day of the cycle, the first and second day of the cycle, each of the first three consecutive days of the cycle, each of the first four consecutive days of the cycle, each of the first five consecutive days of the cycle, each of the first six consecutive days of the cycle, or each of the first seven consecutive days of the cycle. Generally, the cycle of administration is 7 days, 14 days, 21 days or 28 days. Depending on the responsiveness or prognosis of the patient, the cycle of administration is repeated over the course of several months or years.

[0582] Generally, appropriate maximum dosage levels or dosage regimes of viruses are levels that are not toxic to the host, levels that do not cause splenomegaly of 3 times or more, and/or levels that do not result in colonies or plaques in normal tissues or organs after about 1 day or after about 3 days or after about 7 days.

[0583] 4. Co-Administrations

[0584] Also provided are methods in which an additional therapeutic substance, such as a different therapeutic virus or a therapeutic compound is administered. These can be administered simultaneously, sequentially or intermittently with the first virus. The additional therapeutic substance can interact with the virus or a gene product thereof, or the additional therapeutic substance can act independently of the virus.

[0585] Combination therapy treatment has advantages in that: 1) it avoids single agent resistance; 2) in a heterogeneous tumor population, it can kill cells by different mechanisms; and 3) by selecting drugs with non-overlapping toxicities, each agent can be used at full dose to elicit maximal efficacy and synergistic effect. Combination therapy can be done by combining a diagnostic/therapeutic virus with one or more of the following anti-cancer agents: chemotherapeutic agents, therapeutic antibodies, siRNAs, toxins, enzyme-prodrug pairs or radiation.

[0586] Accordingly, also provided herein, in some embodiments, are methods of treatment and methods of inhibiting virus replication that further comprise administering an additional therapeutic substance, such as any therapeutic agent, additional virus, or therapeutic compound as described herein.

[0587] a. i. Administering a Plurality of Viruses

[0588] Methods are provided for administering to a subject two or more viruses. Administration can be effected simultaneously, sequentially or intermittently. The plurality of viruses can be administered as a single composition or as two or more compositions. The two or more viruses can include at least two viruses. In a particular embodiment, where there are two viruses, both viruses are vaccinia viruses. In another embodiment, one virus is a vaccinia virus and the second virus is any one of an adenovirus, an adeno-associated virus, a retrovirus, a herpes simplex virus, a reovirus, a mumps virus, a foamy virus, an influenza virus, a myxoma virus, a vesicular stomatitis virus, or any other virus described herein or known in the art. Viruses can be chosen based on the pathway on which they act. For example, a virus that targets an apoptotic pathway can be combined with a virus that targets angiogenesis pathways. In another example, a virus that targets host's complement can be combined with a virus that stimulates the host's immune system.

[0589] The plurality of viruses can be provided as combinations of compositions containing and/or as kits that include the viruses packaged for administration and optionally including instructions therefore. The compositions can contain the viruses formulated for single dosage administration (i.e., for direct administration) and can require dilution or other additions.

[0590] In one embodiment, at least one of the viruses is a modified virus such as those provided herein, having a characteristic such as low pathogenicity, low toxicity, preferential accumulation in tumor, ability to activate an immune response against tumor cells, immunogenic, replication competent, ability to express exogenous proteins, and combinations thereof. The viruses can be administered at approximately the same time, or can be administered at different times. The viruses can be administered in the same composition or in the same administration method, or can be administered in separate composition or by different administration methods.

[0591] The time period between administrations can be any time period that achieves the desired effects, as can be determined by one skilled in the art. Selection of a time period between administrations of different viruses can be determined according to parameters similar to those for selecting the time period between administrations of the same virus, including results from monitoring steps, the time period for a subject to mount an immune response, the time period for a subject to clear virus from normal tissue, or the time period for virus proliferation in the tumor or metastasis. In one embodiment, the time period can be a function of the time period for a subject to mount an immune response; for example, the time period can be more than the time period for a subject to mount an immune response, such as more than about one week, more than about ten days, more than about two weeks, or more than about a month; in another embodiment, the time period can be less than the time period for a subject to mount an immune response, such as less than about one week, less than about ten days, less than about two weeks, or less than about a month. In another embodiment, the time period can be a function of the time period for a subject to clear the virus from normal tissue; for example, the time period can be more than the time period for a subject to clear the virus from normal tissue, such as more than about a day, more than about two days, more than about three days, more than about five days, or more than about a week. In another embodiment, the time period can be a function of the time period for virus proliferation in the tumor or metastasis; for example, the time period can be more than the amount of time for a detectable signal to arise in a tumor or metastasis after administration of a virus expressing a detectable marker, such as about 3 days, about 5 days, about a week, about ten days, about two weeks, or about a month.

[0592] b. ii. Therapeutic Compounds

[0593] Any therapeutic or anti-cancer agent can be used as the second, therapeutic or anti-cancer agent in the combined cancer treatment methods provided herein. The methods can include administering one or more therapeutic compounds to the subject in addition to administering a virus or plurality thereof to a subject. Therapeutic compounds can act independently, or in conjunction with the virus, for tumor therapeutic effects.

[0594] Therapeutic compounds that can act independently include any of a variety of known chemotherapeutic compounds that can inhibit tumor growth, inhibit metastasis growth and/or formation, decrease the size of a tumor or metastasis, eliminate a tumor or metastasis, without reducing the ability of a virus to accumulate in a tumor, replicate in the tumor, and cause or enhance an anti-tumor immune response in the subject.

[0595] Therapeutic compounds that act in conjunction with the viruses include, for example, compounds that alter the expression of the viruses or compounds that can interact with a virally-expressed gene, or compounds that can inhibit virus proliferation, including compounds toxic to the virus. Therapeutic compounds that can act in conjunction with the virus include, for example, therapeutic compounds that increase the proliferation, toxicity, tumor cell killing or immune response eliciting properties of a virus, and also can include, for example, therapeutic compounds that decrease the proliferation, toxicity or cell killing properties of a virus. Optionally, the therapeutic agent can exhibit or manifest additional properties, such as, properties that permit its use as an imaging agent, as described elsewhere herein.

[0596] Therapeutic compounds also include, but are not limited to, chemotherapeutic agents, nanoparticles, radiation therapy, siRNA molecules, enzyme/pro-drug pairs, photosensitizing agents, toxins, microwaves, a radionuclide, an angiogenesis inhibitor, a mitosis inhibitor protein (e.g., cdc6), an antitumor oligopeptide (e.g., antimitotic oligopeptides, high affinity tumor-selective binding peptides), a signaling modulator, anti-cancer antibiotics, or a combination thereof.

[0597] Exemplary photosensitizing agents include, but are not limited to, for example, indocyanine green, toluidine blue, aminolevulinic acid, texaphyrins, benzoporphyrins, phenothiazines, phthalocyanines, porphyrins such as sodium porfimer, chlorins such as tetra(m-hydroxyphenyl)chlorin or tin(IV) chlorin e6, purpurins such as tin ethyl etiopurpurin, purpurinimides, bacteriochlorins, pheophorbides, pyropheophorbides or cationic dyes. In one example, a vaccinia virus, such as a vaccinia virus provided herein, is administered to a subject having a tumor, cancer or metastasis in combination with a photosensitizing agent.

[0598] Radionuclides, which depending up the radionuclide, amount and application can be used for diagnosis and/or for treatment. They include, but are not limited to, for example, a compound or molecule containing 32Phosphorus, 60Cobalt, 90Yttrium, 99Technitium, 10³Palladium, 106Ruthenium, 111Indium, 117Lutetium, 125Iodine, 131Iodine, 137Cesium, 153Samarium, 186Rhenium, 188Rhenium, 192Iridium, 198Gold, 211Astatine, 212Bismuth or 213Bismuth. In one example, a vaccinia virus, such as a vaccinia virus provided herein, is administered to a subject having a tumor, cancer or metastasis in combination with a radionuclide.

[0599] Toxins include, but are not limited to, chemotherapeutic compounds such as, but not limited to, 5-fluorouridine, calicheamicin and maytansine. Signaling modulators include, but are not limited to, for example, inhibitors of macrophage inhibitory factor, toll-like receptor agonists and stat3 inhibitors. In one embodiment, a vaccinia virus, such as a vaccinia virus provided herein, is administered to a subject having a tumor, cancer or metastasis in combination with a toxin or a signaling modulator.

[0600] Combination therapy between chemotherapeutic agents and therapeutic viruses can be effective/curative in situations when single agent treatment is not effective. Chemotherapeutic compounds include, but are not limited to, alkylating agents such as thiotepa and cyclophosphamide; alkyl sulfonates such as busulfan, improsulfan and piposulfan; aziridines such as benzodepa, carboquone, meturedepa and uredepa; ethylenimine and methylmelamines, including altretamine, triethylenemelamine, triethylenephosphoramide, triethylenethiophosphoramide and trimethylmelamine nitrogen mustards such as chlorambucil, chlornaphazine, chlorophosphamide, estramustine, ifosfamide, mechlorethamine, mechlorethamine oxide hydrochloride, melphalan, novobiocin, phenesterine, prednimustine, trofosfamide, uracil mustard; nitrosoureas such as carmustine, chlorozotocin, fotemustine, lomustine, nimustine, ranimustine; antibiotics such as aclacinomycins, actinomycin, anthramycin, azaserine, bleomycins, cactinomycin, calicheamicin, carubicin, carminomycin, carzinophilin, chromomycins, dactinomycin, daunorubicin, detorubicin, 6-diazo-5-oxo-L-norleucine, doxorubicin, epirubicin, esorubicin, idarubicin, marcellomycin, mitomycins, mycophenolic acid, nogalamycin, olivomycins, peplomycin, porfiromycin, puromycin, quelamycin, rodorubicin, streptonigrin, streptozocin, tubercidin, ubenimex, zinostatin, zorubicin; anti-metabolites such as methotrexate and 5-fluorouracil (5-FU); folic acid analogues such as denopterin, methotrexate, pteropterin, trimetrexate; purine analogs such as fludarabine, 6-mercaptopurine, thiamiprine, thioguanine; pyrimidine analogs such as ancitabine, azacitidine, 6-azauridine, carmofur, cytarabine, dideoxyuridine, doxifluridine, enocitabine, floxuridine; androgens such as calusterone, dromostanolone propionate, epitiostanol, mepitiostane, testolactone; anti-adrenals such as aminoglutethimide, mitotane, trilostane; folic acid replenisher such as folinic acid; aceglatone; aldophosphamide glycoside; aminolevulinic acid; amsacrine; bestrabucil; bisantrene; edatrexate; defosfamide; demecolcine; diaziquone; eflornithine; elliptinium acetate; etoglucid; gallium nitrate; hydroxyurea; lentinan; lonidamine; mitoguazone; mitoxantrone; mopidamol; nitracrine; pentostatin; phenamet; pirarubicin; podophyllinic acid; 2-ethylhydrazide; procarbazine; polysaccharide-K; razoxane; sizofiran; spirogermanium; tenuazonic acid; triaziquone; 2,2′,2″-trichlorotriethylamine; urethan; vindesine; dacarbazine; mannomustine; mitobronitol; mitolactol; pipobroman; gacytosine; cytosine arabinoside; cyclophosphamide; thiotepa; taxoids, e.g., paclitaxel and docetaxel; chlorambucil; gemcitabine; 6-thioguanine; mercaptopurine; methotrexate; platinum analogs such as cisplatin and carboplatin; vinblastine; platinum; etoposide (VP-16); ifosfamide; mitomycin C; mitoxantrone; vincristine; vinorelbine; Navelbine®; Novantrone®; teniposide; daunomycin; aminopterin; Xeloda®; ibandronate; CPT11; topoisomerase inhibitor RFS 2000; difluoromethylornithine (DMFO); retinoic acid; esperamycins; capecitabine; and pharmaceutically acceptable salts, acids or derivatives of any of the above. Also included are anti-hormonal agents that act to regulate or inhibit hormone action on tumors such as anti-estrogens including for example tamoxifen, raloxifene, aromatase inhibiting 4(5)-imidazoles, 4-hydroxytamoxifen, trioxifene, keoxifene, LY117018, onapristone and toremifene (Fareston®); and antiandrogens such as flutamide, nilutamide, bicalutamide, leuprolide and goserelin; and pharmaceutically acceptable salts, acids or derivatives of any of the above. Such chemotherapeutic compounds that can be used herein include compounds whose toxicities preclude use of the compound in general systemic chemotherapeutic methods. Chemotherapeutic agents also include new classes of targeted chemotherapeutic agents such as, for example, imatinib (sold by Novartis under the trade name Gleevec® in the United States), gefitinib (developed by AstraZeneca under the trade name Iressa®) and erlotinib (developed by Genentech under the trade name Tarceva®). Particular chemotherapeutic agents include, but are not limited to, cisplatin, carboplatin, oxaliplatin, DWA2114R, NK121, IS 3 295, and 254-S vincristine, prednisone, doxorubicin and L-asparaginase; mechlorethamine, vincristine, procarbazine and prednisone (MOPP), cyclophosphamide, vincristine, procarbazine and prednisone (C-MOPP), bleomycin, vinblastine, gemcitabine and 5-flurouracil. Exemplary chemotherapeutic agents are, for example, cisplatin, carboplatin, oxaliplatin, DWA2114R, NK121, IS 3 295, and 254-S. In a non-limiting example, a vaccinia virus, such as a vaccinia virus provided herein, is administered to a subject having a tumor, cancer or metastasis in combination with a platinum coordination complex, such as cisplatin, carboplatin, oxaliplatin, DWA2114R, NK121, IS 3 295, and 254-S. Tumors, cancers and metastasis can be any of those provided herein, and in particular, can be a pancreatic tumor, an ovarian tumor, a lung tumor, a colon tumor, a prostate tumor, a cervical tumor or a breast tumor; exemplary tumors are pancreatic and ovarian tumors. Tumors, cancers and metastasis can be a monotherapy-resistant tumor such as, for example, one that does not respond to therapy with virus alone or anti-cancer agent alone, but that does respond to therapy with a combination of virus and anti-cancer agent. Typically, a therapeutically effective amount of virus is systemically administered to the subject and the virus localizes and accumulates in the tumor. Subsequent to administering the virus, the subject is administered a therapeutically effective amount of an anti-cancer agent, such as cisplatin. In one embodiment, cisplatin is administered once-daily for five consecutive days. One of skill in the art could determine when to administer the anti-cancer agent subsequent to the virus using, for example, in vivo animal models. Using the methods provided herein, administration of a virus and anti-cancer agent, such as cisplatin can cause a reduction in tumor volume, can cause tumor growth to stop or be delayed or can cause the tumor to be eliminated from the subject. The status of tumors, cancers and metastasis following treatment can be monitored using any of the methods provided herein and known in the art.

[0601] Exemplary anti-cancer antibiotics include, but are not limited to, anthracyclines such as doxorubicin hydrochloride (adriamycin), idarubicin hydrochloride, daunorubicin hydrochloride, aclarubicin hydrochloride, epirubicin hydrochloride and pirarubicin hydrochloride, phleomycins such as phleomycin and peplomycin sulfate, mitomycins such as mitomycin C, actinomycins such as actinomycin D, zinostatinstimalamer and polypeptides such as neocarzinostatin. In one embodiment, a vaccinia virus, such as a vaccinia virus provided herein, is administered to a subject having a tumor, cancer or metastasis in combination with an anti-cancer antibiotic.

[0602] In one embodiment, nanoparticles can be designed such that they carry one or more therapeutic agents provided herein. Additionally, nanoparticles can be designed to carry a molecule that targets the nanoparticle to the tumor cells. In one non-limiting embodiment, nanoparticles can be coated with a radionuclide and, optionally, an antibody immunoreactive with a tumor-associated antigen. In one embodiment, a vaccinia virus, such as a vaccinia virus provided herein, is administered to a subject having a tumor, cancer or metastasis in combination with a nanoparticle carrying any of the therapeutic agents provided herein.

[0603] Radiation therapy has become a foremost choice of treatment for a majority of cancer patients. The wide use of radiation treatment stems from the ability of gamma-irradiation to induce irreversible damage in targeted cells with the preservation of normal tissue function. Ionizing radiation triggers apoptosis, the intrinsic cellular death machinery in cancer cells, and the activation of apoptosis seems to be the principal mode by which cancer cells die following exposure to ionizing radiation. In one embodiment, a vaccinia virus, such as a vaccinia virus provided herein, is administered to a subject having a tumor, cancer or metastasis in combination with radiation therapy.

[0604] Thus, provided herein are methods of administering to a subject one or more therapeutic compounds that can act in conjunction with the virus to increase the proliferation, toxicity, tumor cell killing, host's complement evasion, or immune response eliciting properties of a virus. Also provided herein are methods of administering to a subject one or more therapeutic compounds that can act in conjunction with the virus to decrease the proliferation, toxicity, or cell killing properties of a virus. Therapeutic compounds to be administered can be any of those provided herein or in the art.

[0605] Therapeutic compounds that can act in conjunction with the virus to increase the proliferation, toxicity, tumor cell killing, host's complement evasion, or immune response eliciting properties of a virus are compounds that can alter gene expression, where the altered gene expression can result in an increased killing of tumor cells or an increased anti-tumor immune response in the subject. A gene expression-altering compound can, for example, cause an increase or decrease in expression of one or more viral genes, including endogenous viral genes and/or exogenous viral genes. For example, a gene expression-altering compound can induce or increase transcription of a gene in a virus such as an exogenous gene that can cause cell lysis or cell death that can provoke an immune response that can catalyze conversion of a prodrug-like compound, or that can inhibit expression of a tumor cell gene. Any of a wide variety of compounds that can alter gene expression are known in the art, including IPTG and RU486. Exemplary genes whose expression can be up-regulated include proteins and RNA molecules, including toxins, enzymes that can convert a prodrug to an anti-tumor drug, cytokines, transcription regulating proteins, siRNA and ribozymes. In another example, a gene expression-altering compound can inhibit or decrease transcription of a gene in a virus such as a heterologous gene that can reduce viral toxicity or reduces viral proliferation. Any of a variety of compounds that can reduce or inhibit gene expression can be used in the methods provided herein, including siRNA compounds, transcriptional inhibitors or inhibitors of transcriptional activators. Exemplary genes whose expression can be down-regulated include proteins and RNA molecules, including viral proteins or RNA that suppress lysis, nucleotide synthesis or proliferation, and cellular proteins or RNA molecules that suppress cell death, immunoreactivity, lysis, or viral replication.

[0606] In another example, therapeutic compounds that can act in conjunction with the virus to increase the proliferation, toxicity, tumor cell killing, host's complement evasion, or immune response eliciting properties of a virus are compounds that can interact with a virally expressed gene product, and such interaction can result in an increased killing of tumor cells or an increased anti-tumor immune response in the subject. A therapeutic compound that can interact with a virally-expressed gene product can include, for example a prodrug or other compound that has little or no toxicity or other biological activity in its subject-administered form, but after interaction with a virally expressed gene product, the compound can develop a property that results in tumor cell death, including but not limited to, cytotoxicity, ability to induce apoptosis, or ability to trigger an immune response. In one non-limiting example, the virus carries an enzyme into the cancer cells. Once the enzyme is introduced into the cancer cells, an inactive form of a chemotherapy drug (i.e., a prodrug) is administered. When the inactive prodrug reaches the cancer cells, the enzyme converts the prodrug into the active chemotherapy drug, so that it can kill the cancer cell. Thus, the treatment is targeted only to cancer cells and does not affect normal cells. The prodrug can be administered concurrently with, or sequentially to, the virus. A variety of prodrug-like substances are known in the art and an exemplary set of such compounds are disclosed elsewhere herein, where such compounds can include gancyclovir, 5-fluorouracil, 6-methylpurine deoxyriboside, cephalosporin-doxorubicin, 4-[(2-chloroethyl)(2-mesyloxyethypamino]benzoyl-L-glutamic acid, acetaminophen, indole-3-acetic acid, CB1954, 7-ethyl-10-[4-(1-piperidino)-1-piperidino]carbonyloxycamptothecin, bis-(2-chloroethyl)amino-4-hydroxyphenyl-aminomethanone 28, 1-chloromethyl-5-hydroxy-1,2-dihydro-3,4-benz[e]indole, epirubicin-glucuronide, 5′-deoxy-5-fluorouridine, cytosine arabinoside, linamarin, and a nucleoside analogue (e.g., fluorouridine, fluorodeoxyuridine, fluorouridine arabinoside, cytosine arabinoside, adenine arabinoside, guanine arabinoside, hypoxanthine arabinoside, 6-mercaptopurineriboside, theoguanosine riboside, nebularine, 5-iodouridine, 5-iododeoxyuridine, 5-bromodeoxyuridine, 5-vinyldeoxyuridine, 94(2-hydroxy)ethoxylmethylguanine (acyclovir), 9-[(2-hydroxy-1-hydroxymethyl)-ethoxy]methylguanine (DHPG), azauridien, azacytidine, azidothymidine, dideoxyadenosine, dideoxycytidine, dideoxyinosine, dideoxyguanosine, dideoxythymidine, 3′-deoxyadenosine, 3′-deoxycytidine, 3′-deoxyinosine, 3′-deoxyguanosine, 3′-deoxythymidine).

[0607] In another example, therapeutic compounds that can act in conjunction with the virus to decrease the proliferation, toxicity or cell killing properties of a virus are compounds that can inhibit viral replication, inhibit viral toxins or cause viral death. A therapeutic compound that can inhibit viral replication, inhibit viral toxins, or cause viral death can generally include a compound that can block one or more steps in the viral life cycle, including, but not limited to, compounds that can inhibit viral DNA replication, viral RNA transcription, viral coat protein assembly, outer membrane or polysaccharide assembly. Any of a variety of compounds that can block one or more steps in a viral life cycle are known in the art, including any known antiviral compound (e.g., cidofovir), viral DNA polymerase inhibitors, viral RNA polymerase inhibitors, inhibitors of proteins that regulate viral DNA replication or RNA transcription. In another example, a virus can contain a gene encoding a viral life cycle protein, such as DNA polymerase or RNA polymerase that can be inhibited by a compound that is, optionally, non-toxic to the host organism.

[0608] In addition to combination therapy between chemotherapeutic agents and a virus provided herein, other more complex combination therapy strategies could be applied as well. For example, a combination therapy can include chemotherapeutic agents, therapeutic antibodies including checkpoint inhibitors (e.g. anti-PD-1 or anti-PD-L1 antibody), and a virus provided herein. Alternatively, another combination therapy can be the combination of radiation, therapeutic antibodies such as a checkpoint inhibitor (e.g. anti-PD-1 or anti-PD-L1 antibody), and a virus provided herein. Therefore, the concept of combination therapy also can be based on the application of a virus provided herein virus along with one or more of the following therapeutic modalities, namely, chemotherapeutic agents, radiation therapy, therapeutic antibodies including checkpoint inhibitors (e.g. anti-PD-1 or anti-PD-L1 antibody), hyper- or hypothermia therapy, siRNA, diagnostic/therapeutic bacteria, diagnostic/therapeutic mammalian cells, immunotherapy, and/or targeted toxins (delivered by antibodies, liposomes and nanoparticles).

[0609] Effective delivery of each component of the combination therapy is an important aspect of the methods provided herein. In accordance with one aspect, the modes of administration discussed below exploit one of more of the key features: (i) delivery of a virus provided herein to the tumors by a mode of administration effect to achieve highest titer of virus and highest therapeutic effect; (ii) delivery of any other mentioned therapeutic modalities to the tumor by a mode of administration to achieve the optimal therapeutic effect. The dose scheme of the combination therapy administered is such that the combination of the two or more therapeutic modalities is therapeutically effective. Dosages will vary in accordance with such factors as the age, health, sex, size and weight of the patient, the route of administration, the toxicity of the drugs, frequency of treatment and the relative susceptibilities of the cancer to each of the therapeutic modalities.

[0610] For combination therapies with chemotherapeutic compounds, dosages for the administration of such compounds are known in the art or can be determined by one skilled in the art according to known clinical factors (e.g., subject's species, size, body surface area, age, sex, immunocompetence, and general health, duration and route of administration, the kind and stage of the disease, for example, tumor size, and other viruses, treatments, or compounds, such as other chemotherapeutic drugs, being administered concurrently). In addition to the above factors, such levels can be affected by the infectivity of the virus, and the nature of the virus, as can be determined by one skilled in the art. For example, cisplatin (also called cis-platinum, platinol; cis-diamminedichloroplatinum; and cDDP) is representative of a broad class of water-soluble, platinum coordination compounds frequently employed in the therapy of testicular cancer, ovarian tumors and a variety of other cancers. (See, e.g., Blumenreich et al. Cancer 1118-1122 (1985); Forastiere et al. J. Clin. Oncol. 19(4): 1088-1095 (2001)). Methods of employing cisplatin clinically are well known in the art. For example, cisplatin has been administered in a single day over a six hour period, once per month, by slow intravenous infusion. For localized lesions, cisplatin can be administered by local injection. Intraperitoneal infusion can also be employed. Cisplatin can be administered in doses as low as 10 mg/m2 per treatment if part of a multi-drug regimen, or if the patient has an adverse reaction to higher dosing. In general, a clinical dose is from about 30 to about 120 or 150 mg/m2 per treatment.

[0611] Typically, platinum-containing chemotherapeutic agents are administered parenterally, for example by slow intravenous infusion, or by local injection, as discussed above. The effects of intralesional (intra-tumoral) and IP administration of cisplatin is described in (Nagase et al. Cancer Treat. Rep. 71(9): 825-829 (1987); and Theon et al. J. Am. Vet. Med. Assoc. 202(2): 261-7. (1993)).

[0612] In one exemplary embodiment, the virus is administered once, 2-6 times or more with 0-60 days apart each administration, followed by 1-30 days where no anti-cancer treatment, then cisplatin is administered daily for 1-5 days, followed by 1-30 days where no anti-cancer treatment is administered. Each component of the therapy, virus or cisplatin treatment, or the virus and cisplatin combination therapy can be repeated. In another exemplary example, cisplatin is administered daily for 1 to 5 days, followed by 1-10 days where no anti-cancer treatment is administered, then the virus is administered once or 2-6 times with 0-60 days apart. Such treatment scheme can be repeated. In another exemplary example, cisplatin is administered daily for 1 to 5 days, followed by 1-10 days where no anti-cancer treatment is administered, then the virus is administered once or 2-6 times with 0-60 days apart. This is followed by 5-60 days where no anti-cancer treatment is administered, then cisplatin is administered again for 1-5 days. Such treatment scheme can be repeated.

[0613] Gemcitabine (GEMZAR®) is another compound employed in the therapy of breast cancer, non-small cell lung cancer, and pancreatic cancer. Gemcitabine is a nucleoside analogue that exhibits antitumor activity. Methods of employing gemcitabine clinically are well known in the art. For example, gemcitabine has been administered by intravenous infusion at a dose of 1000 mg/m2 over 30 minutes once weekly for up to 7 weeks (or until toxicity necessitates reducing or holding a dose), followed by a week of rest from treatment of pancreatic cancer. Subsequent cycles can include infusions once weekly for 3 consecutive weeks out of every 4 weeks. Gemcitabine has also been employed in combination with cisplatin in cancer therapy.

[0614] In one exemplary example, the virus is administered once or 2-6 times with 0-60 days apart, followed by 1-30 days where no anti-cancer treatment is administered, then gemcitabine is administered 1-7 times with 0-30 days apart, followed by 1-30 days where no anti-cancer treatment is administered. Such treatment scheme can be repeated. In another exemplary example, gemcitabine is administered 1-7 times with 0-30 days apart, followed by 1-10 days where no anti-cancer treatment is administered, then the virus is administered once or 2-6 times with 0-60 days apart. This is followed by 5-60 days where no anti-cancer treatment is administered. Such treatment scheme can be repeated. In another exemplary embodiment, gemcitabine is administered 1-7 times with 0-30 days apart, followed by 1-10 days where no anti-cancer treatment is administered, then the virus is administered once or 2-6 times with 0-60 days apart. This is followed by 5-60 days where no anti-cancer treatment is administered, then gemcitabine is administered again for 1-7 times with 0-30 days apart. Such treatment scheme can be repeated.

[0615] As will be understood by one of skill in the art, the optimal treatment regimen will vary and it is within the scope of the treatment methods to evaluate the status of the disease under treatment and the general health of the patient prior to, and following one or more cycles of combination therapy in order to determine the optimal therapeutic combination.

[0616] c. iii Immunotherapies and Biological Therapies

[0617] Therapeutic compounds also include, but are not limited to, compounds that exert an immunotherapeutic effect, stimulate or suppress the immune system, carry a therapeutic compound, or a combination thereof. Optionally, the therapeutic agent can exhibit or manifest additional properties, such as, properties that permit its use as an imaging agent, as described elsewhere herein. Such therapeutic compounds include, but are not limited to, anti-cancer antibodies, radiation therapy, siRNA molecules and compounds that suppress the immune system (i.e. immunosuppressors, immunosuppressive agents). In some cases, it is desirable to administer an immunosuppressive agent to a subject to suppress the immune system prior to the administration of the virus in order to minimize any adverse reactions to the virus. Exemplary immunosuppressive agents include, but are not limited to, glucocorticoids, alkylating agents, antimetabolites, interferons and immunosuppressive antibodies (e.g., anti-CD3 and anti-IL2 receptor antibodies).

[0618] Immunotherapy also includes for example, immune-stimulating molecules (protein-based or non-protein-based), cells and antibodies Immunotherapy treatments can include stimulating immune cells to act more effectively or to make the tumor cells or tumor associated antigens recognizable to the immune system (i.e., break tolerance).

[0619] Cytokines and growth factors include, but are not limited to, interleukins, such as, for example, interleukin-1, interleukin-2, interleukin-6 and interleukin-12, tumor necrosis factors, such as tumor necrosis factor alpha (TNF-α), interferons such as interferon gamma (IFN-γ), granulocyte macrophage colony stimulating factors (GM-CSF), angiogenins, and tissue factors.

[0620] Anti-cancer antibodies include, but are not limited to, Rituximab, ADEPT, Trastuzumab (Herceptin®), Tositumomab (Bexxar®), Cetuximab (Erbitux®), Ibritumomab (Zevalin®), Alemtuzumab (Campath®-1H), Epratuzumab (LymphoCide®), Gemtuzumab ozogamicin (Mylotarg®), Bevacimab (Avastin®), Tarceva® (Erlotinib), SUTENT® (sunitinib malate), Panorex® (Edrecolomab), RITUXAN® (Rituximab), Zevalin® (90Y-ibritumomab tiuexetan), Mylotarg® (Gemtuzumab Ozogamicin) and Campath® (Alemtuzumab).

[0621] Thus, provided herein are methods of administering to a subject one or more therapeutic compounds that can act in conjunction with the virus to stimulate or enhance the immune system, thereby enhancing the effect of the virus. Such immunotherapy can be either delivered as a separate therapeutic modality or could be encoded (if the immunotherapy is protein-based) by the administered virus.

[0622] Biological therapies are treatments that use natural body substances or drugs made from natural body substances. They can help treat a cancer and control side effects caused by other cancer treatments such as chemotherapy. Biological therapies are also sometimes called Biological Response Modifiers (BRM's), biologic agents or simply “biologics” because they stimulate the body to respond biologically (or naturally) to cancer Immunotherapy is treatment using natural substances that the body uses to fight infection and disease. Because it uses natural substances, immunotherapy is also a biological therapy. There are several types of drugs that come under the term biological therapy: these include, for example, monoclonal antibodies (mAbs), cancer vaccines, growth factors for blood cells, cancer growth inhibitors, anti-angiogenic factors, interferon alpha, interleukin-2 (IL-2), gene therapy and BCG vaccine for bladder cancer

[0623] Monoclonal antibodies (mAbs) are of particular interest for treating cancer because of the specificity of binding to a unique antigen and the ability to produce large quantities in the laboratory for mass distribution. Monoclonal antibodies can be engineered to act in the same way as immune system proteins: that is, to seek out and kill foreign matter in your body, such as viruses. Monoclonal antibodies can be designed to recognize epitopes on the surface of cancer cells. The antibodies target specifically bind to the epitopes and either kill the cancer cells or deliver a therapeutic agent to the cancer cell. Methods of conjugating therapeutic agents to antibodies are well-known in the art. Different antibodies have to be made for different types of cancer; for example, Rituximab recognizes CD20 protein on the outside of non-Hodgkin's lymphoma cells; ADEPT is a treatment using antibodies that recognize bowel (colon) cancer; and Trastuzumab (Herceptin®) recognizes breast cancer cells that produce too much of the protein HER 2 (“HER 2 positive”). Other antibodies include, for example, Tositumomab (Bexxar®), Cetuximab (Erbitux®), Ibritumomab (Zevalin®), Alemtuzumab (Campath®-1H), Epratuzumab (LymphoCide®), Gemtuzumab ozogamicin (Mylotarg®) and Bevacimab (Avastin®). Thus, the viruses provided herein can be administered concurrently with, or sequentially to, one or more monoclonal antibodies in the treatment of cancer. In one example, additional therapy is administered in the form of one or more of any of the other treatment modalities provided herein.

[0624] Rather than attempting to prevent infection, such as is the case with the influenza virus, cancer vaccines help treat the cancer once it has developed. The aim of cancer vaccines is to stimulate the immune response. Cancer vaccines include, for example, antigen vaccines, whole cell vaccines, dendritic cell vaccines, DNA vaccines and anti-idiotype vaccines. Antigen vaccines are vaccines made from tumor-associated antigens in, or produced by, cancer cells. Antigen vaccines stimulate a subject's immune system to attack the cancer. Whole cell vaccines are vaccines that use the whole cancer cell, not just a specific antigen from it, to make the vaccine. The vaccine is made from a subject's own cancer cells, another subject's cancer cells or cancer cells grown in a laboratory. The cells are treated in the laboratory, usually with radiation, so that they can't grow, and are administered to the subject via injection or through an intravenous drip into the bloodstream so they can stimulate the immune system to attack the cancer. One type of whole cell vaccine is a dendritic cell vaccine, which helps the immune system to recognize and attack abnormal cells, such as cancer cells. Dendritic cell vaccines are made by growing dendritic cells alongside the cancer cells in the lab. The vaccine is administered to stimulate the immune system to attack the cancer. Anti-idiotype vaccines are vaccines that stimulate the body to make antibodies against cancer cells. Cancer cells make some tumor-associated antigens that the immune system recognizes as foreign. However, because cancer cells are similar to non-cancer cells, the immune system can respond weakly. DNA vaccines boost the immune response. DNA vaccines are made from DNA from cancer cells that carry the genes for the tumor-associated antigens. When a DNA vaccine is injected, it enables the cells of the immune system to recognize the tumor-associated antigens, and activates the cells in the immune system (i.e., breaking tolerance). The most promising results from using DNA vaccines are in treating melanoma. Thus, the viruses provided herein can be administered concurrently with, or sequentially to, a whole cell vaccine in the treatment of cancer. In one embodiment, additional therapy is administered in the form of one or more of any of the other treatment modalities provided herein.

[0625] Growth factors are natural substances that stimulate the bone marrow to make blood cells. Recombinant technology can be used to generate growth factors, which can be administered to a subject to increase the number of white blood cells, red blood cells and stem cells in the blood. Growth factors used in cancer treatment to boost white blood cells include Granulocyte Colony Stimulating Factor (G-CSF) also called filgrastim (Neupogen®) or lenograstim (Granocyte®) and Granulocyte and Macrophage Colony Stimulating Factor (GM-CSF), also called molgramostim. A growth factor to help treat anemia is erythropoietin (EPO). EPO encourages the body to make more red blood cells, which in turn, increases hemoglobin levels and the levels of oxygen in body tissues. Other growth factors are being developed which can boost platelets. Thus, the viruses provided herein can be administered concurrently with, or sequentially to, a growth factor such as GM-CSF, in the treatment of cancer. In one example, additional therapy is administered in the form of one or more of any of the other treatment modalities provided herein.

[0626] Cancer growth inhibitors use cell-signaling molecules which control the growth and multiplication of cells, such as cancer cells. Drugs that block these signaling molecules can stop cancers from growing and dividing. Cancer growth factors include, but are not limited to, tyrosine kinases. Thus, drugs that block tyrosine kinases are tyrosine kinase inhibitors (TKIs). Examples of TKIs include, but are not limited to, Erlotinib (Tarceva®, OSI-774), Gefitinib (Iressa®, ZD 1839) and Imatinib (Glivec®, STI 571). Another type of growth inhibitor is Bortezomib (Velcade®) for multiple myeloma and for some other cancers. Velcade® is a proteasome inhibitor. Proteasomes are found in all cells and help break down proteins in cells. Interfering with the action of proteosomes causes a buildup of proteins in the cell to toxic levels; thereby killing the cancer cells. Cancer cells are more sensitive to Velcade® than normal cells. Thus, the viruses provided herein can be administered concurrently with, or sequentially to, a cancer growth inhibitor, such as Velcade®, in the treatment of cancer. In one embodiment, additional therapy is administered in the form of one or more of any of the other treatment modalities provided herein.

[0627] Cancers need a blood supply to expand and grow their own blood vessels as they get bigger. Without its own blood supply, a cancer cannot grow due to lack of nutrients and oxygen. Anti-angiogenic drugs stop tumors from developing their own blood vessels. Examples of these types of drugs include, but are not limited to, Thalidomide, mainly for treating myeloma but also in trials for other types of cancer, and Bevacizumab (Avastin®), a type of monoclonal antibody that has been investigated for bowel cancer. Thus, the viruses provided herein can be administered concurrently with, or sequentially to, an anti-angiogenic drug in the treatment of cancer. In one example, additional therapy is administered in the form of one or more of any of the other treatment modalities provided herein.

[0628] Cancer growth inhibitors use cell-signaling molecules which control the growth and multiplication of cells, such as cancer cells. Drugs that block these signaling molecules can stop cancers from growing and dividing. Cancer growth factors include, but are not limited to, tyrosine kinases. Thus, drugs that block tyrosine kinases are tyrosine kinase inhibitors (TKIs). Examples of TKIs include, but are not limited to, Erlotinib (Tarceva, OSI-774), Iressa (Gefitinib, ZD 1839) and Imatinib (Glivec, STI 571). Another type of growth inhibitor is Bortezomib (Velcade) for multiple myeloma and for some other cancers. Velcade is a proteasome inhibitor. Proteasomes are found in all cells and help break down proteins in cells. Interfering with the action of proteosomes causes a buildup of proteins in the cell to toxic levels; thereby killing the cancer cells. Cancer cells are more sensitive to Velcade than normal cells. Thus, the viruses provided herein can be administered concurrently with, or sequentially to, a cancer growth inhibitor, such as Velcade, in the treatment of cancer. In one embodiment, additional therapy is administered in the form of one or more of any of the other treatment modalities provided herein.

[0629] Cancers need a blood supply to expand and grow their own blood vessels as they get bigger. Without its own blood supply, a cancer cannot grow due to lack of nutrients and oxygen. Anti-angiogenic drugs stop tumors from developing their own blood vessels. Examples of these types of drugs include, but are not limited to, Thalidomide, mainly for treating myeloma but also in trials for other types of cancer, and Bevacizumab (Avastin), a type of monoclonal antibody that has been investigated for bowel cancer. Thus, the viruses provided herein can be administered concurrently with, or sequentially to, an anti-angiogenic drug in the treatment of cancer. In one example, additional therapy is administered in the form of one or more of any of the other treatment modalities provided herein.

[0630] Interferon-alpha (IFN-α) is a natural substance produced in the body, in very small amounts, as part of the immune response. IFN-α is administered as a treatment to boost the immune system and help fight cancers such as renal cell (kidney) cancer, malignant melanoma, multiple myeloma and some types of leukemias. IFN-α works in several ways: it can help to stop cancer cells growing, it can also boost the immune system to help it attack the cancer, and it can affect the blood supply to the cancer cells. Thus, the viruses provided herein can be administered concurrently with, or sequentially to, IFN-α in the treatment of cancer. In one embodiment, additional therapy is administered in the form of one or more of any of the other treatment modalities provided herein.

[0631] Administration of IL-2 is a biological therapy drug because it is naturally produced by the immune system. Thus, it is also an immunotherapy. Interleukin 2 is used in treating renal cell (kidney) cancer, and is being tested in clinical trials for several other types of cancers. IL-2 works directly on cancer cells by interfering with cell grow and proliferation; it stimulates the immune system by promoting the growth of killer T cells and other cells that attack cancer cells; and it also stimulates cancer cells to secrete chemoattractants that attract immune system cells. IL-2 is generally administered as a subcutaneous injection just under the skin once daily for 5 days, followed by 2 days rest. The cycle of injections is repeated for 4 weeks followed by a week without treatment. The treatment regimen and the number of cycles administered depend on the type of cancer and how it responds to the treatment. IL-2 can be self-administered or administered by a health professional. Alternatively, IL-2 can be administered intravenously via injection or drip. Thus, the viruses provided herein can be administered concurrently with, or sequentially to, IL-2 in the treatment of cancer. In one embodiment, additional therapy is administered in the form of one or more of any of the other treatment modalities provided herein.

[0632] Gene therapy involves treating cancer by blocking abnormal genes in cancer cells, repairing or replacing abnormal genes in cancer cells, encouraging even more genes to become abnormal in cancer cells so that they die or become sensitive to treatment, using viruses to carry treatment-activating enzymes into the cancer cells, or a combination thereof. As a result, cancer cells die due to damage in the cell. Cancer cells develop as a result of several types of mutations in several of their genes. Targeted genes include, but are not limited to, those that encourage the cell to multiply (i.e., oncogenes), genes that stop the cell from multiplying (i.e., tumor suppressor genes) and genes that repair other damaged genes. Gene therapy can involve repair of damaged oncogenes or blocking the proteins that the oncogenes produce. The tumor suppressor gene, p53, is damaged in many human cancers. Viruses have been used to deliver an undamaged p53 gene into cancer cells, and early clinical trials are now in progress looking at treating cancers with modified p53-producing viruses. Gene therapy could be used to replace the damaged DNA repairing genes. In an alternative example, methods of increasing DNA damage within a tumor cell can promote death of the tumor cell or cause increased susceptibility of the tumor cell to other cancer treatments, such as radiotherapy or chemotherapy. Thus, the viruses provided herein can be administered concurrently with, or sequentially to, any of the gene therapy methods provided herein or known in the art in the treatment of cancer. In one embodiment, additional therapy is administered in the form of one or more of any of the other treatment modalities provided herein.

[0633] Treatment of early stage bladder cancer is called intravesical treatment, which is mainly used to treat stage T1 bladder cancers that are high grade (grade 3 or G3) or carcinoma in situ of the bladder (also known as T is or CIS). BCG is a vaccine for tuberculosis (TB), which also has been found to be effective in treating CIS and preventing bladder cancers from recurring. In some cases, BCG vaccines have been used for treating grade 2 early bladder cancer. Because bladder cancer can occur anywhere in the bladder lining, it cannot be removed in the same way as the papillary early bladder cancers. Rather a BCG vaccine is administered using intravesical therapy; that is, first, a catheter (tube) put is inserted into the bladder, followed by intra-catheter administration of a BCG vaccine and/or a chemotherapy. BCG treatment occurs weekly for 6 weeks or more depending on the effect on the bladder cancer. BCG treatment of bladder cancer can be combined with other types of treatments, such as administration of chemotherapy (intravesical), IL-2, treatment with drugs that make cells sensitive to light, vitamins, and photodynamic therapy. Thus, the viruses provided herein can be administered concurrently with, or sequentially to, BCG vaccines in the treatment of cancer. In one embodiment, additional therapy is administered in the form of one or more of any of the other treatment modalities provided herein.

[0634] C. Monitoring

[0635] The methods provided herein can further include one or more steps of monitoring the subject, monitoring the tumor, and/or monitoring the virus administered to the subject. Any of a variety of monitoring steps can be included in the methods provided herein, including, but not limited to, monitoring tumor size, monitoring anti-(tumor antigen) antibody titer, monitoring the presence and/or size of metastases, monitoring the subject's lymph nodes, monitoring the subject's weight or other health indicators including blood or urine markers, monitoring anti-(viral antigen) antibody titer, monitoring viral expression of a detectable gene product, and directly monitoring viral titer in a tumor, tissue or organ of a subject.

[0636] The purpose of the monitoring can be simply for assessing the health state of the subject or the progress of therapeutic treatment of the subject, or can be for determining whether or not further administration of the same or a different virus is warranted, or for determining when or whether or not to administer a compound to the subject where the compound can act to increase the efficacy of the therapeutic method, or the compound can act to decrease the pathogenicity of the virus administered to the subject.

[0637] 1. Monitoring Viral Gene Expression

[0638] In some embodiments, the methods provided herein can include monitoring one or more virally expressed genes. Viruses can express one or more detectable gene products, including but not limited to, detectable proteins (e g luminescent or fluorescent proteins) or proteins that induce a detectable signal (e.g. proteins that bind or transport detectable compounds or modify substrates to produce a signal). The infected cells/tissue can thus be imaged by one more optical or non-optical imaging methods.

[0639] As provided herein, measurement of a detectable gene product expressed by a virus can provide an accurate determination of the level of virus present in the subject. As further provided herein, measurement of the location of the detectable gene product, for example, by imaging methods including, but not limited to, magnetic resonance, fluorescence, and tomographic methods, can determine the localization of the virus in the subject. Accordingly, the methods provided herein that include monitoring a detectable viral gene product can be used to determine the presence or absence of the virus in one or more organs or tissues of a subject, and/or the presence or absence of the virus in a tumor or metastases of a subject. Further, the methods provided herein that include monitoring a detectable viral gene product can be used to determine the titer of virus present in one or more organs, tissues, tumors or metastases. Methods that include monitoring the localization and/or titer of viruses in a subject can be used for determining the pathogenicity of a virus; since viral infection, and particularly the level of infection, of normal tissues and organs can indicate the pathogenicity of the probe, methods of monitoring the localization and/or amount of viruses in a subject can be used to determine the pathogenicity of a virus. Since methods provided herein can be used to monitor the amount of viruses at any particular location in a subject, the methods that include monitoring the localization and/or titer of viruses in a subject can be performed at multiple time points, and, accordingly can determine the rate of viral replication in a subject, including the rate of viral replication in one or more organs or tissues of a subject; accordingly, the methods of monitoring a viral gene product can be used for determining the replication competence of a virus. The methods provided herein also can be used to quantitate the amount of virus present in a variety of organs or tissues, and tumors or metastases, and can thereby indicate the degree of preferential accumulation of the virus in a subject; accordingly, the viral gene product monitoring methods provided herein can be used in methods of determining the ability of a virus to accumulate in tumor or metastases in preference to normal tissues or organs. Since the viruses used in the methods provided herein can accumulate in an entire tumor or can accumulate at multiple sites in a tumor, and can also accumulate in metastases, the methods provided herein for monitoring a viral gene product can be used to determine the size of a tumor or the number of metastases that are present in a subject. Monitoring such presence of viral gene product in tumor or metastasis over a range of time can be used to assess changes in the tumor or metastasis, including growth or shrinking of a tumor, or development of new metastases or disappearance of metastases, and also can be used to determine the rate of growth or shrinking of a tumor, or development of new metastases or disappearance of metastases, or the change in the rate of growth or shrinking of a tumor, or development of new metastases or disappearance of metastases. Accordingly, the methods of monitoring a viral gene product can be used for monitoring a neoplastic disease in a subject, or for determining the efficacy of treatment of a neoplastic disease, by determining rate of growth or shrinking of a tumor, or development of new metastases or disappearance of metastases, or the change in the rate of growth or shrinking of a tumor, or development of new metastases or disappearance of metastases.

[0640] Any of a variety of detectable proteins can be detected in the monitoring methods provided herein; an exemplary, non-limiting list of such detectable proteins includes any of a variety of fluorescent proteins (e.g., green or red fluorescent proteins), any of a variety of luciferases, transferrin or other iron binding proteins; or receptors, binding proteins, and antibodies, where a compound that specifically binds the receptor, binding protein or antibody can be a detectable agent or can be labeled with a detectable substance (e.g., a radionuclide or imaging agent); or transporter proteins (e.g. hNET or hNIS) that can bind to and transport detectable molecules into the cell. Viruses expressing a detectable protein can be detected by a combination of the method provided herein and know in the art. Viruses expressing more than one detectable protein or two or more viruses expressing various detectable protein can be detected and distinguished by dual imaging methods. For example, a virus expressing a fluorescent protein and an iron binding protein can be detected in vitro or in vivo by low light fluorescence imaging and magnetic resonance, respectively. In another example, a virus expressing two or more fluorescent proteins can be detected by fluorescence imaging at different wavelength. In vivo dual imaging can be performed on a subject that has been administered a virus expressing two or more detectable gene products or two or more viruses each expressing one or more detectable gene products.

[0641] 2. Monitoring Tumor Size

[0642] Also provided herein are methods of monitoring tumor and/or metastasis size and location. Tumor and or metastasis size can be monitored by any of a variety of methods known in the art, including external assessment methods or tomographic or magnetic imaging methods. In addition to the methods known in the art, methods provided herein, for example, monitoring viral gene expression, can be used for monitoring tumor and/or metastasis size.

[0643] Monitoring size over several time points can provide information regarding the increase or decrease in size of a tumor or metastasis, and can also provide information regarding the presence of additional tumors and/or metastases in the subject. Monitoring tumor size over several time points can provide information regarding the development of a neoplastic disease in a subject, including the efficacy of treatment of a neoplastic disease in a subject.

### VII. Definitions

[0644] Unless defined otherwise, all terms of art, notations and other technical and scientific terms or terminology used herein are intended to have the same meaning as is commonly understood by one of ordinary skill in the art to which the claimed subject matter pertains. In some cases, terms with commonly understood meanings are defined herein for clarity and/or for ready reference, and the inclusion of such definitions herein should not necessarily be construed to represent a substantial difference over what is generally understood in the art.

[0645] As used herein, IHD-J virus strain refers to a virus strain mixture provided by ATCC® Catalog No. VR-156™ derived from the New York City Department of Health IHD strain. See Gallwitz et al., (2003) J Clin Microbiol. 41(9): 4068-4070.

[0646] As used herein, a VIP02 clonal strain or VIP02 clonal isolate refers to a virus that is derived from the IHD-J virus strain by plaque isolation, or other method in which a single clone is propagated, and that has a genome that is homogenous in sequence. Hence, a VIP02 clonal strain includes a virus whose genome can be present in a virus preparation propagated from an IHD-J strain mixture provided by ATCC® Catalog No. VR-156™ derived from the New York City Depart cent of Health IHD strain. A VIP02 clonal strain does not include a recombinant VIP02 virus that is genetically engineered by recombinant means using recombinant DNA methods to introduce heterologous nucleic acid. In particular, a VIP02 clonal strain has a genome that does not contain heterologous nucleic acid that contains an open reading frame encoding a heterologous protein, e.g., a heterologous gene product. For example, a VIP02 clonal strain has a genome that does not contain non-viral heterologous nucleic acid that contains an open reading frame encoding a non-viral heterologous protein, e.g., a heterologous gene product. As described herein, however, it is understood that any of the VIP02 clonal strains provided herein can be modified in its genome by recombinant means to generate a recombinant virus. For example, a VIP02 clonal strain can be modified to generate a recombinant VIP02 virus that contains insertion of nucleotides that contain an open reading frame encoding a heterologous protein, e.g., a heterologous gene product.

[0647] As used herein, VIP02 is an IHD-J derived clonal strain that has a genome having a sequence of nucleotides set forth in SEQ ID NO:1, or a genome having a sequence of nucleotides that has at least 99% sequence identity to the sequence of nucleotides set forth in SEQ ID NO:1.

[0648] As used herein, a modified VIP02 virus strain refers to a VIP02 virus that has a genome that comprises one or more modifications, such as one or more modifications selected from among a substitution, an insertion, and a deletion of one or more nucleotides, including combinations thereof, as compared to an unmodified parental VIP02 virus. Typically, the genome of the virus is modified by substitution (replacement), insertion (addition) or deletion (truncation) of nucleotides. Modifications can be made using any method known to one of skill in the art such as genetic engineering and recombinant DNA methods. Hence, a modified virus is a virus that is altered in its genome compared to the genome of a parental virus. Exemplary modified viruses have one or more heterologous nucleic acid sequences inserted into the genome of the virus. Typically, the heterologous nucleic acid contains an open reading frame encoding a heterologous protein, e.g., a heterologous gene product. For example, modified viruses herein can contain one or more heterologous nucleic acid sequences in the form of a gene expression cassette for the expression of a heterologous gene.

[0649] As used herein, VIR11 is a modified VIP02 clonal strain that has a genome having a sequence of nucleotides set forth in SEQ ID NO:3, or a genome having a sequence of nucleotides that has at least 99% sequence identity to the sequence of nucleotides set forth in SEQ ID NO:3.

[0650] As used herein, VIR13 is a modified VIP02 clonal strain that has a genome having a sequence of nucleotides set forth in SEQ ID NO:4, or a genome having a sequence of nucleotides that has at least 99% sequence identity to the sequence of nucleotides set forth in SEQ ID NO:4.

[0651] As used herein, VIR37 is a modified VIP02 clonal strain that has a genome having a sequence of nucleotides set forth in SEQ ID NO: 6, or a genome having a sequence of nucleotides that has at least 99% sequence identity to the sequence of nucleotides set forth in SEQ ID NO: 6.

[0652] As used herein, VIR40 is a modified VIP02 clonal strain that has a genome having a sequence of nucleotides set forth in SEQ ID NO: 7, or a genome having a sequence of nucleotides that has at least 99% sequence identity to the sequence of nucleotides set forth in SEQ ID NO: 7.

[0653] As used herein, VIR41 is a modified VIP02 clonal strain that has a genome having a sequence of nucleotides set forth in SEQ ID NO: 8, or a genome having a sequence of nucleotides that has at least 99% sequence identity to the sequence of nucleotides set forth in SEQ ID NO: 8.

[0654] As used herein, VIR42 is a modified VIP02 clonal strain that has a genome having a sequence of nucleotides set forth in SEQ ID NO: 9, or a genome having a sequence of nucleotides that has at least 99% sequence identity to the sequence of nucleotides set forth in SEQ ID NO:9.

[0655] As used herein, VIR46 is a modified VIP02 clonal strain that has a genome having a sequence of nucleotides set forth in SEQ ID NO: 10, or a genome having a sequence of nucleotides that has at least 99% sequence identity to the sequence of nucleotides set forth in SEQ ID NO: 10.

[0656] As used herein, VIR49 is a modified VIP02 clonal strain that has a genome having a sequence of nucleotides set forth in SEQ ID NO: 11, or a genome having a sequence of nucleotides that has at least 99% sequence identity to the sequence of nucleotides set forth in SEQ ID NO: 11.

[0657] As used herein, VIR52 is a modified VIP02 clonal strain that has a genome having a sequence of nucleotides set forth in SEQ ID NO: 12, or a genome having a sequence of nucleotides that has at least 99% sequence identity to the sequence of nucleotides set forth in SEQ ID NO: 12.

[0658] As used herein, VIR71 is a modified VIP02 clonal strain that has a genome having a sequence of nucleotides set forth in SEQ ID NO: 13, or a genome having a sequence of nucleotides that has at least 99% sequence identity to the sequence of nucleotides set forth in SEQ ID NO: 13.

[0659] As used herein, VIR86 is a modified VIP02 clonal strain that has a genome having a sequence of nucleotides set forth in SEQ ID NO: 47, or a genome having a sequence of nucleotides that has at least 99% sequence identity to the sequence of nucleotides set forth in SEQ ID NO: 47.

[0660] As used herein, VIR93 is a modified VIP02 clonal strain that has a genome having a sequence of nucleotides set forth in SEQ ID NO: 49, or a genome having a sequence of nucleotides that has at least 99% sequence identity to the sequence of nucleotides set forth in SEQ ID NO: 49.

[0661] As used herein, VIR94 is a modified VIP02 clonal strain that has a genome having a sequence of nucleotides set forth in SEQ ID NO: 48, or a genome having a sequence of nucleotides that has at least 99% sequence identity to the sequence of nucleotides set forth in SEQ ID NO: 48.

[0662] As used herein, VIR96 is a modified VIP02 clonal strain that has a genome having a sequence of nucleotides set forth in SEQ ID NO: 50, or a genome having a sequence of nucleotides that has at least 99% sequence identity to the sequence of nucleotides set forth in SEQ ID NO: 50.

[0663] As used herein, VIR100 is a modified VIP02 clonal strain that has a genome having a sequence of nucleotides set forth in SEQ ID NO: 80, or a genome having a sequence of nucleotides that has at least 99% sequence identity to the sequence of nucleotides set forth in SEQ ID NO: 80.

[0664] As used herein, VIR102 is a modified VIP02 clonal strain that has a genome having a sequence of nucleotides set forth in SEQ ID NO: 81, or a genome having a sequence of nucleotides that has at least 99% sequence identity to the sequence of nucleotides set forth in SEQ ID NO: 81.

[0665] As used herein, VIR10³ is a modified VIP02 clonal strain that has a genome having a sequence of nucleotides set forth in SEQ ID NO: 82, or a genome having a sequence of nucleotides that has at least 99% sequence identity to the sequence of nucleotides set forth in SEQ ID NO: 82.

[0666] As used herein, VIR104 is a modified VIP02 clonal strain that has a genome having a sequence of nucleotides set forth in SEQ ID NO: 83, or a genome having a sequence of nucleotides that has at least 99% sequence identity to the sequence of nucleotides set forth in SEQ ID NO: 83.

[0667] As used herein, VIR105 is a modified VIP02 clonal strain that has a genome having a sequence of nucleotides set forth in SEQ ID NO: 84, or a genome having a sequence of nucleotides that has at least 99% sequence identity to the sequence of nucleotides set forth in SEQ ID NO: 84.

[0668] As used herein, VIR106 is a modified VIP02 clonal strain that has a genome having a sequence of nucleotides set forth in SEQ ID NO: 85, or a genome having a sequence of nucleotides that has at least 99% sequence identity to the sequence of nucleotides set forth in SEQ ID NO: 85.

[0669] As used herein, VIR109 is a modified VIP02 clonal strain that has a genome having a sequence of nucleotides set forth in SEQ ID NO: 86, or a genome having a sequence of nucleotides that has at least 99% sequence identity to the sequence of nucleotides set forth in SEQ ID NO: 86.

[0670] As used herein, VIR111 is a modified VIP02 clonal strain that has a genome having a sequence of nucleotides set forth in SEQ ID NO: 87, or a genome having a sequence of nucleotides that has at least 99% sequence identity to the sequence of nucleotides set forth in SEQ ID NO: 87.

[0671] As used herein, VIR113 is a modified VIP02 clonal strain that has a genome having a sequence of nucleotides set forth in SEQ ID NO: 88, or a genome having a sequence of nucleotides that has at least 99% sequence identity to the sequence of nucleotides set forth in SEQ ID NO: 88.

[0672] As used herein, VIR114 is a modified VIP02 clonal strain that has a genome having a sequence of nucleotides set forth in SEQ ID NO: 89, or a genome having a sequence of nucleotides that has at least 99% sequence identity to the sequence of nucleotides set forth in SEQ ID NO: 89.

[0673] As used herein, VIR115 is a modified VIP02 clonal strain that has a genome having a sequence of nucleotides set forth in SEQ ID NO: 90, or a genome having a sequence of nucleotides that has at least 99% sequence identity to the sequence of nucleotides set forth in SEQ ID NO: 90.

[0674] As used herein, VIR123 is a modified VIP02 clonal strain that has a genome having a sequence of nucleotides set forth in SEQ ID NO: 91, or a genome having a sequence of nucleotides that has at least 99% sequence identity to the sequence of nucleotides set forth in SEQ ID NO: 91.

[0675] As used herein, VIR127 is a modified VIP02 clonal strain that has a genome having a sequence of nucleotides set forth in SEQ ID NO: 92, or a genome having a sequence of nucleotides that has at least 99% sequence identity to the sequence of nucleotides set forth in SEQ ID NO: 92.

[0676] As used herein, VIR128 is a modified VIP02 clonal strain that has a genome having a sequence of nucleotides set forth in SEQ ID NO: 93, or a genome having a sequence of nucleotides that has at least 99% sequence identity to the sequence of nucleotides set forth in SEQ ID NO: 93.

[0677] As used herein, “production by recombinant methods” or “methods using recombinant DNA methods” or variations thereof refers to the use of the well-known methods of molecular biology for expressing proteins encoded by cloned DNA.

[0678] As used herein, a “gene expression cassette” or “expression cassette” is a nucleic acid construct, containing nucleic acid elements that are capable of effecting expression of a gene in hosts that are compatible with such sequences. Expression cassettes include at least promoters and, optionally, transcription termination signals. Typically, the expression cassette includes a nucleic acid to be transcribed operably linked to a promoter. Expression cassettes can contain genes that encode, for example, a therapeutic gene product, or a detectable protein or a selectable marker gene.

[0679] As used herein, a virus preparation, for example an IHD-J virus preparation, aVIP02 virus preparation or a preparation of a recombinant or modified virus, refers to a virus composition obtained by propagation of a virus strain, for example an IHD-J virus strain, an VIP02 clonal strain or a modified or recombinant virus strain, in vivo or in vitro in a culture system. For example, an IHD-J/VIP02 virus preparation refers to a viral composition obtained by propagation of a virus strain in host cells, typically upon purification from the culture system using standard methods known in the art. A virus preparation generally is made up of a number of virus particles or virions. If desired, the number of virus particles in the sample or preparation can be determined using a plaque assay to calculate the number of plaque forming units per sample unit volume (pfu/mL), assuming that each plaque formed is representative of one infective virus particle. Each virus particle or virion in a preparation can have the same genomic sequence compared to other virus particles (i.e. the preparation is homogenous in sequence) or can have different genomic sequences (i.e. the preparation is heterogenous in sequence). It is understood to those of skill in the art that, in the absence of clonal isolation, heterogeneity or diversity in the genome of a virus can occur as the virus reproduces, such as by homologous recombination events that occur in the natural selection processes of virus strains (Plotkin & Orenstein (eds) “Recombinant Vaccinia Virus Vaccines” in Vaccines, 3rd edition (1999)).

[0680] As used herein, a virus mixture is a virus preparation that contains a number of virus particles that differ in their genomic sequences. The virus mixture can be obtained by infecting a culture system, for example host cells, with two or more different virus strains, or one virus strain and genomic DNA or cloned DNA, followed by propagation and purification of the resulting virus. For purposes herein, a VIP02 virus preparation can include a virus mixture obtained by propagation of cells infected with a VIP02 strain and another virus, genomic DNA or cloned DNA, followed by isolation of a virus preparation from the culture, where the preparation contains progeny viruses produced by the infection. For example, the other virus strain can be poxvirus, such as avipox virus, myxoma virus or other vaccinia virus; a herpesvirus such as herpes simplex virus (HSV), cytomegalovirus (CMV), Epstein-Barr virus (EBV), hepadnaviruses (e.g., hepatitis B virus), polyoma viruses, papillomaviruses, adenoviruses and adeno-associated viruses; and single-stranded DNA viruses, such as parvoviruses. The other virus can be an attenuated virus, oncolytic virus or other virus with known anti-tumor activity and/or moderate to mild toxicity.

[0681] As used herein, “virus” refers to any of a large group of infectious entities that cannot grow or replicate without a host cell, including recombinant viruses and recombinant oncolytic viruses as described herein. Viruses typically contain a protein coat surrounding an RNA or DNA core of genetic material, but no semipermeable membrane, and are capable of growth and multiplication only in living cells. Viruses include, but are not limited to, poxviruses, herpesviruses, adenoviruses, adeno-associated viruses, lentiviruses, retroviruses, rhabdoviruses, papillomaviruses, vesicular stomatitis virus, measles virus, Newcastle disease virus, picornavirus, sindbis virus, papillomavirus, parvovirus, reovirus, coxsackievirus, influenza virus, mumps virus, poliovirus, and Semliki Forest virus.

[0682] As used herein, oncolytic viruses refer to viruses that replicate selectively in tumor cells in tumorous subjects. Some oncolytic viruses can kill a tumor cell following infection of the tumor cell. For example, an oncolytic virus can cause death of the tumor cell by lysing the tumor cell or inducing cell death of the tumor cell.

[0683] As used herein, “toxicity” (also referred to as virulence or pathogenicity herein) with reference to a virus refers to the deleterious or toxic effects to a host upon administration of the virus. For an oncolytic virus, such as IDH-J/VIP02, the toxicity of a virus is associated with its accumulation in non-tumorous organs or tissues, which can affect the survival of the host or result in deleterious or toxic effects. Toxicity can be measured by assessing one or more parameters indicative of toxicity. These include accumulation in non-tumorous tissues and effects on viability or health of the subject to whom it has been administered, such as effects on weight.

[0684] As used herein, “reduced toxicity” means that the toxic or deleterious effects upon administration of the virus to a host are attenuated or lessened compared to a host not treated with the virus or compared to a host that is administered with another reference or control virus. For purposes herein, exemplary of a reference or control virus is the VIP02 virus strain. Whether toxicity is reduced or lessened can be determined by assessing the effect of a virus and, if necessary, a control or reference virus, on a parameter indicative of toxicity. It is understood that when comparing the activity of two or more different viruses, the amount of virus (e.g. pfu) used in an in vitro assay or administered in vivo is the same or similar and the conditions (e.g. in vivo dosage regime) of the in vitro assay or in vivo assessment are the same or similar. For example, when comparing effects upon in vivo administration of a virus and a control or reference virus the subjects are the same species, size, gender and the virus is administered in the same or similar amount under the same or similar dosage regime. In particular, a virus with reduced toxicity can mean that upon administration of the virus to a host, such as for the treatment of a disease, the virus does not accumulate in non-tumorous organs and tissues in the host to an extent that results in damage or harm to the host, or that impacts survival of the host to a greater extent than the disease being treated does or to a greater extent than a control or reference virus does. For example, a virus with reduced toxicity includes a virus that does not result in death of the subject over the course of treatment.

[0685] As used herein, accumulation of a virus in a particular tissue refers to the distribution of the virus in particular tissues of a host organism after a time period following administration of the virus to the host, long enough for the virus to infect the host's organs or tissues. As one skilled in the art will recognize, the time period for infection of a virus will vary depending on the virus, the organ(s) or tissue(s), the immunocompetence of the host and dosage of the virus. Generally, accumulation can be determined at time points from about less than 1 day, about 1 day to about 2, 3, 4, 5, 6 or 7 days, about 1 week to about 2, 3 or 4 weeks, about 1 month to about 2, 3, 4, 5, 6 months or longer after infection with the virus. For purposes herein, the viruses preferentially accumulate in immunoprivileged tissue, such as inflamed tissue or tumor tissue, but are cleared from other tissues and organs, such as non-tumor tissues, in the host to the extent that toxicity of the virus is mild or tolerable and at most, not fatal.

[0686] As used herein, “preferential accumulation” refers to accumulation of a virus at a first location at a higher level than accumulation at a second location (i.e., the concentration of viral particles, or titer, at the first location is higher than the concentration of viral particles at the second location). Thus, a virus that preferentially accumulates in immunoprivileged tissue (tissue that is sheltered from the immune system), such as inflamed tissue, and tumor tissue, relative to normal tissues or organs, refers to a virus that accumulates in immunoprivileged tissue, such as tumor, at a higher level (i.e., concentration or viral titer) than the virus accumulates in normal tissues or organs.

[0687] As used herein, “anti-tumor activity” or “anti-tumorigenic” refers to virus strains that prevent or inhibit the formation or growth of tumors in vitro or in vivo in a subject. Anti-tumor activity can be determined by assessing a parameter or parameters indicative of anti-tumor activity.

[0688] As used herein, “greater” or “improved” activity with reference to anti-tumor activity or anti-tumorigenicity means that a virus strain is capable of preventing or inhibiting the formation or growth of tumors in vitro or in vivo in a subject to a greater extent than a reference or control virus or to a greater extent than absence of treatment with the virus. For purposes herein, exemplary of a reference or control virus is the VIP02 virus. Whether anti-tumor activity is “greater” or “improved” can be determined by assessing the effect of a virus and, if necessary, a control or reference virus, on a parameter indicative of anti-tumor activity. It is understood that when comparing the activity of two or more different viruses, the amount of virus (e.g. pfu) used in an in vitro assay or administered in vivo is the same or similar, and the conditions (e.g. in vivo dosage regime) of the in vitro assay or in vivo assessment are the same or similar.

[0689] As used herein, a heterologous nucleic acid (also referred to as exogenous nucleic acid or foreign nucleic acid) refers to a nucleic acid that is not normally produced in vivo by an organism or virus from which it is expressed or that is produced by an organism or a virus but is at a different locus, or that mediates or encodes mediators that alter expression of endogenous nucleic acid, such as DNA, by affecting transcription, translation, or other regulatable biochemical processes. Hence, heterologous nucleic acid is often not normally endogenous to a virus into which it is introduced. Heterologous nucleic acid can refer to a nucleic acid molecule from another virus in the same organism or another organism, including the same species or another species. Heterologous nucleic acid, however, can be endogenous, but is nucleic acid that is expressed from a different locus or altered in its expression or sequence (e.g., a plasmid). Thus, heterologous nucleic acid includes a nucleic acid molecule not present in the exact orientation or position as the counterpart nucleic acid molecule, such as DNA, is found in a genome. Generally, although not necessarily, such nucleic acid encodes RNA and proteins that are not normally produced by the virus or in the same way in the virus in which it is expressed. Any nucleic acid, such as DNA, that one of skill in the art recognizes or considers as heterologous, exogenous or foreign to the virus in which the nucleic acid is expressed is herein encompassed by heterologous nucleic acid. Examples of heterologous nucleic acid include, but are not limited to, nucleic acid that encodes exogenous peptides/proteins, including diagnostic and/or therapeutic agents. Proteins that are encoded by heterologous nucleic acid can be expressed within the virus, secreted, or expressed on the surface of the virus in which the heterologous nucleic acid has been introduced.

[0690] As used herein, the expressions “nucleic acid sequence” or “nucleotide sequence” or “sequence of nucleotides” can be used interchangeably.

[0691] As used herein, a viral clonal strain or virus strain preparation that contains heterologous nucleic acid refers to such strains that contain nucleic acid not present in the parental clonal strain. For example, the virus whose sequence is set forth in SEQ ID NO: 1 (VIP02) is a clonal strain, but the virus of SEQ ID NO: 7, designated VIR40, contains heterologous nucleic acid, such as the insert designated iCasp9.

[0692] As used herein, a heterologous protein or heterologous gene product or heterologous polypeptide (also referred to as exogenous protein, exogenous polypeptide, foreign protein or foreign polypeptide) refers to a protein that is not normally produced by a virus.

[0693] As used herein, operative linkage of heterologous nucleic acids to regulatory and effector sequences of nucleotides, such as promoters, enhancers, transcriptional and translational stop sites, and other signal sequences refers to the relationship between such nucleic acid, such as DNA, and such sequences of nucleotides. For example, operative linkage of heterologous DNA to a promoter refers to the physical relationship between the DNA and the promoter such that the transcription of such DNA is initiated from the promoter by an RNA polymerase that specifically recognizes, binds to and transcribes the DNA. Thus, operatively linked or operationally associated refers to the functional relationship of a nucleic acid, such as DNA, with regulatory and effector sequences of nucleotides, such as promoters, enhancers, transcriptional and translational stop sites, and other signal sequences. For example, operative linkage of DNA to a promoter refers to the physical and functional relationship between the DNA and the promoter such that the transcription of such DNA is initiated from the promoter by an RNA polymerase that specifically recognizes, binds to and transcribes the DNA. In order to optimize expression and/or transcription, it can be necessary to remove, add or alter 5′ untranslated portions of the clones to eliminate extra, potentially inappropriate, alternative translation initiation (i.e., start) codons or other sequences that can interfere with or reduce expression, either at the level of transcription or translation. In addition, consensus ribosome binding sites can be inserted immediately 5′ of the start codon and can enhance expression (see, e.g., Kozak J. Biol. Chem. 266: 19867-19870 (1991) and Shine and Delgamo, Nature 254(5495):34-38 (1975)). The desirability of (or need for) such modification can be empirically determined.

[0694] As used herein, a heterologous promoter refers to a promoter that is not normally found in the wild-type organism or virus or that is at a different locus as compared to a wild-type organism or virus. A heterologous promoter is often not endogenous to a virus into which it is introduced, but has been obtained from another virus or prepared synthetically. A heterologous promoter can refer to a promoter from another virus in the same organism or another organism, including the same species or another species. A heterologous promoter, however, can be endogenous, but is a promoter that is altered in its sequence or occurs at a different locus (e.g., at a different location in the genome or on a plasmid). Thus, a heterologous promoter includes a promoter not present in the exact orientation or position as the counterpart promoter is found in a genome.

[0695] A synthetic promoter is a heterologous promoter that has a nucleotide sequence that is not found in nature. A synthetic promoter can be a nucleic acid molecule that has a synthetic sequence or a sequence derived from a native promoter or portion thereof. A synthetic promoter can also be a hybrid promoter composed of different elements derived from different native promoters.

[0696] As used herein, dosing regimen refers to the amount of agent, for example, a virus or other agent, administered, and the frequency of administration over the course of a cycle of administration. The dosing regimen is a function of the disease or condition to be treated, and thus can vary.

[0697] As used herein, frequency of administration refers to the number of times an agent is administered during the cycle of administration. For example, frequency can be days, weeks or months. For example, frequency can be administration once during a cycle of administration, two times, three times, four times, five times, six times or seven times. The frequency can refer to consecutive days during the cycle of administration. The particular frequency is a function of the particular disease or condition treated.

[0698] As used herein, a “cycle of administration” refers to the repeated schedule of the dosing regimen of administration of a virus that is repeated over successive administrations. For example, an exemplary cycle of administration is a 28 day cycle.

[0699] As used herein, treatment of a subject that has a condition, disorder or disease means any manner of treatment in which the symptoms of the condition, disorder or disease are ameliorated or otherwise beneficially altered. Treatment encompasses any pharmaceutical use of the viruses described and provided herein.

[0700] As used herein, a disease or disorder refers to a pathological condition in an organism resulting from, for example, infection or genetic defect, and characterized by identifiable symptoms. An exemplary disease as described herein is a neoplastic disease, such as cancer.

[0701] As used herein, neoplastic disease refers to any disorder involving cancer, including hyperplasia and tumor development, growth, metastasis and progression.

[0702] As used herein, cancer is a term for diseases caused by or characterized by any type of malignant tumor, including metastatic cancers, lymphatic tumors, and blood cancers. Exemplary cancers include, but are not limited to, leukemia, lymphoma, pancreatic cancer, lung cancer, ovarian cancer, breast cancer, cervical cancer, bladder cancer, prostate cancer, glioma tumors, adenocarcinomas, liver cancer and skin cancer. Exemplary cancers in humans include a bladder tumor, breast tumor, prostate tumor, basal cell carcinoma, biliary tract cancer, bladder cancer, bone cancer, brain and CNS cancer (e.g., glioma tumor), cervical cancer, choriocarcinoma, colon and rectum cancer, connective tissue cancer, cancer of the digestive system; endometrial cancer, esophageal cancer; eye cancer; cancer of the head and neck; gastric cancer; intra-epithelial neoplasm; kidney cancer; larynx cancer; leukemia; liver cancer; lung cancer (e.g., small cell and non-small cell); lymphoma including Hodgkin's and Non-Hodgkin's lymphoma; melanoma; myeloma, neuroblastoma, oral cavity cancer (e.g., lip, tongue, mouth, and pharynx); ovarian cancer; pancreatic cancer, retinoblastoma; rhabdomyosarcoma; rectal cancer, renal cancer, cancer of the respiratory system; sarcoma, skin cancer; stomach cancer, testicular cancer, thyroid cancer; uterine cancer, cancer of the urinary system, as well as other carcinomas and sarcomas. Exemplary cancers commonly diagnosed in dogs, cats, and other pets include, but are not limited to, lymphosarcoma, osteosarcoma, mammary tumors, mastocytoma, brain tumor, melanoma, adenosquamous carcinoma, carcinoid lung tumor, bronchial gland tumor, bronchiolar adenocarcinoma, fibroma, myxochondroma, pulmonary sarcoma, neurosarcoma, osteoma, papilloma, retinoblastoma, Ewing's sarcoma, Wilm's tumor, Burkitt's lymphoma, microglioma, neuroblastoma, osteoclastoma, oral neoplasia, fibrosarcoma, osteosarcoma and rhabdomyosarcoma, genital squamous cell carcinoma, transmissible venereal tumor, testicular tumor, seminoma, Sertoli cell tumor, hemangiopericytoma, histiocytoma, chloroma (e.g., granulocytic sarcoma), corneal papilloma, corneal squamous cell carcinoma, hemangiosarcoma, pleural mesothelioma, basal cell tumor, thymoma, stomach tumor, adrenal gland carcinoma, oral papillomatosis, hemangioendothelioma and cystadenoma, follicular lymphoma, intestinal lymphosarcoma, fibrosarcoma and pulmonary squamous cell carcinoma. Exemplary cancers diagnosed in rodents, such as a ferret, include, but are not limited to, insulinoma, lymphoma, sarcoma, neuroma, pancreatic islet cell tumor, gastric MALT lymphoma and gastric adenocarcinoma. Exemplary neoplasias affecting agricultural livestock include, but are not limited to, leukemia, hemangiopericytoma and bovine ocular neoplasia (in cattle); preputial fibrosarcoma, ulcerative squamous cell carcinoma, preputial carcinoma, connective tissue neoplasia and mastocytoma (in horses); hepatocellular carcinoma (in swine); lymphoma and pulmonary adenomatosis (in sheep); pulmonary sarcoma, lymphoma, Rous sarcoma, reticulo-endotheliosis, fibrosarcoma, nephroblastoma, B-cell lymphoma and lymphoid leukosis (in avian species); retinoblastoma, hepatic neoplasia, lymphosarcoma (lymphoblastic lymphoma), plasmacytoid leukemia and swimbladder sarcoma (in fish), caseous lymphadenitis (CLA): chronic, infectious, contagious disease of sheep and goats caused by the bacterium Corynebacterium pseudotuberculosis, and contagious lung tumor of sheep caused by jaagsiekte.

[0703] As used herein, a “metastasis” refers to the spread of cancer from one part of the body to another. For example, in the metastatic process, malignant cells can spread from the site of the primary tumor in which the malignant cells arose and move into lymphatic and blood vessels, which transport the cells to normal tissues elsewhere in an organism where the cells continue to proliferate. A tumor formed by cells that have spread by metastasis is called a “metastatic tumor,” a “secondary tumor” or a “metastasis.”

[0704] As used herein, treatment of a subject that has a neoplastic disease, including a tumor or metastasis, means any manner of treatment in which the symptoms of having the neoplastic disease are ameliorated or otherwise beneficially altered. Typically, treatment of a tumor or metastasis in a subject encompasses any manner of treatment that results in slowing of tumor growth, lysis of tumor cells, reduction in the size of the tumor, prevention of new tumor growth, or prevention of metastasis of a primary tumor, including inhibition vascularization of the tumor, tumor cell division, tumor cell migration or degradation of the basement membrane or extracellular matrix.

[0705] As used herein, amelioration or alleviation of the symptoms of a particular disorder, such as by administration of a particular pharmaceutical composition, refers to any lessening, whether permanent or temporary, lasting or transient that can be attributed to or associated with administration of the composition.

[0706] As used herein, an effective amount, or therapeutically effective amount, of a virus or compound for treating a particular disease is an amount to ameliorate, or in some manner reduce the symptoms associated with the disease. The amount will vary from one individual to another and will depend upon a number of factors, including, but not limited to, age, weight, the overall physical condition of the patient and the severity of the disease. A therapeutically effective amount can be administered as a single dosage or can be administered in multiple dosages according to a regimen, whereby it is effective. The amount can cure the disease but, typically, is administered in order to ameliorate the symptoms of the disease. Repeated administration can be required to achieve the desired amelioration of symptoms.

[0707] As used herein, an effective amount, or therapeutically effective amount, of a virus or compound for treating a neoplastic disease, including a tumor, a hyperplasia, or a metastasis is an amount to ameliorate, or in some manner reduce the symptoms associated with the neoplastic disease, including, but not limited to slowing of tumor growth, lysis of tumor cells, reduction in the size of the tumor and/or the size of metastasis, prevention of new tumor growth, or prevention of metastasis of a primary tumor.

[0708] As used herein, a tumor, also known as a neoplasm, is an abnormal mass of tissue that results when cells proliferate at an abnormally high rate and/or cells have lost the ability to die due to apoptotic signals. Tumors may show partial or total lack of structural organization and functional coordination with normal tissue. Tumors can be benign (not cancerous), or malignant (cancerous). As used herein, a tumor is intended to encompass hematopoietic tumors as well as solid tumors.

[0709] Malignant tumors can be broadly classified into three major types. Carcinomas are malignant tumors arising from epithelial structures (e.g. breast, prostate, lung, colon, and pancreas). Sarcomas are malignant tumors that originate from connective tissues, or mesenchymal cells, such as muscle, cartilage, fat or bone. Leukemias and lymphomas are malignant tumors affecting hematopoietic structures (structures pertaining to the formation of blood cells) including components of the immune system. Other malignant tumors include, but are not limited to, tumors of the nervous system (e.g. neurofibromatomas), germ cell tumors, and blastic tumors.

[0710] As used herein, proliferative disorders include any disorders involving abnormal proliferation of cells (i.e. cells proliferate more rapidly compared to normal tissue growth), such as, but not limited to, neoplastic diseases.

[0711] As used herein, a “tumor cell” is any cell that is part of a tumor. Typically, the viruses provided herein preferentially infect tumor cells in a subject compared to normal cells.

[0712] As used herein, a “metastatic cell” is a cell that has the potential for can form metastasis. Metastatic cells have the ability to metastasize from a first tumor in a subject and can colonize tissue at a different site in the subject to form a second tumor at the site.

[0713] As used herein, “tumorigenic cell” is a cell that, when introduced into a suitable site in a subject, can form a tumor. The cell can be non-metastatic or metastatic.

[0714] As used herein, a “normal cell” is a cell that is not derived from a tumor.

[0715] As used herein, the term “cell” refers to the basic unit of structure and function of a living organism as is commonly understood in the biological sciences. A cell can be a unicellular organism that is self-sufficient and that can exist as a functional whole independently of other cells. A cell can also be one that, when not isolated from the environment in which it occurs in nature, is part of a multicellular organism made up of more than one type of cell. Such a cell, which can be thought of as a “non-organism” or “non-organismal” cell, generally is specialized in that it performs only a subset of the functions performed by the multicellular organism as whole. Thus, this type of cell is not a unicellular organism. Such a cell can be a prokaryotic or eukaryotic cell, including animal cells, such as mammalian cells, human cells and non-human animal cells or non-human mammalian cells. Animal cells include any cell of animal origin that can be found in an animal Thus, animal cells include, for example, cells that make up the various organs, tissues and systems of an animal.

[0716] As used herein an “isolated cell” is a cell that exists in vitro and is separate from the organism from which it was originally derived.

[0717] As used herein, a “cell line” is a population of cells derived from a primary cell that is capable of stable growth in vitro for many generations. Cell lines are commonly referred to as “immortalized” cell lines to describe their ability to continuously propagate in vitro.

[0718] As used herein a “tumor cell line” is a population of cells that is initially derived from a tumor. Such cells typically have undergone some change in vivo such that they theoretically have indefinite growth in culture; unlike primary cells, which can be cultured only for a finite period of time. Moreover, such cells preferably can form tumors after they are injected into susceptible animals.

[0719] As used herein, a “primary cell” is a cell that has been isolated from a subject.

[0720] As used herein, a “host cell” or “target cell” are used interchangeably to mean a cell that can be infected by a virus.

[0721] As used herein, the term “tissue” refers to a group, collection or aggregate of similar cells generally acting to perform a specific function within an organism.

[0722] As used herein, the terms immunoprivileged cells and immunoprivileged tissues refer to cells and tissues, such as solid tumors, which are sequestered from the immune system. Generally, administration of a virus to a subject elicits an immune response that clears the virus from the subject. Immunoprivileged sites, however, are shielded or sequestered from the immune response, permitting the virus to survive and generally to replicate Immunoprivileged tissues include proliferating tissues, such as tumor tissues.

[0723] As used herein, therapeutic agents are agents that ameliorate the symptoms of a disease or disorder or ameliorate the disease or disorder. Therapeutic agent, therapeutic compound, or therapeutic regimens include conventional drugs and drug therapies, including vaccines for treatment or prevention (i.e., reducing the risk of getting a particular disease or disorder), which are known to those skilled in the art and described elsewhere herein. Therapeutic agents for the treatment of neoplastic disease include, but are not limited to, moieties that inhibit cell growth or promote cell death, that can be activated to inhibit cell growth or promote cell death, or that activate another agent to inhibit cell growth or promote cell death. Therapeutic agents for use in the methods provided herein can be, for example, an anticancer agent. Exemplary therapeutic agents include, for example, therapeutic microorganisms, such as therapeutic viruses and bacteria, cytokines, growth factors, photosensitizing agents, radionuclides, toxins, antimetabolites, signaling modulators, anticancer antibiotics, anticancer antibodies, angiogenesis inhibitors, radiation therapy, chemotherapeutic compounds or a combination thereof.

[0724] As used herein, an anticancer agent or compound (used interchangeably with “antitumor or antineoplastic agent”) refers to any agents, or compounds, used in anticancer treatment. These include any agents, when used alone or in combination with other compounds or treatments, that can alleviate, reduce, ameliorate, prevent, or place or maintain in a state of remission of clinical symptoms or diagnostic markers associated with neoplastic disease, tumors and cancer, and can be used in methods, combinations and compositions provided herein. Anticancer agents include antimetastatic agents. Exemplary anticancer agents include, but are not limited to, chemotherapeutic compounds (e.g., toxins, alkylating agents, nitrosoureas, anticancer antibiotics, antimetabolites, antimitotic s, topoisomerase inhibitors), cytokines, growth factors, hormones, photosensitizing agents, radionuclides, signaling modulators, anticancer antibodies, anticancer oligopeptides, anticancer oligonucleotides (e.g., antisense RNA and siRNA), angiogenesis inhibitors, radiation therapy, or a combination thereof. Exemplary chemotherapeutic compounds include, but are not limited to, Ara-C, cisplatin, carboplatin, paclitaxel, doxorubicin, gemcitabine, camptothecin, irinotecan, cyclophosphamide, 6-mercaptopurine, vincristine, 5-fluorouracil, and methotrexate. As used herein, reference to an anticancer or chemotherapeutic agent includes combinations or a plurality of anticancer or chemotherapeutic agents unless otherwise indicated.

[0725] As used herein, a “chemosensitizing agent” is an agent which modulates, attenuates, reverses, or affects a cell's or organism's resistance to a given chemotherapeutic drug or compound. The terms “modulator”, “modulating agent”, “attenuator”, “attenuating agent”, or “chemosensitizer” can be used interchangeably to mean “chemosensitizing agent.” In some examples, a chemosensitizing agent can also be a chemotherapeutic agent. Examples of chemosensitizing agents include, but are not limited to, radiation, calcium channel blockers (e.g., verapamil), calmodulin inhibitors (e.g., trifluoperazine), indole alkaloids (e.g., reserpine), quinolines (e.g., quinine), lysosomotropic agents (e.g., chloroquine), steroids (e.g., progesterone), triparanol analogs (e.g., tamoxifen), detergents (e.g., Cremophor® EL), texaphyrins, and cyclic antibiotics (e.g., cyclosporine).

[0726] As used herein, a compound produced in a tumor or other immunoprivileged site refers to any compound that is produced in the tumor or tumor environment by virtue of the presence of an introduced virus, generally a recombinant virus, expressing one or more gene products. For example, a compound produced in a tumor can be, for example, an encoded polypeptide or RNA, a metabolite, or compound that is generated by a recombinant polypeptide and the cellular machinery of the tumor or immunoprivileged tissue or cells.

[0727] As used herein, a subject includes any organism, including an animal for whom diagnosis, screening, monitoring or treatment is contemplated. Animals include mammals such as primates and domesticated animals. An exemplary primate is human. A patient refers to a subject, such as a mammal, primate, human, or livestock subject afflicted with a disease condition or for which a disease condition is to be determined or risk of a disease condition is to be determined.

[0728] As used herein, a delivery vehicle for administration refers to a lipid-based or other polymer-based composition, such as liposome, micelle or reverse micelle, that associates with an agent, such as a virus provided herein, for delivery into a host subject.

[0729] As used herein, vector (or plasmid) refers to a nucleic acid construct that contains discrete elements that are used to introduce heterologous nucleic acid into cells for either expression of the nucleic acid or replication thereof. The vectors typically remain episomal, but can be designed to effect stable integration of a gene or portion thereof into a chromosome of the genome. Selection and use of such vectors are well known to those of skill in the art. Expression vectors include vectors capable of expressing DNA that is operatively linked with regulatory sequences, such as promoter regions, that are capable of effecting expression of the DNA fragments. Thus, an expression vector refers to a recombinant DNA or RNA construct, such as a plasmid, a phage, recombinant virus or other vector that, upon introduction into an appropriate host cell, results in expression of the cloned DNA. Appropriate expression vectors are well known to those of skill in the art and include those that are replicable in eukaryotic cells and/or prokaryotic cells and those that remain episomal or those which integrate into the host cell genome.

[0730] As used herein, nucleic acids include DNA, RNA and analogs thereof, including peptide nucleic acids (PNA) and mixtures thereof. Nucleic acids can be single or double-stranded. Nucleic acids can encode gene products, such as, for example, polypeptides, regulatory RNAs, microRNAs, siRNAs and functional RNAs.

[0731] As used herein, a sequence complementary to at least a portion of an RNA, with reference to antisense oligonucleotides, means a sequence of nucleotides having sufficient complementarity to be able to hybridize with the RNA, generally under moderate or high stringency conditions, forming a stable duplex; in the case of double-stranded antisense nucleic acids, a single strand of the duplex DNA (i.e., dsRNA) can thus be assayed, or triplex formation can be assayed. The ability to hybridize depends on the degree of complementarity and the length of the antisense nucleic acid. Generally, the longer the hybridizing nucleic acid, the more base mismatches with an encoding RNA it can contain and still form a stable duplex (or triplex, as the case can be). One skilled in the art can ascertain a tolerable degree of mismatch by use of standard procedures to determine the melting point of the hybridized complex.

[0732] As used herein, an in vivo method refers to a method performed within the living body of a subject.

[0733] As used herein, genetic therapy or gene therapy involves the transfer of heterologous nucleic acid, such as DNA or RNA, into certain cells, target cells, of a mammal, particularly a human, with a disorder or conditions for which such therapy is sought. As used herein, genetic therapy or gene therapy can involve the transfer of heterologous nucleic acid, such as DNA, into a microorganism (e.g., a virus), which microorganism can be transferred to a mammal, particularly a human, with a disorder or conditions for which such therapy is sought. The nucleic acid, such as DNA, is introduced into the selected target cells, such as directly or indirectly, in a manner such that the heterologous nucleic acid, such as DNA, is expressed and a therapeutic product encoded thereby is produced. Alternatively, the heterologous nucleic acid, such as DNA, can in some manner mediate expression of DNA that encodes the therapeutic product, or it can encode a product, such as a peptide or RNA (e.g., RNAi, including siRNA) that is in some manner a therapeutic product, or which mediates, directly or indirectly, expression of a therapeutic product. Genetic therapy also can be used to deliver nucleic acid encoding a gene product that replaces a defective gene or supplements a gene product produced by the mammal or the cell in which it is introduced. The introduced nucleic acid can encode a therapeutic compound. The heterologous nucleic acid, such as DNA, encoding the therapeutic product can be modified prior to introduction into the cells of the afflicted host in order to enhance or otherwise alter the product or expression thereof. Genetic therapy also can involve delivery of an inhibitor or repressor or other modulator of gene expression.

[0734] As used herein, an agent or compound that modulates the activity of a protein or expression of a gene or nucleic acid either decreases or increases or otherwise alters the activity of the protein or, in some manner, up- or down-regulates or otherwise alters expression of the nucleic acid in a cell.

[0735] As used herein, “nucleic acids” include DNA, RNA and analogs thereof, including peptide nucleic acids (PNA) and mixtures thereof. Nucleic acids can be single or double-stranded. When referring to probes or primers, which are optionally labeled, such as with a detectable label, such as a fluorescent or radiolabel, single-stranded molecules are contemplated. Such molecules are typically of a length such that their target is statistically unique or of low copy number (typically less than 5, generally less than 3) for probing or priming a library. Generally a probe or primer contains at least 14, 16 or 30 contiguous nucleotides of sequence complementary to or identical to a gene of interest. Probes and primers can be 10, 20, 30, 50, 100 or more nucleic acids long.

[0736] As used herein, a peptide refers to a polypeptide that is greater than or equal to 2 amino acids in length, and less than or equal to 40 amino acids in length.

[0737] As used herein, the amino acids which occur in the various sequences of amino acids provided herein are identified according to their known, three-letter or one-letter abbreviations (Table 1). The nucleotides which occur in the various nucleic acid fragments are designated with the standard single-letter designations used routinely in the art.

[0738] As used herein, an “amino acid” is an organic compound containing an amino group and a carboxylic acid group. A polypeptide contains two or more amino acids. For purposes herein, amino acids include the twenty naturally-occurring amino acids, non-natural amino acids and amino acid analogs (i.e., amino acids wherein the α-carbon has a side chain).

[0739] All amino acid residue sequences represented herein by formulae have a left to right orientation in the conventional direction of amino-terminus to carboxyl-terminus. In addition, the phrase “amino acid residue” is defined to include the amino acids listed in the Table of Correspondence (Table 1) and modified and unusual amino acids, such as those referred to in 37 C.F.R. §§ 1.821-1.822, and incorporated herein by reference. Furthermore, it should be noted that a dash at the beginning or end of an amino acid residue sequence indicates a peptide bond to a further sequence of one or more amino acid residues, to an amino-terminal group such as NH, or to a carboxyl-terminal group such as COOH.

[0740] As used herein, the “naturally occurring α-amino acids” are the residues of those 20 α-amino acids found in nature which are incorporated into protein by the specific recognition of the charged tRNA molecule with its cognate mRNA codon in humans. Non-naturally occurring amino acids thus include, for example, amino acids or analogs of amino acids other than the 20 naturally-occurring amino acids and include, but are not limited to, the D-isostereomers of amino acids. Exemplary non-natural amino acids are described herein and are known to those of skill in the art.

[0741] As used herein, a DNA construct is a single- or double-stranded, linear or circular DNA molecule that contains segments of DNA combined and juxtaposed in a manner not found in nature. DNA constructs exist as a result of human manipulation, and include clones and other copies of manipulated molecules.

[0742] As used herein, a DNA segment is a portion of a larger DNA molecule having specified attributes. For example, a DNA segment encoding a specified polypeptide is a portion of a longer DNA molecule, such as a plasmid or plasmid fragment, which, when read from the 5′ to 3′ direction, encodes the sequence of amino acids of the specified polypeptide.

[0743] As used herein, the term polynucleotide means a single- or double-stranded polymer of deoxyribonucleotides or ribonucleotide bases read from the 5′ to the 3′ end. Polynucleotides include RNA and DNA, and can be isolated from natural sources, synthesized in vitro, or prepared from a combination of natural and synthetic molecules. The length of a polynucleotide molecule is given herein in terms of nucleotides (abbreviated “nt”) or base pairs (abbreviated “bp”). The term nucleotides is used for single- and double-stranded molecules where the context permits. When the term is applied to double-stranded molecules it is used to denote overall length and will be understood to be equivalent to the term base pairs. It will be recognized by those skilled in the art that the two strands of a double-stranded polynucleotide can differ slightly in length and that the ends thereof can be staggered; thus all nucleotides within a double-stranded polynucleotide molecule may not be paired. Such unpaired ends will, in general, not exceed 20 nucleotides in length.

[0744] As used herein, recitation that nucleotides or amino acids “correspond to” nucleotides or amino acids in a disclosed sequence, such as set forth in the Sequence listing, refers to nucleotides or amino acids identified upon alignment with the disclosed sequence to maximize identity using a standard alignment algorithm, such as the GAP algorithm. By aligning the sequences, one skilled in the art can identify corresponding residues, for example, using conserved and identical amino acid residues as guides. In general, to identify corresponding positions, the sequences of amino acids are aligned so that the highest order match is obtained (see, e.g.: Computational Molecular Biology, Lesk, A. M., ed., Oxford University Press, New York, 1988; Biocomputing: Informatics and Genome Projects, Smith, D. W., ed., Academic Press, New York, 1993; Computer Analysis of Sequence Data, Part I, Griffin, A. M., and Griffin, H. G., eds., Humana Press, New Jersey, 1994; Sequence Analysis in Molecular Biology, von Heinje, G., Academic Press, 1987; and Sequence Analysis Primer, Gribskov, M. and Devereux, J., eds., M Stockton Press, New York, 1991; Carillo et al. (1988) SIAM J Applied Math 48:1073).

[0745] As used herein, “sequence identity” refers to the number of identical or similar amino acids or nucleotide bases in a comparison between a test and a reference poly-peptide or polynucleotide. Sequence identity can be determined by sequence alignment of nucleic acid or protein sequences to identify regions of similarity or identity. For purposes herein, sequence identity is generally determined by alignment to identify identical residues. The alignment can be local or global. Matches, mismatches and gaps can be identified between compared sequences. Gaps are null amino acids or nucleotides inserted between the residues of aligned sequences so that identical or similar characters are aligned. Generally, there can be internal and terminal gaps. Sequence identity can be determined by taking into account gaps as the number of identical residues/length of the shortest sequence×100. When using gap penalties, sequence identity can be determined with no penalty for end gaps (e.g. terminal gaps are not penalized). Alternatively, sequence identity can be determined without taking into account gaps as the number of identical positions/length of the total aligned sequence×100.

[0746] As used herein, a “global alignment” is an alignment that aligns two sequences from beginning to end, aligning each letter in each sequence only once. An alignment is produced, regardless of whether or not there is similarity or identity between the sequences. For example, 50% sequence identity based on “global alignment” means that in an alignment of the full sequence of two compared sequences each of 100 nucleotides in length, 50% of the residues are the same. It is understood that global alignment also can be used in determining sequence identity even when the length of the aligned sequences is not the same. The differences in the terminal ends of the sequences will be taken into account in determining sequence identity, unless the “no penalty for end gaps” is selected. Generally, a global alignment is used on sequences that share significant similarity over most of their length. Exemplary algorithms for performing global alignment include the Needleman-Wunsch algorithm (Needleman et al. J. Mol. Biol. 48: 443 (1970). Exemplary programs for performing global alignment are publicly available and include the Global Sequence Alignment Tool available at the National Center for Biotechnology Information (NCBI) website (ncbi.nlm.nih.gov/), and the program available at deepc2.psi.iastate.edu/aat/align/align.html.

[0747] As used herein, a “local alignment” is an alignment that aligns two sequences, but only aligns those portions of the sequences that share similarity or identity. Hence, a local alignment determines if sub-segments of one sequence are present in another sequence. If there is no similarity, no alignment will be returned. Local alignment algorithms include BLAST or Smith-Waterman algorithm (Adv. Appl. Math. 2: 482 (1981)). For example, 50% sequence identity based on “local alignment” means that in an alignment of the full sequence of two compared sequences of any length, a region of similarity or identity of 100 nucleotides in length has 50% of the residues that are the same in the region of similarity or identity.

[0748] For purposes herein, sequence identity can be determined by standard alignment algorithm programs used with default gap penalties established by each supplier. Default parameters for the GAP program can include: (1) a unary comparison matrix (containing a value of 1 for identities and 0 for non identities) and the weighted comparison matrix of Gribskov et al. Nucl. Acids Res. 14: 6745 (1986), as described by Schwartz and Dayhoff, eds., Atlas of Protein Sequence and Structure, National Biomedical Research Foundation, pp. 353-358 (1979); (2) a penalty of 3.0 for each gap and an additional 0.10 penalty for each symbol in each gap; and (3) no penalty for end gaps. Whether any two nucleic acid molecules have nucleotide sequences (or any two polypeptides have amino acid sequences) that are at least 80%, 85%, 90%, 95%, 96%, 97%, 98% or 99% “identical,” or other similar variations reciting a percent identity, can be determined using known computer algorithms based on local or global alignment (see e.g., wikipedia.org/wiki/Sequence_alignment_software, providing links to dozens of known and publicly available alignment databases and programs). Generally, for purposes herein sequence identity is determined using computer algorithms based on global alignment, such as the Needleman-Wunsch Global Sequence Alignment tool available from NCBI/BLAST (blast.ncbi.nlm.nih.gov/Blast.cgi?CMD=Web&Page_TYPE=BlastHome); LAlign (William Pearson implementing the Huang and Miller algorithm (Adv. Appl. Math. (1991) 12:337-357)); and program from Xiaoqui Huang available at deepc2.psi.iastate.edu/aat/align/align.html. Generally, when comparing nucleotide sequences herein, an alignment with no penalty for end gaps (e.g. terminal gaps are not penalized) is used.

[0749] Therefore, as used herein, the term “identity” represents a comparison or alignment between a test and a reference polypeptide or polynucleotide. In one non-limiting example, “at least 90% identical to” refers to percent identities from 90 to 100% relative to the reference polypeptide or polynucleotide. Identity at a level of 90% or more is indicative of the fact that, assuming for exemplification purposes a test and reference polypeptide or polynucleotide length of 100 amino acids or nucleotides are compared, no more than 10% (i.e., 10 out of 100) of amino acids or nucleotides in the test polypeptide or polynucleotide differs from that of the reference polypeptides Similar comparisons can be made between a test and reference polynucleotides. Such differences can be represented as point mutations randomly distributed over the entire length of an amino acid sequence or they can be clustered in one or more locations of varying length up to the maximum allowable, e.g., 10/100 amino acid difference (approximately 90% identity). Differences are defined as nucleic acid or amino acid substitutions, insertions or deletions. Depending on the length of the compared sequences, at the level of homologies or identities above about 85-90%, the result can be independent of the program and gap parameters set; such high levels of identity can be assessed readily, often without relying on software.

[0750] As used herein equivalent, when referring to two sequences of nucleic acids, means that the two sequences in question encode the same sequence of amino acids or equivalent proteins. When equivalent is used in referring to two proteins or peptides or other molecules, it means that the two proteins or peptides have substantially the same amino acid sequence with only amino acid substitutions (such as, but not limited to, conservative changes) or structure and that any changes do not substantially alter the activity or function of the protein or peptide. When equivalent refers to a property, the property does not need to be present to the same extent (e.g., two peptides can exhibit different rates of the same type of enzymatic activity), but the activities are usually substantially the same. Complementary, when referring to two nucleotide sequences, means that the two sequences of nucleotides are capable of hybridizing, typically with less than 25%, 15% or 5% mismatches between opposed nucleotides. If necessary, the percentage of complementarity will be specified. Typically the two molecules are selected such that they will hybridize under conditions of high stringency.

[0751] As used herein, substantially pure means sufficiently homogeneous to appear free of readily detectable impurities as determined by standard methods of analysis, such as thin layer chromatography (TLC), gel electrophoresis and high performance liquid chromatography (HPLC), used by those of skill in the art to assess such purity, or sufficiently pure such that further purification would not detectably alter the physical and chemical properties, such as enzymatic and biological activities, of the substance. Methods for purification of the compounds to produce substantially chemically pure compounds are known to those of skill in the art. A substantially chemically pure compound can, however, be a mixture of stereoisomers or isomers. In such instances, further purification might increase the specific activity of the compound.

[0752] As used herein, the term assessing or determining is intended to include quantitative and qualitative determination in the sense of obtaining an absolute value for the activity of a product, and also of obtaining an index, ratio, percentage, visual or other value indicative of the level of the activity. Assessment can be direct or indirect.

[0753] As used herein, the terms “inactivating mutation” and “inactivation mutation” can be used interchangeably and are to be interpreted to have the same meaning.

[0754] As used herein, activity refers to the in vitro or in vivo activities of a compound or virus provided herein. For example, in vivo activities refer to physiological responses that result following in vivo administration thereof (or of a composition or other mixture). Activity, thus, encompasses resulting therapeutic effects and pharmaceutical activity of such compounds, compositions and mixtures. Activities can be observed in in vitro and/or in vivo systems designed to test or use such activities.

[0755] As used herein, a “composition” refers to any mixture of two or more products or compounds. It can be a solution, a suspension, liquid, powder, a paste, aqueous, non-aqueous, or any combination thereof.

[0756] As used herein, “a combination” refers to any association between two or among more items or elements. Exemplary combinations include, but are not limited to, two or more pharmaceutical compositions, a composition containing two or more active ingredients, such as two viruses, or a virus and an anticancer agent, such as a chemotherapeutic compound, two or more viruses, a virus and a therapeutic agent, a virus and an imaging agent, a virus and a plurality therapeutic and/or imaging agents, or any association thereof. Such combinations can be packaged as kits.

[0757] As used herein, a kit is a packaged combination, optionally, including instructions for use of the combination and/or other reactions and components for such use.

[0758] As used herein, a “control” or “standard” refers to a sample that is substantially identical to the test sample, except that it is not treated with a test parameter, or, if it is a plasma sample, it can be from a normal volunteer not affected with the condition of interest. A control also can be an internal control. For example, a control can be a sample, such as a virus, that has a known property or activity.

[0759] As used herein, the singular forms “a,” “an” and “the” include plural referents unless the context clearly dictates otherwise. Thus, for example, reference to “an” agent includes one or more agents.

[0760] As used herein, the term “or” is used to mean “and/or” unless explicitly indicated to refer to alternatives only or the alternatives are mutually exclusive.

[0761] As used herein, ranges and amounts can be expressed as “about” a particular value or range. About also includes the exact amount. Hence “about 5 bases” means “about 5 bases” and also “5 bases.”

[0762] As used herein, “optional” or “optionally” means that the subsequently described event or circumstance does or does not occur, and that the description includes instances where said event or circumstance occurs and instances where it does not. For example, an optionally substituted group means that the group is unsubstituted or is substituted.

[0763] As used herein, the abbreviations for any protective groups, amino acids and other compounds, are, unless indicated otherwise, in accord with their common usage, recognized abbreviations, or the IUPAC-IUB Commission on Biochemical Nomenclature (see, (1972) Biochem. 11:1726).

### VIII. EXEMPLARY EMBODIMENTS

[0764] Among provided embodiments are:

[0765] 1. An isolated clonal vaccinia virus (VACV) strain comprising a nucleic acid genome that has at least 95% sequence identity with the nucleic acid sequence set forth in SEQ ID NO: 1 and wherein the nucleic acid genome is characterized by one or more of:
[0766] (i) a variant 017 open reading frame (ORF) encoding an amino acid sequence that has at least 95% sequence identity to SEQ ID NO: 57 and comprises a polar uncharged amino acid at position 66, optionally a threonine (T) at position 66;
[0767] (ii) a variant 038 (K5L) ORF comprising a nucleotide insertion to effect a frameshift mutation, wherein the 038 (K5L) gene product is altered;
[0768] (iii) a variant 059 (E2L) ORF encoding an amino acid sequence that is at least 95% sequence identity to SEQ ID NO:60 and comprises a hydrophobic amino acid other than leucine at position 419, optionally a phenylalanine (F) at position 419;
[0769] (iv) a variant 104 (H4L) ORF encoding an amino acid sequence having at least 95% sequence identity to SEQ ID NO:61 and comprises a negatively charged amino acid at position 591, optionally aspartic acid (D) at position 591; and
[0770] (v) a variant 182 (A56R) ORF comprising deletion of two nucleotides to effect a frameshift mutation, wherein the 182 (A56R) ORF gene product is altered.

[0771] 2. The isolated clonal VACV strain of embodiment 1, wherein the nucleic acid genome is characterized by (i) and the variant 017 ORF encodes an amino acid sequence that has at least 96%, at least 97%, at least 98%, at least 99% or 100% sequence identity to SEQ ID NO:57.

[0772] 3. The isolated clonal VACV strain of embodiment 1 or embodiment 2, wherein the nucleic acid genome is characterized by (i) and the variant 017 ORF encodes the amino acid sequence set forth in SEQ ID NO: 57.

[0773] 4. The isolated clonal VACV strain of any of embodiments 1-4, wherein the nucleic acid genome is characterized by (ii) and the nucleotide insertion is guanine (G) corresponding to insertion after nucleotide position 32135 of SEQ ID NO:1, optionally wherein the variant 038 (K5L) ORF is set forth in SEQ ID NO: 58.

[0774] 5. The isolated clonal VACV strain of any of embodiments 1-4, wherein the nucleic acid genome is characterized by (ii) and the 038 (K5L) gene product is set forth in SEQ ID NO:59.

[0775] 6. The isolated clonal VACV strain of any of embodiments 1-5, wherein the nucleic acid genome is characterized by (iii) and the variant 059 (E2L) ORF encodes an amino acid sequence that has at least 96%, at least 97%, at least 98%, at least 99% or 100% sequence identity to SEQ ID NO:60.

[0776] 7. The isolated clonal VACV strain of any of embodiments 1-6, wherein the nucleic acid genome is characterized by (iii) and the variant 059 (E2L) ORF encodes the amino acid sequence set forth in SEQ ID NO: 60.

[0777] 8. The isolated clonal VACV strain of any of embodiments 1-7, wherein the nucleic acid genome is characterized by (iv) and the 104 (H4L) ORF encodes an amino acid sequence that has at least 96%, at least 97%, at least 98%, at least 99% or 100% sequence identity to SEQ ID NO:61.

[0778] 9. The isolated clonal VACV strain of any of embodiments 1-8, wherein the nucleic acid genome is characterized by (iv) and wherein the variant 104 (H4L) ORF encodes the amino acid sequence set forth in SEQ ID NO: 61.

[0779] 10. The isolated clonal VACV strain of any of embodiments 1-9, wherein the nucleic acid genome is characterized by (v) and the deletion of two nucleotides is deletion of two contiguous nucleotides corresponding to nucleotides after nucleotide position 165972 of SEQ ID NO:2, optionally wherein the variant 182 (A56R) is set forth in SEQ ID NO: 62.

[0780] 11. The isolated clonal VACV strain of any of embodiments 1-10, wherein the nucleic acid genome is characterized by (v) and the VACV protein is set forth in SEQ ID NO:63.

[0781] 12. The isolated clonal VACV strain of any of embodiments 1-11, wherein the nucleic acid genome is characterized by any two of (i)-(v).

[0782] 13. The isolated clonal VACV strain of any of embodiments 1-11, wherein the nucleic acid genome is characterized by any three of (i)-(v).

[0783] 14. The isolated clonal VACV strain of any of embodiments 1-11, wherein the nucleic acid genome is characterized by any four of (i)-(v).

[0784] 15. The isolated clonal VACV strain of any of embodiments 1-11, wherein the nucleic acid genome is characterized by each of (i)-(v).

[0785] 16. An isolated clonal vaccinia virus (VACV) strain comprising a nucleic acid genome that has at least 95% sequence identity with the nucleic acid sequence set forth in SEQ ID NO: 1, and wherein the nucleic acid genome is characterized by one or more of:
[0786] (i) a guanine (G) at the position corresponding to position 7770 of SEQ ID NO: 1;
[0787] (ii) a thymine (T) at the position corresponding to position 15261 of SEQ ID NO: 1;
[0788] (iii) a G at the position corresponding to position 32136 of SEQ ID NO: 1;
[0789] (iv) a G at the position corresponding to position 49455 of SEQ ID NO: 1;
[0790] (v) a cytosine (C) at the position corresponding to position 92969 of SEQ ID NO: 1;
[0791] (vi) the nucleic acid sequence CACTTATATAT at the positions corresponding to positions 106870 to 106880 of SEQ ID NO: 1;
[0792] (vii) the nucleic acid sequence GTTTTCATTA at the positions corresponding to positions 111267 to 111276 of SEQ ID NO: 1;
[0793] (viii) an adenine (A) at the position corresponding to position 162715 of SEQ ID NO: 1;
[0794] (ix) the nucleic acid sequence TACAGACACC at the positions corresponding to positions 165844 to 185853 of SEQ ID NO: 1; and
[0795] (x) a C at the position corresponding to position 187805 of SEQ ID NO: 1.

[0796] 17. The isolated clonal VACV strain of embodiment 16, wherein the nucleic acid genome is characterized by any two of (i)-(x).

[0797] 18. The isolated clonal VACV strain of embodiment 16, wherein the nucleic acid genome is characterized by any three of (i)-(x).

[0798] 19. The isolated clonal VACV strain of embodiment 16, wherein the nucleic acid genome is characterized by any four of (i)-(x).

[0799] 20. The isolated clonal VACV strain of embodiment 16, wherein the nucleic acid genome is characterized by any five of (i)-(x).

[0800] 21. The isolated clonal VACV strain of embodiment 16, wherein the nucleic acid genome is characterized by any six of (i)-(x).

[0801] 22. The isolated clonal VACV strain of embodiment 16, wherein the nucleic acid genome is characterized by any seven of (i)-(x).

[0802] 23. The isolated clonal VACV strain of embodiment 16, wherein the nucleic acid genome is characterized by any eight of (i)-(x).

[0803] 24. The isolated clonal VACV strain of embodiment 16, wherein the nucleic acid genome is characterized by any nine of (i)-(x).

[0804] 25. The isolated clonal VACV strain of embodiment 16, wherein the nucleic acid genome is characterized by each of (i)-(x).

[0805] 26. The isolated clonal VACV strain of any of embodiments 1-25, wherein the nucleic acid genome has at least 96% sequence identity with the sequence of nucleotides set forth in SEQ. ID NO: 1.

[0806] 27. The isolated clonal VACV strain of any of embodiments 1-26, wherein the nucleic acid genome has at least 97% sequence identity with the sequence of nucleotides set forth in SEQ. ID NO: 1.

[0807] 28. The isolated clonal VACV strain of any of embodiments 1-27, wherein the nucleic acid genome has at least 98% sequence identity with the sequence of nucleotides set forth in SEQ. ID NO: 1.

[0808] 29. The isolated clonal VACV strain of any of embodiments 1-28, wherein the nucleic acid genome has at a least 99% sequence identity with the sequence of nucleotides set forth in SEQ. ID NO: 1.

[0809] 30. An isolated clonal vaccinia virus (VACV) strain comprising a nucleic acid genome that has at least 99% sequence identity with the sequence of nucleotides set forth in SEQ. ID NO: 1.

[0810] 31. The isolated clonal VACV strain of any of embodiments 1-30, wherein the nucleic acid genome has at least 99.5% sequence identity with the sequence of nucleotides set forth in SEQ. ID NO: 1.

[0811] 32. The isolated clonal VACV strain of any of embodiments 1-31, wherein the nucleic acid genome has at least 99.9% sequence identity with the sequence of nucleotides set forth in SEQ. ID NO: 1.

[0812] 33. The isolated clonal VACV strain of any of embodiments 1-32, wherein the nucleic acid genome has at least 99.95% sequence identity with the sequence of nucleotides set forth in SEQ. ID NO: 1.

[0813] 34. The isolated clonal VACV strain of any of embodiments 1-33, wherein the nucleic acid genome does not comprise the sequence of nucleotides set forth in SEQ ID NO: 2.

[0814] 35. The isolated clonal VACV strain of any of embodiments 1-34, wherein the nucleic acid genome is not modified to contain non-viral heterologous nucleic acid containing an open reading frame encoding a non-viral heterologous protein.

[0815] 36. The isolated clonal VACV strain of any of embodiments 1-35, wherein the nucleic acid genome is set forth in SEQ ID NO: 1.

[0816] 37. The isolated clonal VACV strain of any of embodiments 1-36, wherein the clonal VACV strain exhibits enhanced production of extracellular enveloped virions (EEV) after cell infection, optionally as determined by the assay in Example 1.

[0817] 38. The isolated clonal VACV strain of embodiment 37, wherein greater than 5% of infectious particles after cell infection are EEV.

[0818] 39. The isolated clonal VACV strain of embodiment 37, wherein greater than 10% of infectious particles after cell infection are EEV.

[0819] 40. The isolated clonal VACV strain of embodiment 37, wherein greater than 15% of infectious particles after cell infection are EEV.

[0820] 41. The isolated clonal VACV strain of any of embodiments 1-40 that exhibits oncolytic activity to kill tumor cells.

[0821] 42. A VACV preparation comprising the isolated clonal VACV strain of any of embodiments 1-41.

[0822] 43. The VACV preparation of embodiment 42 that is substantially homogenous wherein a plurality of the virus particles in the preparation have the genomic sequence of the clonal VACV strain.

[0823] 44. The VACV preparation of embodiment 42 or embodiment 43, wherein at least 70% of the virus particles in the preparation have the genomic sequence of the clonal VACV strain.

[0824] 45. The VACV preparation of embodiment 42 or embodiment 43, wherein at least 80% of the virus particles in the preparation have the genomic sequence of the clonal VACV strain.

[0825] 46. The VACV preparation of embodiment 42 or embodiment 43, wherein at least 90% of the virus particles in the preparation have the genomic sequence of the clonal VACV strain.

[0826] 47. The VACV preparation of embodiment 42 or embodiment 43, wherein at least 95% of the virus particles in the preparation have the genomic sequence of the clonal VACV strain.

[0827] 48. The VACV preparation of embodiment 42 or embodiment 43, wherein at least 98% of the virus particles in the preparation have the genomic sequence of the clonal VACV strain.

[0828] 49. A pharmaceutical composition comprising the isolated VACV clonal strain of any of embodiments 1-41.

[0829] 50. A pharmaceutical composition comprising the VACV preparation of any of embodiments 42-48.

[0830] 51. A recombinant vaccinia virus (VACV) strain comprising a nucleic acid genome of the VACV clonal strain of any of embodiments 1-41 that comprises an inactivating mutation in at least one viral gene.

[0831] 52. The recombinant VACV strain of embodiment 51, wherein the viral gene is selected from the group consisting of hemagglutinin (HA), J2R (thymidine kinase), F14.5L, A56R (hemagglutinin), B2R, vaccinia growth factor (VGF), A35R, A49R, A55R, B14R, C4L, C6L, C16L, NIL/N2L, E2L/E3L, K1L/K2L, K7L, superoxide dismutase locus, 7.5K, C2L-F3L, C4L-F1L, C7-K1L, B13R+B14R, A26L and I4L.

[0832] 53. The recombinant VACV of embodiment 51 or embodiment 52, wherein the inactivating mutation is a deletion of all or a portion of the at least one viral gene.

[0833] 54. The recombinant VACV strain of embodiment 53, wherein the deletion of the at least one viral gene is deletion of the entire gene ORF of a viral gene.

[0834] 55. The recombinant VACV strain of embodiment 53, wherein the deletion of the at least one viral gene is a deletion of a portion of the ORF of a viral gene, and wherein said deletion is sufficient to render the encoded gene product non-functional.

[0835] 56. The recombinant VACV strain of any of embodiments 51-55, wherein the at least one viral gene is A35R gene.

[0836] 57. The recombinant VACV strain of embodiment 56, wherein the nucleic acid genome of the recombinant VACV strain comprises a sequence of nucleotide that has at least 95%, at least 96%, at least 97%, at least 98% or at least 99% sequence identity to the sequence set forth in SEQ ID NO:3.

[0837] 58. The recombinant VACV strain of embodiment 56 or embodiment 57, comprising the sequence of nucleotides set forth in SEQ ID NO: 3.

[0838] 59. The recombinant VACV strain of any of embodiments 51-55, wherein the at least one viral gene is J2R gene.

[0839] 60. The recombinant VACV strain of embodiment 59, wherein the nucleic acid genome of the recombinant VACV strain comprises a sequence of nucleotide that has at least 95%, at least 96%, at least 97%, at least 98% or at least 99% sequence identity to the sequence set forth in SEQ ID NO:4.

[0840] 61. The recombinant VACV strain of embodiment 59 or embodiment 60, comprising the sequence of nucleotides set forth in SEQ ID NO: 4.

[0841] 62. The recombinant VACV strain of any of embodiments 51-55, wherein the at least one viral gene is B2R.

[0842] 63. The recombinant VACV strain of any of embodiments 51-56 and 59, wherein the at least one viral gene comprises A35R gene and J2R gene.

[0843] 64. The recombinant VACV strain of embodiment 63, wherein the nucleic acid genome of the recombinant VACV strain comprises a sequence of nucleotide that has at least 95%, at least 96%, at least 97%, at least 98% or at least 99% sequence identity to the sequence set forth in SEQ ID NO:12.

[0844] 65. The recombinant VACV strain of embodiment 63 or embodiment 64 comprising the sequence of nucleotides set forth in SEQ ID NO: 12.

[0845] 66. The recombinant VACV strain of any of embodiments 51-55 and 62, wherein the at least one viral gene comprises B2R gene and J2R gene.

[0846] 67. The recombinant VACV strain of embodiment 66, wherein the nucleic acid genome of the recombinant VACV strain comprises a sequence of nucleotide that has at least 95%, at least 96%, at least 97%, at least 98% or at least 99% sequence identity to the sequence set forth in SEQ ID NO:48.

[0847] 68. The recombinant VACV strain of embodiment 66 or embodiment 67, comprising the sequence of nucleotides set forth in SEQ ID NO: 48.

[0848] 69. A recombinant oncolytic virus, wherein the recombinant virus is a recombinant vaccinia virus (VACV) strain, comprising:
[0849] a genome of the VACV clonal strain of any of embodiments 1-41; and
[0850] at least one heterologous nucleic acid encoding one or more heterologous gene product inserted in the genome.

[0851] 70. A recombinant oncolytic virus comprising at least one heterologous nucleic acid encoding one or more heterologous gene product, wherein the one or more heterologous gene product is a complement inhibitor, a T cell or NK cell evader, an immune stimulating protein, an anti-angiogenic protein, an interferon regulatory factor, an apoptosis inducible protein or a combination of any of the foregoing.

[0852] 71. The recombinant oncolytic virus of embodiment 70, wherein the oncolytic virus is a vaccinia virus, a herpes simplex virus, vesicular stomatitis virus (VSV), a Maraba virus (MARAV), a measles virus (MV), adenovirus, myxoma virus, orf virus, parvovirus, raccoonpox virus, coxsackievirus, reovirus, Newcastle disease virus, Seneca valley virus, Semliki Forest virus, mumps virus, influenza virus, echovirus, and a poliovirus (PV).

[0853] 72. The recombinant oncolytic virus of embodiment 70 or embodiment 71, wherein the oncolytic virus is a vaccinia virus.

[0854] 73. The recombinant oncolytic virus of any of embodiments 69-72, wherein the at least one heterologous nucleic acid encoding the one or more heterologous gene product is inserted into or in place of a non-essential gene or region in the genome of the virus.

[0855] 74. The recombinant oncolytic virus of any of embodiments 69-73, wherein the at least one heterologous nucleic acid encoding the one or more heterologous gene product is inserted into or in place of the hemagglutinin (HA), J2R (thymidine kinase), F14.5L, A56R (hemagglutinin), B2R, vaccinia growth factor (VGF), A35R, A49R, A55R, B14R, C4L, C6L, C16L, NIL/N2L, E2L/E3L, K1L/K2L, K7L, superoxide dismutase locus, 7.5K, C2L-F3L, C4L-F1L, C7-K1L, B13R+B14R, A26L, or I4L gene loci in the genome of the virus.

[0856] 75. The recombinant oncolytic virus of any of embodiments 69-74, wherein the insertion is into or in place of F14.5L.

[0857] 76. The recombinant oncolytic virus of any of embodiments 69-74, wherein the insertion is into or in place of A35R.

[0858] 77. The recombinant oncolytic virus of any of embodiments 69-74, wherein the insertion is into or in place of J2R.

[0859] 78. The recombinant oncolytic virus of any of embodiments 69-72, wherein the at least one heterologous nucleic acid encoding the one or more heterologous gene product is fused with a viral membrane protein to produce a fusion protein.

[0860] 79. The recombinant oncolytic virus of embodiment 78, wherein the viral membrane protein is F14.5L, optionally wherein the fusion is at the C-terminus of F14.5L.

[0861] 80. The recombinant oncolytic virus of embodiment 78 or embodiment 79, wherein the fusion protein is incorporated into the outer membrane of the intracellular mature virus (IMV).

[0862] 81. The recombinant oncolytic virus of any of embodiments 69-80, comprising an inactivation mutation of at least one viral gene.

[0863] 82. The recombinant oncolytic virus of embodiment 81, wherein the inactivation mutation is deletion of all or a portion of the at least one viral gene.

[0864] 83. The recombinant VACV of embodiment 82, wherein the deletion of the at least one viral gene is deletion of the entire gene ORF of a viral gene.

[0865] 84. The recombinant oncolytic virus of embodiment 82, wherein the deletion of the at least one viral gene is a deletion of a portion of the ORF of a viral gene, and wherein said deletion is sufficient to render the encoded gene product non-functional.

[0866] 85. The recombinant oncolytic virus of any of embodiments 81-84, wherein the at least one viral gene is selected from the group consisting of hemagglutinin (HA), J2R (thymidine kinase), F14.5L, A56R (hemagglutinin), B2R, vaccinia growth factor (VGF), A35R, A49R, A55R, B14R, C4L, C6L, C16L, NIL/N2L, E2L/E3L, K1L/K2L, K7L, superoxide dismutase locus, 7.5K, C2L-F3L, C4L-F1L, C7-K1L, B13R+B14R, A26L, and I4L.

[0867] 86. The recombinant oncolytic virus of any of embodiments 81-84, wherein the at least one viral gene is A35R.

[0868] 87. The recombinant oncolytic virus of any of embodiments 81-84, wherein the at least one viral gene is J2R.

[0869] 88. The recombinant oncolytic virus of any of embodiments 81-84, wherein the at least one viral gene is B2R.

[0870] 89. The recombinant oncolytic virus of any of embodiments 81-84, wherein the at least one viral gene comprises A35R and J2R.

[0871] 90. The recombinant oncolytic virus of any of embodiments 81-84, wherein the at least one viral gene comprises B2R and J2R.

[0872] 91. The recombinant oncolytic virus of any of embodiments 69-90, wherein the nucleic acid encoding a heterologous gene product is operably linked to a promoter.

[0873] 92. The recombinant oncolytic virus of embodiment 91, wherein the promoter is a poxviral promoter or is a variant or derivative thereof 93. The recombinant oncolytic virus of embodiment 91 or embodiment 92, wherein the promoter is a vaccinia virus promoter.

[0874] 94. The recombinant oncolytic virus of any of embodiments 91-93, wherein the promoter is selected from the group consisting of 7.5E, 7.5E/L, SSE, 11KL, SSL, SSEL, mH5, and LEO.

[0875] 95. The recombinant oncolytic virus of any of embodiments 91-94, wherein the promoter has the sequence of amino acids set forth in any one of SEQ ID NOS: 29, 53, 55, 68, 69, 70, 71, or 72.

[0876] 96. The recombinant oncolytic virus of any of embodiments 91-94, wherein the promoter is synthetic strong early promoter (SSE).

[0877] 97. The recombinant VACV strain of embodiment 96, wherein the promoter comprises the sequence set forth in SEQ ID NO:29.

[0878] 98. The recombinant oncolytic virus of any of embodiments 91-94, wherein the promoter is a strong early/late promoter (SEL).

[0879] 99. The recombinant oncolytic virus of embodiment 98, wherein the promoter comprises the sequence set forth in SEQ ID NO:55.

[0880] 100. The recombinant oncolytic virus of any of embodiments 91-94, wherein the promoter is mH5.

[0881] 101. The recombinant oncolytic virus of embodiment 100, wherein the mH5 promoter comprises the sequence set forth in SEQ ID NO: 53

[0882] 102. The recombinant oncolytic virus of any of embodiments 69-101, wherein the one or more heterologous gene product comprise a therapeutic agent or diagnostic agent.

[0883] 10³. The recombinant oncolytic virus of any of embodiments 69-102, wherein the one or more heterologous gene product are selected from among an anticancer agent, an antimetastatic agent, an antiangiogenic agent, an immunomodulatory molecule, an antigen, a cell matrix degradative gene, genes for tissue regeneration and reprogramming human somatic cells to pluripotency, enzymes that modify a substrate to produce a detectable product or signal or are detectable by antibodies, proteins that can bind a contrasting agent, genes for optical imaging or detection, genes for PET imaging and genes for MRI imaging.

[0884] 104. The recombinant oncolytic virus of any of embodiments 69-10³, wherein the one or more heterologous gene product comprise a therapeutic agent selected from among a hormone, a growth factor, cytokine, a chemokine, a costimulatory molecule, ribozymes, a transporter protein, a single chain antibody, an antisense RNA, a prodrug converting enzyme, an siRNA, a microRNA, a toxin, an antitumor oligopeptide, a mitosis inhibitor protein, an antimitotic oligopeptide, an anti-cancer polypeptide antibiotic, an angiogenesis inhibitor, a tumor suppressor, a cytotoxic protein, a cytostatic protein and a tissue factor.

[0885] 105. The recombinant oncolytic virus of any of embodiments 69-10³, wherein the one or more heterologous gene product comprise a complement inhibitor.

[0886] 106. The recombinant oncolytic virus of embodiment 105, wherein the complement inhibitor is Borrelia burgdorferi complement regulatory-acquiring surface protein-2 (CRASP-2) or minimized complement regulator factor H (miniFH).

[0887] 107. The recombinant oncolytic virus of embodiment 106, wherein the complement inhibitor is CRASP-2 and has a sequence of amino acids that exhibits at least 85%, 90% or 95% sequence identity to the sequence set forth in SEQ ID NO:18.

[0888] 108. The recombinant oncolytic virus of embodiment 106 or embodiment 107, wherein the complement inhibitor has the sequence set forth in SEQ ID NO:18.

[0889] 109. The recombinant oncolytic virus of any of embodiments 69-108, wherein the nucleic acid genome of the recombinant oncolytic virus comprises a sequence of nucleotides that has at least 95%, at least 96%, at least 97%, at least 98% or at least 99% sequence identity to the sequence set forth in SEQ ID NO:5.

[0890] 110. The recombinant oncolytic virus of any of embodiments 69-108, comprising the sequence of nucleotides set forth in SEQ ID NO: 5.

[0891] 111. The recombinant oncolytic virus of embodiment 106, wherein the complement inhibitor is miniFH.

[0892] 112. The recombinant oncolytic virus of embodiment 105, 106, or 111, wherein the complement inhibitor has a sequence of amino acids that exhibits at least 85%, 90% or 95% sequence identity to the sequence set forth in SEQ ID NO:19.

[0893] 113. The recombinant oncolytic virus of any of embodiments 105, 106, 111, or 112, wherein the complement inhibitor has the sequence set forth in SEQ ID NO:19.

[0894] 114. The recombinant oncolytic virus of any of embodiments 69-106 and 111-113, wherein the nucleic acid genome of the recombinant oncolytic virus comprises a sequence of nucleotide that has at least 95%, at least 96%, at least 97%, at least 98% or at least 99% sequence identity to the sequence set forth in SEQ ID NO:6.

[0895] 115. The recombinant oncolytic virus of any of embodiments 69-106 and 111-114 comprising the sequence of nucleotides set forth in SEQ ID NO: 6.

[0896] 116. The recombinant oncolytic virus of any of embodiment 69-115, wherein the one or more heterologous gene product comprises a T cell evader or an NK cell evader.

[0897] 117. The recombinant oncolytic virus of embodiment 116, wherein the T cell evader or NK cell evader is a set of proteins encoded by Cowpox virus ORFs 012, 203 and 018 (CPXV012-203-018).

[0898] 118. The recombinant oncolytic virus of embodiment 117, wherein the T cell evader or NK cell evader is a set of proteins that is or comprises the CPXV012, CPXV203, and CPXV018 proteins.

[0899] 119. The recombinant oncolytic virus of embodiment 118, wherein the set of proteins encoded by CPXV012-203-018 comprises the sequence of amino acids that exhibits at least 85%, 90% or 95% sequence identity to the sequence set forth in SEQ ID NO: 20 (CPXV012), the sequence of amino acids that exhibits at least 85%, 90% or 95% sequence identity to the sequence set forth in SEQ ID NO: 21 (CPXV0203), and the sequence of amino acids that exhibits at least 85%, 90% or 95% sequence identity to the sequence set forth in SEQ ID NO: 22 (CPXV018).

[0900] 120. The recombinant oncolytic virus of embodiment 117 or embodiment 118, wherein the set of proteins encoded by CPXV012-203-018 comprises the sequence of amino acids set forth in SEQ ID NO:20, SEQ ID NO:21, and SEQ ID NO:22.

[0901] 121. The recombinant oncolytic virus of any of embodiments 69-108 and 117-120, wherein the nucleic acid genome of the recombinant oncolytic virus comprises a sequence of nucleotide that has at least 95%, at least 96%, at least 97%, at least 98% or at least 99% sequence identity to the sequence set forth in SEQ ID NO:10.

[0902] 122. The recombinant oncolytic virus of any of embodiments 69-108 and 117-121, wherein the nucleic acid genome of the recombinant oncolytic virus comprises the sequence of nucleotides set forth in SEQ ID NO: 10.

[0903] 123. The recombinant oncolytic virus of any of embodiments 69-104, wherein the one or more heterologous gene product comprise an immune stimulating protein.

[0904] 124. The recombinant oncolytic virus of embodiment 123, wherein the immune stimulating protein is recombinant LIGHT.

[0905] 125. The recombinant oncolytic virus of embodiment 124, wherein the recombinant LIGHT is a human protein or is a mutant thereof 126. The recombinant oncolytic virus of embodiment 125, wherein the recombinant LIGHT comprises an amino acid sequence that has at least 95%, at least 96%, at least 97%, at least 98% or at least 99% sequence identity to the sequence set forth in SEQ ID NO:30.

[0906] 127 The recombinant oncolytic virus of any of embodiments 124-126, wherein the recombinant LIGHT is hmLIGHT that is a human LIGHT mutant that binds human and mouse LTβR and HVEM.

[0907] 128. The recombinant oncolytic virus of embodiment 126 or embodiment 127, wherein the recombinant LIGHT comprises one or more mutation selected from the group consisting of a threonine at position 138, a glycine at position 160, a glycine at position 221 and a lysine at position 222.

[0908] 129. The recombinant oncolytic virus of embodiment 128, wherein the recombinant LIGHT comprises an amino acid sequence that has at least 95%, at least 96%, at least 97%, at least 98% or at least 99% sequence identity to the sequence set forth in SEQ ID NO:25.

[0909] 130. The recombinant oncolytic virus of embodiment 128, wherein the recombinant LIGHT comprises the sequence set forth in SEQ ID NO:25.

[0910] 131. The recombinant oncolytic virus of any of embodiments 69-104 and 123-130, wherein the nucleic acid genome of the recombinant oncolytic virus comprises a sequence of nucleotide that has at least 95%, at least 96%, at least 97%, at least 98% or at least 99% sequence identity to the sequence set forth in SEQ ID NO:11.

[0911] 132. The recombinant oncolytic virus of any of embodiments 69-104 and 123-132, comprising the sequence of nucleotides set forth in SEQ ID NO: 11.

[0912] 133. The recombinant oncolytic virus of any of embodiments 69-132, wherein the one or more heterologous gene product comprise one or more anti-angiogenic protein.

[0913] 134. The recombinant oncolytic virus of embodiment 133, wherein the one or more anti-angiogenic protein is a VEGF inhibitor, an angiopoietin inhibitor, versikine or a fusion protein of any two or more of the foregoing.

[0914] 135. The recombinant oncolytic virus of embodiment 134, wherein the VEGF inhibitor is an anti-VEGF antibody, optionally an anti-VEGF-single chain antibody (scAb).

[0915] 136. The recombinant oncolytic virus of embodiment 134, wherein the angiopoietin inhibitor is an anti-Angriopoietin-2 (Ang2) antibody, optionally an anti-Ang2 single chain antibody (scAb).

[0916] 137. The recombinant oncolytic virus of any of embodiments 133-136, wherein the one or more anti-angiogenic protein is a bispecific anti-VEGF/anti-Ang2 antibody.

[0917] 138. The recombinant oncolytic virus of embodiment 137, wherein the bispecific anti-VEGF/anti-Ang2 antibody comprises a sequence of amino acids that has at least 95%, at least 96%, at least 97%, at least 98% or at least 99% sequence identity to the sequence set forth in SEQ ID NO:23.

[0918] 139. The recombinant oncolytic virus of embodiment 137 or embodiment 138, wherein the bispecific anti-VEGF/anti-Ang2 antibody comprises the sequence set forth in SEQ ID NO:23.

[0919] 140. The recombinant oncolytic virus of any of embodiment 137-139, wherein the one or more anti-angiogenic protein further comprise versikine.

[0920] 141. The recombinant oncolytic virus of embodiment 134 or embodiment 140, wherein the versikine has a sequence of amino acids that has at least 95%, at least 96%, at least 97%, at least 98% or at least 99% sequence identity to the sequence set forth in SEQ ID NO:24.

[0921] 142. The recombinant oncolytic virus of embodiment 134, embodiment 140 or embodiment 141, wherein the versikine has the sequence of amino acids set forth in SEQ ID NO:24.

[0922] 143. The recombinant oncolytic virus of any of embodiments 69-104 and 133-142, wherein the nucleic acid genome of the recombinant oncolytic virus comprises a sequence of nucleotide that has at least 95%, at least 96%, at least 97%, at least 98% or at least 99% sequence identity to the sequence set forth in SEQ ID NO:13.

[0923] 144. The recombinant oncolytic virus of any of embodiments 69-104 and 133-143 comprising the sequence of nucleotides set forth in SEQ ID NO: 13.

[0924] 145. The recombinant oncolytic virus of any of embodiments 69-104, 123-130 and 133-142, wherein the nucleic acid genome of the recombinant oncolytic virus comprises a sequence of nucleotide that has at least 95%, at least 96%, at least 97%, at least 98% or at least 99% sequence identity to the sequence set forth in SEQ ID NO:47.

[0925] 146. The recombinant oncolytic virus of any of embodiments 69-104, 123-130, 133-142 and 145 comprising the sequence of nucleotides set forth in SEQ ID NO: 47.

[0926] 147. The recombinant oncolytic virus of any of embodiments 69-104, wherein the one or more heterologous gene product comprise an interferon regulatory factor.

[0927] 148. The recombinant oncolytic virus of embodiment 147, wherein the interferon regulatory factor is an interferon regulatory factor 3 (IRF3).

[0928] 149. The recombinant oncolytic virus of embodiment 148, wherein the IRF3 is a human IRF3, optionally wherein the hIRF3 comprises a sequence of amino acids that has at least 95%, at least 96%, at least 97%, at least 98% or at least 99% sequence identity to the sequence set forth in SEQ ID NO:51.

[0929] 150. The recombinant oncolytic virus of embodiment 148, wherein the IRF3 is a mouse IRF3, optionally wherein the mIRF3 comprises a sequence of amino acids that has at least 95%, at least 96%, at least 97%, at least 98% or at least 99% sequence identity to the sequence set forth in SEQ ID NO:52.

[0930] 151. The recombinant oncolytic virus of any of embodiments 69-104 and 147-150, wherein the nucleic acid genome of the recombinant oncolytic virus comprises a sequence of nucleotide that has at least 95%, at least 96%, at least 97%, at least 98% or at least 99% sequence identity to the sequence set forth in SEQ ID NO:49.

[0931] 152. The recombinant oncolytic virus of any of embodiments 69-104 and 147-151, comprising the sequence of nucleotides set forth in SEQ ID NO: 49.

[0932] 153. The recombinant oncolytic virus of any of embodiments 69-104 and 147-150, wherein the nucleic acid genome of the recombinant oncolytic virus comprises a sequence of nucleotide that has at least 95%, at least 96%, at least 97%, at least 98% or at least 99% sequence identity to the sequence set forth in SEQ ID NO:50.

[0933] 154. The recombinant oncolytic virus of any of embodiments 69-104, 147-150, and 153 comprising the sequence of nucleotides set forth in SEQ ID NO: 50.

[0934] 155. The recombinant oncolytic virus of any of embodiments 69-104, wherein the one or more heterologous gene product comprise an apoptosis-inducible protein.

[0935] 156. The recombinant oncolytic virus of embodiment 155, wherein the apoptosis-inducible protein comprises a proapoptotic molecule fused with an FKBP variant that is able to bind a chemical inducer of dimerization (CID).

[0936] 157. The recombinant oncolytic virus of embodiment 156, wherein the FKBP variant is FKBP-F36V, optionally wherein the FKBP-F36V comprises the sequence of amino acids set forth in SEQ ID NO:56.

[0937] 158. The recombinant oncolytic virus of embodiment 156 or embodiment 157, wherein the chemical inducer of dimerization is AP1903 (Rimiducid).

[0938] 159. The recombinant oncolytic virus of any of embodiments 156-158, wherein the proapoptotic molecule is using Fas, the death effector domain (DED) of the Fas-associated death domain-containing protein (FADD) or a caspase, optionally wherein the caspase is caspase 9.

[0939] 160. The recombinant oncolytic virus of any of embodiments 155-159, wherein the apoptosis-inducible protein is an inducible DED (iDED) comprising the sequence set forth in SEQ ID NO:27 or a sequence of amino acids that has at least 85%, 90% or 95% sequence identity to SEQ ID NO:27.

[0940] 161. The recombinant oncolytic virus of any of embodiments 69-104 and 155-160, wherein the nucleic acid genome of the recombinant oncolytic virus comprises a sequence of nucleotide that has at least 95%, at least 96%, at least 97%, at least 98% or at least 99% sequence identity to the sequence set forth in SEQ ID NO:8.

[0941] 162. The recombinant oncolytic virus of any of embodiments 69-104 and 155-161 comprising the sequence of nucleotides set forth in SEQ ID NO: 8.

[0942] 163. The recombinant oncolytic virus of any of embodiments 155-159, wherein the apoptosis-inducible protein is an inducible Fas (iFas) comprising the sequence set forth in SEQ ID NO:28 or a sequence of amino acids that has at least 85%, 90% or 95% sequence identity to SEQ ID NO:28.

[0943] 164. The recombinant oncolytic virus of any of embodiments 69-104, 155-160 and 163, wherein the nucleic acid genome of the recombinant oncolytic virus comprises a sequence of nucleotide that has at least 95%, at least 96%, at least 97%, at least 98% or at least 99% sequence identity to the sequence set forth in SEQ ID NO:9.

[0944] 165. The recombinant oncolytic virus of any of embodiments 69-104, 155-160, 163 and 164 comprising the sequence of nucleotides set forth in SEQ ID NO: 9.

[0945] 166. The recombinant oncolytic virus of any of embodiments 155-159, wherein the apoptosis-inducible protein is an inducible caspase 9 (iCas9) comprising the sequence set forth in SEQ ID NO:26 or a sequence of amino acids that has at least 85%, 90% or 95% sequence identity to SEQ ID NO:26.

[0946] 167. The recombinant oncolytic virus of any of embodiments 69-104, 155-160 and 166, wherein the nucleic acid genome of the recombinant oncolytic virus comprises a sequence of nucleotide that has at least 95%, at least 96%, at least 97%, at least 98% or at least 99% sequence identity to the sequence set forth in SEQ ID NO:7.

[0947] 168. The recombinant oncolytic virus of any of embodiments 69-104, 155-160, 166, and 167 comprising the sequence of nucleotides set forth in SEQ ID NO: 7.

[0948] 169. A pharmaceutical composition comprising the recombinant VACV strain of any of embodiments 51-168.

[0949] 170. The pharmaceutical composition of embodiments 49, 50 and 169, further comprising a pharmaceutically acceptable carrier.

[0950] 171. The pharmaceutical composition of embodiments 49, 50, 169 and 170 that is formulated for intravenous administration, intratumoral administration, intraperitoneal administration or intrapleural administration.

[0951] 172. The pharmaceutical composition of embodiments 49, 50, 169, or 170 that is formulated for intravenous administration.

[0952] 173. The pharmaceutical composition of any of embodiments 49, 50, and 169-172, wherein the pharmaceutical composition is a liquid composition.

[0953] 174. The pharmaceutical composition of embodiments 49, 50 and 169-172, wherein the pharmaceutical composition is lyophilized.

[0954] 175. A method of treating a proliferative disorder in a subject comprising administering to the subject an oncolytic virus of any of embodiments 1-41, the recombinant oncolytic virus of any of embodiments 51-168, or the pharmaceutical composition of any of embodiments 49, 50 and 169-174.

[0955] 176. The method of embodiment 175, wherein the proliferative disorder is a tumor or a metastasis.

[0956] 177. The method of embodiment 175 or embodiment 176, wherein the proliferative disease is cancer.

[0957] 178. The method of embodiment 177, wherein the cancer is a pancreatic cancer, ovarian cancer, lung cancer, colon cancer, prostate cancer, cervical cancer, breast cancer, rectal cancer, renal (kidney) cancer, gastric cancer, esophageal cancer, hepatic (liver) cancer, endometrial cancer, bladder cancer, brain cancer, head and neck cancer, oral cancer (e.g., oral cavity cancer), cervical cancer, uterine cancer, thyroid cancer, testicular cancer, prostate cancer, skin cancers, such as melanoma, e.g., malignant melanoma, cholangiocarcinoma (bile duct cancer), thymic epithelial cancer, e.g., thymoma, leukemia, lymphoma, or multiple myeloma.

[0958] 179. The method of embodiment 177 or embodiment 178, wherein the cancer is MSS colorectal cancer.

[0959] 180. The method of embodiment 179, wherein the nucleic acid genome of the recombinant oncolytic virus comprises a sequence of nucleotide that has at least 95%, at least 96%, at least 97%, at least 98% or at least 99% sequence identity to the sequence set forth in SEQ ID NO:8.

[0960] 181. The method of embodiment 179 or embodiment 180, wherein the nucleic acid genome of the recombinant oncolytic virus comprises the sequence of nucleotides set forth in SEQ ID NO: 8.

[0961] 182. The method of any of embodiments 175-181, wherein the virus is administered in an amount from 1×10⁵ pfu to 1×10¹⁴ pfu.

[0962] 183. The method of any of embodiments 175-182, further comprising administering a second therapeutic agent for the treatment of the proliferative disorder.

[0963] 184. The method of any of embodiments 175-183, further comprising another treatment selected from among surgery, radiation therapy, immunosuppressive therapy and administration of an anticancer agent.

[0964] 185. The method of embodiment 184, wherein the further treatment is administration of an anticancer agent selected from among a cytokine, a chemokine, a growth factor, a photosensitizing agent, a toxin, an anti-cancer antibiotic, a chemotherapeutic compound, a radionuclide, an angiogenesis inhibitor, a signaling modulator, an anti-metabolite, an anti-cancer vaccine, an anti-cancer oligopeptide, a mitosis inhibitor protein, an antimitotic oligopeptide, an anticancer antibody, an anti-cancer antibiotic, an immunotherapeutic agent and a combination of any of the preceding thereof.

[0965] 186. The method of any of embodiments 175-185, wherein the virus is administered intravenously.

[0966] 187. The method of any of embodiments 175-186, further comprising administering AP1903 (Rimiducid) to the subject.

[0967] 188. The method of any of embodiments 175-187, wherein the recombinant oncolytic virus administered to the subject comprises a heterologous nucleic acid encoding an apoptosis inducible protein.

[0968] 189. The method of embodiment 187 or embodiment 188, wherein the nucleic acid genome of the recombinant oncolytic virus comprises a sequence of nucleotide that has at least 95%, at least 96%, at least 97%, at least 98% or at least 99% sequence identity to the sequence set forth in SEQ ID NO:8.

[0969] 190. The method of any of embodiments 187-189, wherein the nucleic acid genome of the recombinant oncolytic virus comprises the sequence of nucleotides set forth in SEQ ID NO: 8.

[0970] 191. The method of any of embodiments 187-190, wherein the subject exhibits severe immune deficiency and is sensitive to virus infection.

[0971] 192. A method of inhibiting virus replication, the method comprising contacting cells infected with a recombinant oncolytic virus with AP1903 (Rimiducid), wherein the recombinant oncolytic virus comprises a heterologous nucleic acid encoding an apoptosis inducible protein.

[0972] 193. The method of embodiment 192, wherein the contacting occurs in vivo in a subject, wherein the AP1903 (Rimiducid) has been administered to a subject previously administered with a recombinant oncolytic virus comprising the heterologous nucleic acid encoding an apoptosis inducible protein.

[0973] 194. A method of inhibiting virus replication in a subject, the method comprising administering to a subject AP1903 (Rimiducid), wherein the subject has been previously administered a recombinant oncolytic virus comprising a heterologous nucleic acid encoding an apoptosis inducible protein.

[0974] 195. The method of embodiment any of embodiments 187-194, wherein the method inhibits virus replication preferentially in non-cancer cells.

[0975] 196. The method of any of embodiments 187-195, wherein the apoptosis-inducible protein is an inducible DED (iDED).

[0976] 197. The method of embodiment 196, wherein the iDED comprises the sequence set forth in SEQ ID NO:27 or a sequence of amino acids that has at least 85%, 90% or 95% sequence identity to SEQ ID NO:27.

[0977] 198. The method of embodiment 196 and embodiment 197, wherein the nucleic acid genome of the recombinant oncolytic virus comprises a sequence of nucleotide that has at least 95%, at least 96%, at least 97%, at least 98% or at least 99% sequence identity to the sequence set forth in SEQ ID NO:8.

[0978] 199. The method of any of embodiments 196-198, wherein the nucleic acid genome of the recombinant oncolytic virus comprises the sequence of nucleotides set forth in SEQ ID NO: 8.

[0979] Also among the provided embodiments are the following:

[0980] 1. A recombinant oncolytic vaccinia virus, comprising:
[0981] an inactivating mutation of B2R;
[0982] a heterologous nucleic acid encoding interferon regulatory factor 3 (IRF3); and
[0983] at least one heterologous nucleic acid encoding one or more cytokine and/or chemokine.

[0984] 2. The recombinant oncolytic vaccinia virus of embodiment 1, wherein the at least one heterologous nucleic acid encoding one or more cytokine and/or chemokine comprises a heterologous nucleic acid encoding chemokine ligand 9 (CXCL9) and/or IL-12.

[0985] 3. The recombinant oncolytic vaccinia virus of embodiment 1 or embodiment 2, wherein the at least one heterologous nucleic acid encoding one or more cytokine and/or chemokine comprises a heterologous nucleic acid encoding CXCL9 and IL-12.

[0986] 4. The recombinant oncolytic vaccinia virus of embodiment 1, wherein the at least one heterologous nucleic acid encoding one or more cytokine and/or chemokine comprises a heterologous nucleic acid encoding CXCL9 and a heterologous nucleic acid encoding IL-12.

[0987] 5. The recombinant oncolytic vaccinia virus of any one of embodiments 1-4, wherein:
[0988] the CXCL9 is human CXCL9 and comprises the amino acid sequence set forth in SEQ ID NO: 99, or an amino acid sequence that has at least 95%, 96%, 97%, 98%, or 99% sequence identity to the amino acid sequence of SEQ ID NO: 99; or
[0989] the CXCL9 is mouse CXCL9 and comprises the amino acid sequence set forth in SEQ ID NO: 106, or an amino acid sequence that has at least 95%, 96%, 97%, 98%, or 99% sequence identity to the amino acid sequence of SEQ ID NO: 106.

[0990] 6. The recombinant oncolytic vaccinia virus of any one of embodiments 1-5, wherein:
[0991] the IL-12 is a human single-chain IL-12 and comprises the amino acid sequence set forth in SEQ ID NO: 103, or an amino acid sequence that has at least 95%, 96%, 97%, 98%, or 99% sequence identity to the amino acid sequence of SEQ ID NO: 103; or
[0992] the IL-12 is a mouse single-chain IL-12 and comprises the amino acid sequence set forth in SEQ ID NO: 102, or an amino acid sequence that has at least 95%, 96%, 97%, 98%, or 99% sequence identity to the amino acid sequence of SEQ ID NO: 102.

[0993] 7. The recombinant oncolytic vaccinia virus of any one of embodiments 1-6, wherein the at least one heterologous nucleic acid encoding one or more cytokine and/or chemokine comprises a heterologous nucleic acid encoding IL-2.

[0994] 8. The recombinant oncolytic vaccinia virus of embodiment 7, wherein the IL-2 comprises the IL-2 comprises an amino acid sequence set forth in any one of SEQ ID NOs: 98, 100, 101, 104, and 105, or an amino acid sequence that has at least 95%, 96%, 97%, 98%, or 99% sequence identity to the amino acid sequence of any one of SEQ ID NOs: 98, 100, 101, 104, and 105.

[0995] 9. The recombinant oncolytic vaccinia virus of embodiment 7 or embodiment 8, wherein the IL-2 is an IL-2 superkine.

[0996] 10. The recombinant oncolytic vaccinia virus of embodiment 9, wherein the IL-2 superkine is H9, H9T, MDNA11, or MDNA11T, and wherein:
[0997] the H9 IL-2 superkine comprises the amino acid sequence of SEQ ID NO: 100, or comprises an amino acid sequence that has at least 95%, 96%, 97%, 98%, or 99% sequence identity to the amino acid sequence of SEQ ID NO: 100; or
[0998] the H9T IL-2 superkine comprises the amino acid sequence of SEQ ID NO: 104, or comprises an amino acid sequence that has at least 95%, 96%, 97%, 98%, or 99% sequence identity to the amino acid sequence of SEQ ID NO: 104; or
[0999] the MDNA11 IL-2 superkine comprises the amino acid sequence of SEQ ID NO: 101, or comprises an amino acid sequence that has at least 95%, 96%, 97%, 98%, or 99% sequence identity to the amino acid sequence of SEQ ID NO: 101; or
[1000] the MDNA11T IL-2 superkine comprises the amino acid sequence of SEQ ID NO: 98, or comprises an amino acid sequence that has at least 95%, 96%, 97%, 98%, or 99% sequence identity to the amino acid sequence of SEQ ID NO: 98.

[1001] 11. The recombinant oncolytic vaccinia virus of embodiment 6 or embodiment 7, wherein the IL-2 superkine is MDNA11T, and the MDNA11T comprises the amino acid sequence set forth in SEQ ID NO: 98, or an amino acid sequence that has at least 95%, 96%, 97%, 98%, or 99% sequence identity to the amino acid sequence set forth in SEQ ID NO: 98.

[1002] 12. The recombinant oncolytic vaccinia virus of any one of embodiments 1-11, further comprising one or more heterologous gene product selected from the group consisting of a complement inhibitor, a T cell or NK cell evader, an immune stimulating protein, an anti-angiogenic protein, an interferon regulatory factor, an apoptosis inducible protein or a combination of any of the foregoing.

[1003] 13. The recombinant oncolytic vaccinia virus of any one of embodiments 1-12, wherein the inactivating mutation of B2R is a deletion of all or a portion of the B2R gene loci.

[1004] 14. The recombinant oncolytic vaccinia virus of embodiment 13, wherein said deletion is sufficient to render the encoded B2R gene product non-functional.

[1005] 15. The recombinant oncolytic virus of any of embodiments 1-14, wherein the inactivating mutation of B2R is characterized by insertion of the heterologous nucleic acid encoding IRF3 and/or at least one of the at least one heterologous nucleic acid encoding one or more cytokine and/or chemokine into the B2R gene loci.

[1006] 16. The recombinant oncolytic virus of any of embodiments 1-15, wherein the inactivating mutation of B2R is characterized by insertion of the heterologous nucleic acid encoding chemokine ligand 9 (CXCL9) and/or IL-12 into the B2R gene loci.

[1007] 17. The recombinant oncolytic vaccinia virus of any one of embodiments 1-16, wherein:
[1008] the heterologous nucleic acid encoding IRF3 is inserted into the hemagglutinin (HA), J2R (thymidine kinase), F14.5L, A56R (hemagglutinin), vaccinia growth factor (VGF), A35R, A49R, A55R, B14R, C4L, C6L, C16L, NIL/N2L, E2L/E3L, K1L/K2L, K7L, superoxide dismutase locus, 7.5K, C2L-F3L, C4L-F1L, C7-K1L, B13R+B14R, A26L, or I4L gene loci in the genome of the virus; and/or
[1009] the at least one of the at least one heterologous nucleic acid encoding one or more cytokine and/or chemokine is inserted into the HA, J2R, F14.5L, A56R, vaccinia growth factor, A35R, A49R, A55R, B14R, C4L, C6L, C16L, NIL/N2L, E2L/E3L, K1L/K2L, K7L, superoxide dismutase locus, 7.5K, C2L-F3L, C4L-F1L, C7-K1L, B13R+B14R, A26L, or I4L gene loci in the genome of the virus.

[1010] 18. The recombinant oncolytic vaccinia virus of any one of embodiments 1-17, wherein the nucleic acid genome of the recombinant oncolytic vaccinia virus is modified from a parental vaccinia virus that has a nucleic acid genome that has at least 99% sequence identity to the nucleic acid sequence set forth in SEQ ID NO: 1, optionally the nucleic acid genome set forth in SEQ ID NO:1.

[1011] 19. The recombinant oncolytic vaccinia virus of any one of embodiments 1-18, wherein the nucleic acid genome of the parental vaccinia virus is characterized by one or more of:
[1012] (i) a variant 017 open reading frame (ORF) encoding an amino acid sequence that has at least 95% sequence identity to SEQ ID NO: 57 and comprises a polar uncharged amino acid at position 66, optionally a threonine (T) at position 66;
[1013] (ii) a variant 038 (K5L) ORF comprising a nucleotide insertion to effect a frameshift mutation, wherein the 038 (K5L) gene product is altered;
[1014] (iii) a variant 059 (E2L) ORF encoding an amino acid sequence that is at least 95% sequence identity to SEQ ID NO:60 and comprises a hydrophobic amino acid other than leucine at position 419, optionally a phenylalanine (F) at position 419;
[1015] (iv) a variant 104 (H4L) ORF encoding an amino acid sequence having at least 95% sequence identity to SEQ ID NO:61 and comprises a negatively charged amino acid at position 591, optionally aspartic acid (D) at position 591; and
[1016] (v) a variant 182 (A56R) ORF comprising deletion of two nucleotides to effect a frameshift mutation, wherein the 182 (A56R) ORF gene product is altered.

[1017] 20. The recombinant oncolytic vaccinia virus of any one of embodiments 1-19, wherein the nucleic acid genome of the parental virus is characterized by one or more of:
[1018] (i) a guanine (G) at the position corresponding to position 7770 of SEQ ID NO: 1;
[1019] (ii) a thymine (T) at the position corresponding to position 15261 of SEQ ID NO: 1;
[1020] (iii) a G at the position corresponding to position 32136 of SEQ ID NO: 1;
[1021] (iv) a G at the position corresponding to position 49455 of SEQ ID NO: 1;
[1022] (v) a cytosine (C) at the position corresponding to position 92969 of SEQ ID NO: 1;
[1023] (vi) the nucleic acid sequence CACTTATATAT at the positions corresponding to positions 106870 to 106880 of SEQ ID NO: 1;
[1024] (vii) the nucleic acid sequence GTTTTCATTA at the positions corresponding to positions 111267 to 111276 of SEQ ID NO: 1;
[1025] (viii) an adenine (A) at the position corresponding to position 162715 of SEQ ID NO: 1;
[1026] (ix) the nucleic acid sequence TACAGACACC at the positions corresponding to positions 165844 to 185853 of SEQ ID NO: 1; and
[1027] (x) a C at the position corresponding to position 187805 of SEQ ID NO: 1.

[1028] 21. The recombinant oncolytic vaccinia virus of any one of embodiments 1-20, wherein the nucleic acid genome of the recombinant oncolytic vaccinia virus has at least 95%, 96%, 97%, 98%, or 99% sequence identity to the nucleic acid sequence set forth in SEQ ID NO: 1.

[1029] 22. The recombinant oncolytic vaccinia virus of any one of embodiments 1-14 and 17-21, wherein:
[1030] the heterologous nucleic acid encoding IRF3 is inserted into the J2R (thymidine kinase) gene locus in the genome of the virus; and
[1031] the at least one heterologous nucleic acid encoding one or more cytokine and/or chemokine comprises a heterologous nucleic acid encoding CXCL9 and IL-12, wherein the heterologous nucleic acid encoding CXCL9 and IL-12 is inserted into the A56R gene locus in the genome of the virus.

[1032] 23. The recombinant oncolytic vaccinia virus of any one of embodiments 1-14 and 17-22, wherein the nucleic acid genome of the recombinant oncolytic vaccinia virus comprises the nucleic acid sequence of SEQ ID NO: 85, or a nucleic acid sequence that has at least 95%, 96%, 97%, 98%, or 99% sequence identity to the nucleic acid sequence set forth in SEQ ID NO: 85.

[1033] 24. The recombinant oncolytic vaccinia virus of any one of embodiments 1-21, wherein the heterologous nucleic acid encoding IRF3 is inserted into the B2R (viral cGAMP-specific nuclease) gene locus in the genome of the virus; and
[1034] the at least one heterologous nucleic acid encoding one or more cytokine and/or chemokine comprises a heterologous nucleic acid encoding CXCL9 and IL-12, wherein the heterologous nucleic acid encoding CXCL9 and IL-12 is inserted into the A56R gene locus in the genome of the virus.

[1035] 25. The recombinant oncolytic vaccinia virus of any one of embodiments 1-24, further comprising a heterologous nucleic acid encoding an apoptosis-inducible protein.

[1036] 26. The recombinant oncolytic vaccinia virus of embodiment 25, wherein the apoptosis-inducible protein is an inducible death effector domain (iDED).

[1037] 27. The recombinant oncolytic vaccinia virus of embodiment 26, wherein the iDED comprises the amino acid sequence set forth in SEQ ID NO:27 or a sequence of amino acids that has at least 85%, 90%, 91%, 92%, 93%, 94%, 95%, 96%, 97%, 98%, or 99% sequence identity to the amino acid sequence set forth in SEQ ID NO:27.

[1038] 28. The recombinant oncolytic vaccinia virus of embodiment 26 or embodiment 27, wherein the heterologous nucleic acid encoding an iDED is inserted into or in place of the J2R gene locus in the genome of the virus.

[1039] 29. The recombinant oncolytic vaccinia virus of any one of embodiments 1-21 and 24-28, wherein the nucleic acid genome of the recombinant oncolytic vaccinia virus comprises the nucleic acid sequence of SEQ ID NO: 86, or a nucleic acid sequence that has at least 95%, 96%, 97%, 98%, or 99% sequence identity to the nucleic acid sequence set forth in SEQ ID NO: 86.

[1040] 30. The recombinant oncolytic vaccinia virus of any one of embodiments 1-29, further comprising a heterologous nucleic acid encoding one or more T cell or NK cell evader proteins.

[1041] 31. The recombinant oncolytic vaccinia virus of embodiment 30, wherein the one or more T cell or NK cell evader proteins comprises a set of proteins encoded by Cowpox virus ORFs 012, 203 and 018 (CPXV012-203-018).

[1042] 32. The recombinant oncolytic vaccinia virus of embodiment 31, wherein the set of proteins encoded by CPXV012-203-018 comprises:
[1043] (i) the amino acid sequence set forth in SEQ ID NO: 20 (CPXV012) or an amino acid sequence that has at least 85%, 90%, 91%, 92%, 93%, 94%, 95%, 96%, 97%, 98%, or 99% sequence identity to the amino acid sequence set forth in SEQ ID NO: 20,
[1044] (ii) the amino acid sequence set forth in SEQ ID NO: 21 (CPXV0203) or an amino acid sequence that has at least 85%, 90%, 91%, 92%, 93%, 94%, 95%, 96%, 97%, 98%, or 99% sequence identity to the amino acid sequence set forth in SEQ ID NO: 21, and
[1045] (iii) the amino acid sequence set forth in SEQ ID NO: 22 (CPXV018) or an amino acid sequence that has at least 85%, 90%, 91%, 92%, 93%, 94%, 95%, 96%, 97%, 98%, or 99% sequence identity to the amino acid sequence set forth in SEQ ID NO: 22.

[1046] 33. The recombinant oncolytic vaccinia virus of any one of embodiments 1-32, further comprising a heterologous nucleic acid encoding a complement inhibitor.

[1047] 34. The recombinant oncolytic vaccinia virus of embodiment 33, wherein the complement inhibitor is Borrelia burgdorferi complement regulatory-acquiring surface protein-2 (CRASP-2).

[1048] 35. The recombinant oncolytic vaccinia virus of embodiment 34, wherein the heterologous nucleic acid encoding CRASP-2 is fused with a viral membrane gene, optionally F14.5L, to produce a fusion gene encoding a fusion protein.

[1049] 36. The recombinant oncolytic vaccinia virus of embodiment 35, wherein the fusion protein comprises the CRASP-2 fused to a viral membrane protein encoded by the viral membrane gene.

[1050] 37. The recombinant oncolytic virus of embodiment 36, wherein the viral membrane protein is F14.5L, optionally wherein the fusion is at the C-terminus of F14.5L.

[1051] 38. The recombinant oncolytic vaccinia virus of any one of embodiments 1-22, 24-28 and wherein the nucleic acid genome of the recombinant oncolytic vaccinia virus comprises the nucleic acid sequence of SEQ ID NO: 90, or a nucleic acid sequence that has at least 95%, 96%, 97%, 98%, or 99% sequence identity to the nucleic acid sequence set forth in SEQ ID NO: 90.

[1052] 39. The recombinant oncolytic vaccinia virus of any one of embodiments 1-21, 25-28, and wherein the heterologous nucleic acid encoding IRF3 is inserted into or in place of the B2R (viral cGAMP-specific nuclease) gene locus in the genome of the virus; and
[1053] the at least one heterologous nucleic acid encoding one or more cytokine and/or chemokine comprises a heterologous nucleic acid encoding IL-2, wherein the IL-2 is an IL-2 superkine that is MDNA11T.

[1054] 40. The recombinant oncolytic vaccinia virus of any one of embodiments 1-39, further comprising a heterologous nucleic acid encoding an immune stimulating protein, and/or a heterologous nucleic acid encoding one or more anti-angiogenic protein.

[1055] 41. The recombinant oncolytic vaccinia virus of embodiment 40, wherein the immune stimulating protein is recombinant LIGHT.

[1056] 42. The recombinant oncolytic vaccinia virus of embodiment 41, wherein the recombinant LIGHT comprises the amino acid sequence set forth in SEQ ID NO: 30, or an amino acid sequence that has at least 85%, 90%, 91%, 92%, 93%, 94%, 95%, 96%, 97%, 98%, or 99% sequence identity to the amino acid sequence set forth in SEQ ID NO:30.

[1057] 43. The recombinant oncolytic vaccinia virus of any one of embodiments 40-42, wherein the one or more anti-angiogenic protein comprises a VEGF inhibitor, an angiopoietin inhibitor, versikine, or a fusion protein of any two or more of the foregoing.

[1058] 44. The recombinant oncolytic vaccinia virus of embodiment 43, wherein the one or more anti-angiogenic protein comprises an anti-VEGF antibody and/or an anti-Ang2 antibody.

[1059] 45. The recombinant oncolytic vaccinia virus of embodiment 43 or embodiment 44, wherein the one or more anti-angiogenic protein is a bispecific anti-VEGF/anti-Ang2 antibody.

[1060] 46. The recombinant oncolytic vaccinia virus of embodiment 45, wherein the bispecific anti-VEGF/anti-Ang2 antibody comprises the amino acid sequence set forth in SEQ ID NO: 23, or an amino acid sequence that has at least 85%, 90%, 91%, 92%, 93%, 94%, 95%, 96%, 97%, 98%, or 99% sequence identity to the sequence set forth in SEQ ID NO:23.

[1061] 47. The recombinant oncolytic vaccinia virus of any one of embodiments 1-22, 24-28, 30-37 and 39-46, wherein the nucleic acid genome of the recombinant oncolytic vaccinia virus comprises the nucleic acid sequence of SEQ ID NO: 88, or a nucleic acid sequence that has at least 95%, 96%, 97%, 98%, or 99% sequence identity to the nucleic acid sequence set forth in SEQ ID NO: 88.

[1062] 48. A recombinant oncolytic virus, comprising:
[1063] an inactivating mutation of at least one viral gene; and
[1064] at least one heterologous nucleic acid encoding one or more heterologous gene product, wherein the one or more heterologous gene product is or comprises an immune modulating protein, a complement inhibitor, a T cell or NK cell evader, an anti-angiogenic protein, an interferon regulatory factor, or an apoptosis inducible protein, or a combination of any of the foregoing.

[1065] 49. A recombinant oncolytic virus, comprising at least one heterologous nucleic acid encoding one or more heterologous gene product, wherein the one or more heterologous gene product is or comprises a complement inhibitor, a T cell or NK cell evader, an immune modulating protein, an anti-angiogenic protein, an interferon regulatory factor, an apoptosis inducible protein, or a combination of any of the foregoing.

[1066] 50. The recombinant oncolytic virus of embodiment 48 or embodiment 50, wherein the oncolytic virus is a vaccinia virus, a herpes simplex virus, vesicular stomatitis virus (VSV), a Maraba virus (MARAV), a measles virus (MV), adenovirus, myxoma virus, orf virus, parvovirus, raccoonpox virus, coxsackievirus, reovirus, Newcastle disease virus, Seneca valley virus, Semliki Forest virus, mumps virus, influenza virus, echovirus, and a poliovirus (PV).

[1067] 51. The recombinant oncolytic virus of any one of embodiments 48-50, wherein the oncolytic virus is a vaccinia virus.

[1068] 52. The recombinant oncolytic vaccinia virus of any one of embodiments 48-51, wherein the nucleic acid genome of the recombinant oncolytic vaccinia virus is modified from a parental vaccinia virus that has a nucleic acid genome that has at least 99% sequence identity to the nucleic acid sequence set forth in SEQ ID NO: 1, optionally the nucleic acid genome set forth in SEQ ID NO:1.

[1069] 53. A recombinant oncolytic virus, comprising a nucleic acid genome that is modified from a parental vaccinia virus genome that has at least 99% sequence identity with the nucleic acid sequence set forth in SEQ ID NO: 1, and comprises at least one heterologous nucleic acid encoding one or more heterologous gene product inserted in the genome.

[1070] 54. The recombinant oncolytic vaccinia virus of embodiment 52 or embodiment 53, wherein the nucleic acid genome of the parental vaccinia virus is characterized by one or more of:
[1071] (i) a variant 017 open reading frame (ORF) encoding an amino acid sequence that has at least 95% sequence identity to SEQ ID NO: 57 and comprises a polar uncharged amino acid at position 66, optionally a threonine (T) at position 66;
[1072] (ii) a variant 038 (K5L) ORF comprising a nucleotide insertion to effect a frameshift mutation, wherein the 038 (K5L) gene product is altered;
[1073] (iii) a variant 059 (E2L) ORF encoding an amino acid sequence that is at least 95% sequence identity to SEQ ID NO:60 and comprises a hydrophobic amino acid other than leucine at position 419, optionally a phenylalanine (F) at position 419;
[1074] (iv) a variant 104 (H4L) ORF encoding an amino acid sequence having at least 95% sequence identity to SEQ ID NO:61 and comprises a negatively charged amino acid at position 591, optionally aspartic acid (D) at position 591; and
[1075] (v) a variant 182 (A56R) ORF comprising deletion of two nucleotides to effect a frameshift mutation, wherein the 182 (A56R) ORF gene product is altered.

[1076] 55. The recombinant oncolytic virus of any one of embodiments 52-54, wherein the parental vaccinia virus genome is characterized by one or more of:
[1077] (i) a guanine (G) at the position corresponding to position 7770 of SEQ ID NO: 1;
[1078] (ii) a thymine (T) at the position corresponding to position 15261 of SEQ ID NO: 1;
[1079] (iii) a G at the position corresponding to position 32136 of SEQ ID NO: 1;
[1080] (iv) a G at the position corresponding to position 49455 of SEQ ID NO: 1;
[1081] (v) a cytosine© at the position corresponding to position 92969 of SEQ ID NO: 1;
[1082] (vi) the nucleic acid sequence CACTTATATAT at the positions corresponding to positions 106870 to 106880 of SEQ ID NO: 1;
[1083] (vii) the nucleic acid sequence GTTTTCATTA at the positions corresponding to positions 111267 to 111276 of SEQ ID NO: 1;
[1084] (viii) an adenine (A) at the position corresponding to position 162715 of SEQ ID NO: 1;
[1085] (ix) the nucleic acid sequence TACAGACACC at the positions corresponding to positions 165844 to 185853 of SEQ ID NO: 1; and
[1086] (x) a C at the position corresponding to position 187805 of SEQ ID NO: 1.

[1087] 56. The recombinant oncolytic vaccinia virus of any one of embodiments 52-55, wherein the nucleic acid genome of the recombinant oncolytic vaccinia virus has at least 95%, 96%, 97%, 98%, or 99% sequence identity to the nucleic acid sequence set forth in SEQ ID NO: 1.

[1088] 57. The recombinant oncolytic virus of any of embodiments 1-56, wherein the recombinant oncolytic virus is a recombinant oncolytic vaccinia virus, and wherein the nucleic acid genome of the recombinant oncolytic vaccinia virus is characterized by one or more of:
[1089] (i) a variant 017 open reading frame (ORF) encoding an amino acid sequence that has at least 95% sequence identity to SEQ ID NO: 57 and comprises a polar uncharged amino acid at position 66, optionally a threonine (T) at position 66;
[1090] (ii) a variant 038 (K5L) ORF comprising a nucleotide insertion to effect a frameshift mutation, wherein the 038 (K5L) gene product is altered;
[1091] (iii) a variant 059 (E2L) ORF encoding an amino acid sequence that is at least 95% sequence identity to SEQ ID NO:60 and comprises a hydrophobic amino acid other than leucine at position 419, optionally a phenylalanine (F) at position 419;
[1092] (iv) a variant 104 (H4L) ORF encoding an amino acid sequence having at least 95% sequence identity to SEQ ID NO:61 and comprises a negatively charged amino acid at position 591, optionally aspartic acid (D) at position 591; and
[1093] (v) a variant 182 (A56R) ORF comprising deletion of two nucleotides to effect a frameshift mutation, wherein the 182 (A56R) ORF gene product is altered.

[1094] 58. The recombinant oncolytic virus of any one of embodiments 1-57, wherein the recombinant oncolytic virus is a recombinant oncolytic vaccinia virus, and wherein the nucleic acid genome of the recombinant oncolytic vaccinia virus is characterized by one or more of:
[1095] (i) a guanine (G) at the position corresponding to position 7770 of SEQ ID NO: 1;
[1096] (ii) a thymine (T) at the position corresponding to position 15261 of SEQ ID NO: 1;
[1097] (iii) a G at the position corresponding to position 32136 of SEQ ID NO: 1;
[1098] (iv) a G at the position corresponding to position 49455 of SEQ ID NO: 1;
[1099] (v) a cytosine (C) at the position corresponding to position 92969 of SEQ ID NO: 1;
[1100] (vi) the nucleic acid sequence CACTTATATAT at the positions corresponding to positions 106870 to 106880 of SEQ ID NO: 1;
[1101] (vii) the nucleic acid sequence GTTTTCATTA at the positions corresponding to positions 111267 to 111276 of SEQ ID NO: 1;
[1102] (viii) an adenine (A) at the position corresponding to position 162715 of SEQ ID NO: 1;
[1103] (ix) the nucleic acid sequence TACAGACACC at the positions corresponding to positions 165844 to 185853 of SEQ ID NO: 1; and
[1104] (x) a C at the position corresponding to position 187805 of SEQ ID NO: 1.

[1105] 59. The recombinant oncolytic virus of any of embodiments 48-58, wherein at least one of the at least one heterologous nucleic acid encoding the one or more heterologous gene product is inserted into a non-essential gene or region in the genome of the virus.

[1106] 60. The recombinant oncolytic virus of any of embodiments 48-59, wherein at least one of the at least one heterologous nucleic acid encoding the one or more heterologous gene product is inserted into the hemagglutinin (HA), J2R (thymidine kinase), F14.5L, A56R (hemagglutinin), B2R, vaccinia growth factor (VGF), A35R, A49R, A55R, B14R, C4L, C6L, C16L, NIL/N2L, E2L/E3L, K1L/K2L, K7L, superoxide dismutase locus, 7.5K, C2L-F3L, C4L-F1L, C7-K1L, B13R+B14R, A26L, or I4L gene loci in the genome of the virus.

[1107] 61. The recombinant oncolytic virus of embodiment 59, wherein each of the at least one heterologous nucleic acid encoding the one or more heterologous gene product that is inserted into a non-essential gene or region in the genome of the virus is each independently inserted into the hemagglutinin (HA), J2R (thymidine kinase), F14.5L, A56R (hemagglutinin), B2R, vaccinia growth factor (VGF), A35R, A49R, A55R, B14R, C4L, C6L, C16L, NIL/N2L, E2L/E3L, K1L/K2L, K7L, superoxide dismutase locus, 7.5K, C2L-F3L, C4L-F1L, C7-K1L, B13R+B14R, A26L, or I4L gene loci in the genome of the virus.

[1108] 62. The recombinant oncolytic virus of any one of embodiments 48, 50-52, and 54-59, wherein the at least one viral gene comprises one or more viral genes selected from the group consisting of hemagglutinin (HA), J2R (thymidine kinase), F14.5L, A56R (hemagglutinin), B2R, vaccinia growth factor (VGF), A35R, A49R, A55R, B14R, C4L, C6L, C16L, NIL/N2L, E2L/E3L, K1L/K2L, K7L, superoxide dismutase locus, 7.5K, C2L-F3L, C4L-F1L, C7-K1L, B13R+B14R, A26L, and I4L, and any combination thereof.

[1109] 63. The recombinant oncolytic virus of any one of embodiments 48, 50-52, 54-59 and 62, wherein the at least one viral gene is or comprises:
[1110] (i) B2R;
[1111] (ii) A35R;
[1112] (iii) A35R and J2R;
[1113] (iv) J2R;
[1114] (v) B2R and J2R;
[1115] (vi) A35R, B2R, and J2R;
[1116] (vii) B2R, J2R, and A56R; or
[1117] (viii) A35R, B2R, J2R, and A56R.

[1118] 64. The recombinant oncolytic virus of any one of embodiments 48, 50-52, and 54-63, wherein the inactivating mutation of one or more of the at least one viral gene is, independently, by:
[1119] insertion of at least one of the at least one heterologous nucleic acid encoding one or more heterologous gene product into a gene loci in the genome of the virus;
[1120] a deletion of all or a portion of the at least one viral gene; and/or
[1121] one or more nucleic acid substitutions in the at least one viral gene.

[1122] 65. The recombinant oncolytic virus of any one of embodiments 48, 50-52, and 54-64, wherein the inactivating mutation is a deletion of all or a portion of the at least one viral gene.

[1123] 66. The recombinant oncolytic virus of embodiment 64 or embodiment 65, wherein: the deletion of the at least one viral gene is deletion of the entire gene ORF of a viral gene.

[1124] 67. The recombinant oncolytic virus of any one of embodiments 64-66, wherein:
[1125] the deletion is sufficient to render the encoded viral gene product non-functional.

[1126] 68. The recombinant oncolytic virus of embodiment 64, wherein the one or more nucleic acid substitutions is sufficient to render the encoded viral gene product non-functional.

[1127] 70. The recombinant oncolytic virus of any one of embodiments 48, 50-52, and 54-68, wherein the inactivating mutation of one or more of the at least one viral gene is characterized by insertion of at least one of the at least one heterologous nucleic acid encoding one or more heterologous gene product into the viral gene loci.

[1128] 71. The recombinant oncolytic virus of embodiment 70, wherein the at least one viral gene comprises B2R.

[1129] 72. The recombinant oncolytic virus of embodiment 70 or embodiment 71, wherein the at least one viral gene comprises J2R.

[1130] 73. The recombinant oncolytic virus of any one of embodiments 70-72, wherein the at least one viral gene comprises A35R.

[1131] 74. The recombinant oncolytic virus of any one of embodiments 70-73, wherein the at least one viral gene comprises A56R.

[1132] 75. The recombinant oncolytic virus of any one of embodiments 70-74, wherein the at least one viral gene comprises B2R, J2R, and A35R.

[1133] 76. The recombinant oncolytic virus of any one of embodiments 70-75, wherein the at least one viral gene comprises B2R, J2R, A35R, and A56R.

[1134] 77. The recombinant oncolytic virus of any one of embodiments 70-76, wherein the at least one viral gene comprises B2R, J2R, and A56R.

[1135] 78. The recombinant oncolytic virus of any of embodiments 48-77, wherein:
[1136] at least one heterologous nucleic acid encoding the one or more heterologous gene product is inserted into or in place of F14.5L.

[1137] 79. The recombinant oncolytic virus of any of embodiments 48-78, wherein at least one heterologous nucleic acid encoding the one or more heterologous gene product is inserted into or in place of A35R.

[1138] 80. The recombinant oncolytic virus of any of embodiments 48-78, wherein at least one heterologous nucleic acid encoding the one or more heterologous gene product is inserted into or in place of J2R.

[1139] 81. The recombinant oncolytic virus of any one of embodiments 48-80, wherein the at least one heterologous nucleic acid encoding one or more heterologous gene product comprises one or more heterologous nucleic acid each encoding one or more immune modulating proteins.

[1140] 82. The recombinant oncolytic virus of any one of embodiments 48, 50-52, and 54-81, wherein the inactivating mutation of one or more of the at least one viral gene is by insertion of one or more heterologous nucleic acid each encoding one or more immune modulating proteins.

[1141] 83. The recombinant oncolytic virus of embodiment 81 or embodiment 82, wherein the one or more immune modulating proteins comprises one or more immune stimulating proteins.

[1142] 84. The recombinant oncolytic virus of any one of embodiments 81-83, wherein the one or more immune modulating proteins comprises one or more cytokines and/or chemokines.

[1143] The recombinant oncolytic virus of any one of embodiments 81-84, wherein the one or more immune modulating proteins comprises one or more interferon regulatory factors, optionally IRF3.

[1144] 86. The recombinant oncolytic virus of embodiment 85, wherein the one or more interferon regulatory factors is or comprises interferon regulatory factor 3 (IRF3).

[1145] 87. The recombinant oncolytic virus of any one of embodiments 81-86, wherein the one or more immune modulating proteins comprises interferon regulatory factor 3 (IRF3) and one or more cytokines and/or chemokines.

[1146] 88. The recombinant oncolytic virus of any one of embodiments 81-87, wherein the one or more immune modulating proteins comprises one or more immune modulating proteins selected from the group consisting of LIGHT, IRF3, IL-2, IL-12, and CXCL9.

[1147] 89. The recombinant oncolytic virus of embodiment 88, wherein the CXCL9 is human CXCL9 and comprises the amino acid sequence set forth in SEQ ID NO: 99, or an amino acid sequence that has at least 95%, 96%, 97%, 98%, or 99% sequence identity to the amino acid sequence of SEQ ID NO: 99.

[1148] 90. The recombinant oncolytic virus of embodiment 88, wherein the CXCL9 is mouse CXCL9 and comprises the amino acid sequence set forth in SEQ ID NO: 106, or an amino acid sequence that has at least 95%, 96%, 97%, 98%, or 99% sequence identity to the amino acid sequence of SEQ ID NO: 106.

[1149] 91. The recombinant oncolytic virus of embodiment 88, wherein the IL-12 is a human single-chain IL-12 and comprises the amino acid sequence set forth in SEQ ID NO: 103, or an amino acid sequence that has at least 95%, 96%, 97%, 98%, or 99% sequence identity to the amino acid sequence of SEQ ID NO: 103.

[1150] 92. The recombinant oncolytic virus of embodiment 88, wherein the IL-12 is a mouse single-chain IL-12 and comprises the amino acid sequence set forth in SEQ ID NO: 102, or an amino acid sequence that has at least 95%, 96%, 97%, 98%, or 99% sequence identity to the amino acid sequence of SEQ ID NO: 102.

[1151] 93. The recombinant oncolytic virus of any one of embodiments 81-92, wherein the one or more immune modulating proteins comprises IRF3.

[1152] 94. The recombinant oncolytic virus of embodiment 93, wherein the IRF3 is a human IRF3 (hIRF3).

[1153] 95. The recombinant oncolytic virus of embodiment 94, wherein the hIRF3 comprises the amino acid sequence set forth in SEQ ID NO: 51, or an amino acid sequence that has at least 95%, 96%, 97%, 98%, or 99% sequence identity to the amino acid sequence set forth in SEQ ID NO: 51.

[1154] 96. The recombinant oncolytic virus of embodiment 93, wherein the IRF3 is a mouse IRF3 (mIRF3).

[1155] 97. The recombinant oncolytic virus of embodiment 96, wherein the mIRF3 comprises the amino acid sequence set forth in SEQ ID NO: 52, or an amino acid sequence that has at least 95%, 96%, 97%, 98%, or 99% sequence identity to the amino acid sequence set forth in SEQ ID NO: 52.

[1156] 98. The recombinant oncolytic virus of any one of embodiments 81-97, wherein the nucleic acid genome of the recombinant oncolytic virus comprises the nucleic acid sequence set forth in any one of SEQ ID NOs: 49, 50, 80, 82, and 84-93, or a nucleic acid sequence that has at least 95%, 96%, 97%, 98%, or 99% sequence identity to the nucleic acid sequence set forth in any one of SEQ ID NOs: 49, 50, 82, and 84-93.

[1157] 99. The recombinant oncolytic virus of any one of embodiments 81-98, wherein the one or more immune modulating proteins comprises IRF3 and one or more immune modulating proteins selected from the group consisting of LIGHT, IL-2, IL-12, and CXCL9.

[1158] 100. The recombinant oncolytic virus of any one of embodiments 81-99, wherein the one or more immune modulating proteins comprises IL-2.

[1159] 101. The recombinant oncolytic virus of any one of embodiments 81-100, wherein the one or more immune modulating proteins comprises IL-12.

[1160] 102. The recombinant oncolytic virus of any one of embodiments 81-101, wherein the one or more immune modulating proteins comprises LIGHT.

[1161] 10³. The recombinant oncolytic virus of any one of embodiments 81-102, wherein the one or more immune modulating proteins comprises CXCL9.

[1162] 104. The recombinant oncolytic virus of any one of embodiments 81-10³, wherein the one or more immune modulating proteins is or comprises:
[1163] (i) IRF3;
[1164] (ii) LIGHT;
[1165] (iii) IRF3 and LIGHT;
[1166] (iv) IRF3 and IL-2;
[1167] (v) IRF3, CXCL9, and IL-12;
[1168] (vi) IRF3, LIGHT, and IL-2;
[1169] (vii) IRF3 and CXCL9; or
[1170] (viii) IRF3, CXCL9, and IL-2.

[1171] 105. The recombinant oncolytic virus of any one of embodiments 88-104, wherein the IL-2 is a human IL-2.

[1172] 106. The recombinant oncolytic virus of any one of embodiments 88-105, wherein the IL-2 is an IL-2 superkine.

[1173] 107. The recombinant oncolytic virus of embodiment 106, wherein the IL-2 superkine is H9, H9T, MDNA11, or MDNA11T.

[1174] 108. The recombinant oncolytic virus of embodiment 106, wherein:
[1175] the H9 IL-2 superkine comprises the amino acid sequence of SEQ ID NO: 100, or comprises an amino acid sequence that has at least 95%, 96%, 97%, 98%, or 99% sequence identity to the amino acid sequence of SEQ ID NO: 100; or
[1176] the H9T IL-2 superkine comprises the amino acid sequence of SEQ ID NO: 104, or comprises an amino acid sequence that has at least 95%, 96%, 97%, 98%, or 99% sequence identity to the amino acid sequence of SEQ ID NO: 104; or
[1177] the MDNA11 IL-2 superkine comprises the amino acid sequence of SEQ ID NO: 101, or comprises an amino acid sequence that has at least 95%, 96%, 97%, 98%, or 99% sequence identity to the amino acid sequence of SEQ ID NO: 101; or
[1178] the MDNA11T IL-2 superkine comprises the amino acid sequence of SEQ ID NO: 98, or comprises an amino acid sequence that has at least 95%, 96%, 97%, 98%, or 99% sequence identity to the amino acid sequence of SEQ ID NO: 98.

[1179] 109. The recombinant oncolytic vaccinia virus of any one of embodiments 106-108, wherein the IL-2 superkine is MDNA11 or MDNA11T.

[1180] 110. The recombinant oncolytic vaccinia virus of any one of embodiments 106-109, wherein the IL-2 superkine is MDNA11T.
[1181] the MDNA11T comprises the amino acid sequence set forth in SEQ ID NO: 98, or an amino acid sequence that has at least 95%, 96%, 97%, 98%, or 99% sequence identity to the amino acid sequence set forth in SEQ ID NO: 98.

[1182] 111. The recombinant oncolytic virus of any one of embodiments 88-110, wherein the LIGHT is recombinant LIGHT.

[1183] 112. The recombinant oncolytic virus of embodiment 111, wherein the recombinant LIGHT is a human LIGHT protein or is a mutant thereof 113. The recombinant oncolytic virus of embodiment 111 or embodiment 112, wherein the recombinant LIGHT comprises an amino acid sequence that has at least 95%, 96%, 97%, 98%, or 99% sequence identity to the amino acid sequence set forth in SEQ ID NO: 30.

[1184] 114. The recombinant oncolytic virus of any of embodiments 111-113, wherein the recombinant LIGHT is human LIGHT mutant (hmLIGHT) that is a human LIGHT mutant that binds human and mouse LTβR and HVEM.

[1185] 115. The recombinant oncolytic virus of any one of embodiments 111-114, wherein the recombinant LIGHT comprises one or more mutations selected from the group consisting of a threonine at position 138, a glycine at position 160, a glycine at position 221, and a lysine at position 222.

[1186] 116. The recombinant oncolytic virus of any one of embodiments 111-115, wherein the recombinant LIGHT comprises the amino acid sequence set forth in SEQ ID NO: 25, or an amino acid sequence that has at least 95%, 96%, 97%, 98%, or 99% sequence identity to the amino acid sequence set forth in SEQ ID NO: 25.

[1187] 117. The recombinant oncolytic virus of any one of embodiments 111-116, wherein the recombinant LIGHT comprises the sequence set forth in SEQ ID NO: 25.

[1188] 118. The recombinant oncolytic virus of any one of embodiments 111-117, wherein the nucleic acid genome of the recombinant oncolytic virus comprises the nucleic acid sequence set forth in any one of SEQ ID NOs: 11, 82, 87, and 88, or a nucleic acid sequence that has at least 95%, 96%, 97%, 98%, or 99% sequence identity to the nucleic acid sequence set forth in any one of SEQ ID NOs: 11, 82, 87, and 88.

[1189] 119. The recombinant oncolytic virus of any one of embodiments 88-118, wherein the IL-12 is a human IL-12.

[1190] 120. The recombinant oncolytic virus of embodiment 119, wherein the human IL-12 is a human single chain IL-12 (hscIL-12).

[1191] 121. The recombinant oncolytic virus of embodiment 120, wherein the hscIL-12 comprises the amino acid sequence set forth in SEQ ID NO: 103, or an amino acid sequence that has at least 95%, 96%, 97%, 98%, or 99% sequence identity to the amino acid sequence set forth in SEQ ID NO: 103.

[1192] 122. The recombinant oncolytic virus of any one of embodiments 88-121, wherein the CXCL9 is a human CXCL9.

[1193] 123. The recombinant oncolytic virus of embodiment 122, wherein the human CXCL9 comprises the amino acid sequence set forth in SEQ ID NO: 99, or an amino acid sequence that has at least 95%, 96%, 97%, 98%, or 99% sequence identity to the amino acid sequence set forth in SEQ ID NO: 99.

[1194] 124. The recombinant oncolytic virus of any one of embodiments 48-123, wherein the at least one heterologous nucleic acid encoding one or more heterologous gene product comprises one or more heterologous nucleic acid each encoding an apoptosis-inducible protein.

[1195] 125. The recombinant oncolytic virus of any one of embodiments 48, 50-52, and 54-124, wherein the inactivating mutation of one or more of the at least one viral gene is by insertion of one or more heterologous nucleic acid each encoding an apoptosis-inducible protein.

[1196] 126. The recombinant oncolytic virus of embodiment 124 or embodiment 125, wherein the apoptosis-inducible protein comprises a proapoptotic molecule fused with an FKBP variant that is able to bind a chemical inducer of dimerization (CID).

[1197] 127. The recombinant oncolytic virus of embodiment 126, wherein the FKBP variant is FKBP-F36V, optionally wherein the FKBP-F36V comprises the amino acid sequence set forth in SEQ ID NO: 56 or an amino acid sequence that has at least 95%, 96%, 97%, 98%, or 99% sequence identity to the amino acid sequence set forth in SEQ ID NO: 56.

[1198] 128. The recombinant oncolytic virus of embodiment 126 or embodiment 127, wherein the chemical inducer of dimerization is AP1903 (Rimiducid).

[1199] 129. The recombinant oncolytic virus of any of embodiments 126-128, wherein the proapoptotic molecule is or comprises Fas, the death effector domain (DED) of the Fas-associated death domain-containing protein (FADD), or a caspase, optionally wherein the caspase is caspase 9.

[1200] 130. The recombinant oncolytic virus of any one of embodiments 124-129, wherein the apoptosis-inducible protein is an inducible DED (iDED).

[1201] 131. The recombinant oncolytic virus of embodiment 130, wherein the iDED comprises the amino acid sequence set forth in SEQ ID NO: 27 or an amino acid sequence that has at least 95%, 96%, 97%, 98%, or 99% sequence identity to the amino acid sequence set forth in SEQ ID NO: 27.

[1202] 132. The recombinant oncolytic virus of any one of embodiments 124-131, wherein the nucleic acid genome of the recombinant oncolytic virus comprises the nucleic acid sequence set forth in SEQ ID NO: 8 or 86, or a nucleic acid sequence that has at least 95%, 96%, 97%, 98%, or 99% sequence identity to the nucleic acid sequence set forth in SEQ ID NO: 8 or 86.

[1203] 133. The recombinant oncolytic virus of any of embodiments 124-129, wherein the apoptosis-inducible protein is an inducible Fas (iFas).

[1204] 134. The recombinant oncolytic virus of embodiment 133, wherein the iFas comprises the amino acid sequence set forth in SEQ ID NO: 28 or an amino acid sequence that has at least 95%, 96%, 97%, 98%, or 99% sequence identity to the amino acid sequence set forth in SEQ ID NO: 28.

[1205] 135. The recombinant oncolytic virus of any one of embodiments 124-129, 133, and 135, wherein the nucleic acid genome of the recombinant oncolytic virus comprises the nucleic acid sequence set forth in SEQ ID NO: 9, or a nucleic acid sequence that has at least 95%, 96%, 97%, 98%, or 99% sequence identity to the nucleic acid sequence set forth in SEQ ID NO: 9.

[1206] 136. The recombinant oncolytic virus of any of embodiments 124-129, wherein the apoptosis-inducible protein is an inducible caspase 9 (iCas9).

[1207] 137. The recombinant oncolytic virus of embodiment 136, wherein the iCas9 comprises the amino acid sequence set forth in SEQ ID NO: 26 or an amino acid sequence that has at least 95%, 96%, 97%, 98%, or 99% sequence identity to the amino acid sequence set forth in SEQ ID NO: 26.

[1208] 138. The recombinant oncolytic virus of any one of embodiments 124-129, 136, and 137, wherein the nucleic acid genome of the recombinant oncolytic virus comprises the nucleic acid sequence set forth in SEQ ID NO: 7, or a nucleic acid sequence that has at least 95%, 96%, 97%, 98%, or 99% sequence identity to the nucleic acid sequence set forth in SEQ ID NO: 7.

[1209] 139. The recombinant oncolytic virus of any of embodiments 48-138, wherein the at least one heterologous nucleic acid encoding one or more heterologous gene product comprises one or more heterologous nucleic acid each encoding one or more T cell or NK cell evader proteins.

[1210] 140. The recombinant oncolytic virus of any one of embodiments 48, 50-52, and 54-139, wherein the inactivating mutation of one or more of the at least one viral gene is by insertion of one or more heterologous nucleic acid each encoding one or more T cell or NK cell evader proteins.

[1211] 141. The recombinant oncolytic vaccinia virus of embodiment 139 or embodiment 140, wherein the one or more T cell or NK cell evader proteins comprises a set of proteins encoded by Cowpox virus ORFs 012, 203 and 018 (CPXV012-203-018).

[1212] 142. The recombinant oncolytic vaccinia virus of any one of embodiments 139-141, wherein the one or more T cell or NK cell evader proteins comprises a set of proteins that is or comprises the CPXV012, CPXV203, and CPXV018 proteins.

[1213] 143. The recombinant oncolytic vaccinia virus of embodiment 141 or embodiment 142, wherein the set of proteins encoded by CPXV012-203-018 comprises:
[1214] (i) the amino acid sequence set forth in SEQ ID NO: 20 (CPXV012) or an amino acid sequence that has at least 85%, 90%, 91%, 92%, 93%, 94%, 95%, 96%, 97%, 98%, or 99% sequence identity to the amino acid sequence set forth in SEQ ID NO: 20,
[1215] (ii) the amino acid sequence set forth in SEQ ID NO: 21 (CPXV0203) or an amino acid sequence that has at least 85%, 90%, 91%, 92%, 93%, 94%, 95%, 96%, 97%, 98%, or 99% sequence identity to the amino acid sequence set forth in SEQ ID NO: 21, and
[1216] (iii) the amino acid sequence set forth in SEQ ID NO: 22 (CPXV018) or an amino acid sequence that has at least 85%, 90%, 91%, 92%, 93%, 94%, 95%, 96%, 97%, 98%, or 99% sequence identity to the amino acid sequence set forth in SEQ ID NO: 22.

[1217] 144. The recombinant oncolytic vaccinia virus of any one of embodiments 141-143, wherein the set of proteins encoded by CPXV012-203-018 comprises the amino acid sequences set forth in SEQ ID NO:20, SEQ ID NO:21, and SEQ ID NO:22.

[1218] 145. The recombinant oncolytic vaccinia virus of any one of embodiments 139-144, wherein the nucleic acid genome of the recombinant oncolytic virus comprises the nucleic acid sequence set forth in any one of SEQ ID NOs: 10, 89, and 90, or a nucleic acid sequence that has at least 95%, 96%, 97%, 98%, or 99% sequence identity to the nucleic acid sequence set forth in any one of SEQ ID NOs: 10, 89, and 90.

[1219] 146. The recombinant oncolytic virus of any of embodiments 48-145, wherein the at least one heterologous nucleic acid encoding one or more heterologous gene product comprises one or more heterologous nucleic acid each encoding one or more complement inhibitor.

[1220] 147. The recombinant oncolytic virus of any one of embodiments 48, 50-52, and 54-146, wherein the inactivating mutation of one or more of the at least one viral gene is by insertion of one or more heterologous nucleic acid each encoding one or more complement inhibitor.

[1221] 148. The recombinant oncolytic virus of embodiment 146 or embodiment 147, wherein the one or more complement inhibitor is Borrelia burgdorferi complement regulatory-acquiring surface protein-2 (CRASP-2) and/or minimized complement regulator factor H (miniFH).

[1222] 149. The recombinant oncolytic virus of embodiment 148, wherein the one or more complement inhibitor is or comprises CRASP-2.

[1223] 150. The recombinant oncolytic virus of embodiment 149, wherein the CRASP-2 comprises the amino acid sequence set forth in SEQ ID NO: 18 or has an amino acid sequence that has at least 95%, 96%, 97%, 98%, or 99% sequence identity to the amino acid sequence set forth in SEQ ID NO:18.

[1224] 151. The recombinant oncolytic virus of any one of embodiments 148-150, wherein the one or more complement inhibitor is or comprises miniFH.

[1225] 152. The recombinant oncolytic virus of embodiment 151, wherein the miniFH comprises the amino acid sequence set forth in SEQ ID NO: 19 or has an amino acid sequence that has at least 95%, 96%, 97%, 98%, or 99% sequence identity to the amino acid sequence set forth in SEQ ID NO:19.

[1226] 153. The recombinant oncolytic virus of any one of embodiments 146-152, wherein the one or more heterologous nucleic acid encoding the one or more complement inhibitor is introduced into a viral membrane gene, optionally F14.5L, to produce a fusion gene encoding a fusion protein.

[1227] 154. The recombinant oncolytic virus of embodiment 153, wherein the fusion protein comprises the complement inhibitor fused to a viral membrane protein encoded by the viral membrane gene.

[1228] 155. The recombinant oncolytic virus of embodiment 153 or embodiment 154, wherein the viral membrane gene is F14.5L, optionally wherein the fusion is at the C-terminus of the F14.5L protein.

[1229] 156. The recombinant oncolytic virus of any one of embodiments 153-155, wherein the fusion protein is incorporated into the outer membrane of the intracellular mature virus (IMV).

[1230] 157. The recombinant oncolytic vaccinia virus of any one of embodiments 153-156, wherein:
[1231] the nucleic acid genome of the recombinant oncolytic virus comprises the nucleic acid sequence set forth in SEQ ID NO: 5, or a nucleic acid sequence that has at least 95%, 96%, 97%, 98%, or 99% sequence identity to the nucleic acid sequence set forth in SEQ ID NO: 5; or
[1232] the nucleic acid genome of the recombinant oncolytic virus comprises the nucleic acid sequence set forth in SEQ ID NO: 6, or a nucleic acid sequence that has at least 95%, 96%, 97%, 98%, or 99% sequence identity to the nucleic acid sequence set forth in SEQ ID NO: 6; or
[1233] the nucleic acid genome of the recombinant oncolytic virus comprises the nucleic acid sequence set forth in SEQ ID NO: 89, or a nucleic acid sequence that has at least 95%, 96%, 97%, 98%, or 99% sequence identity to the nucleic acid sequence set forth in SEQ ID NO: 89; or
[1234] the nucleic acid genome of the recombinant oncolytic virus comprises the nucleic acid sequence set forth in SEQ ID NO: 90, or a nucleic acid sequence that has at least 95%, 96%, 97%, 98%, or 99% sequence identity to the nucleic acid sequence set forth in SEQ ID NO: 90.

[1235] 158. The recombinant oncolytic virus of any one of embodiments 48-157, wherein the at least one heterologous nucleic acid encoding one or more heterologous gene product comprises one or more heterologous nucleic acid each encoding one or more anti-angiogenic protein.

[1236] 159. The recombinant oncolytic virus of any one of embodiments 48, 50-52, and 54-157, wherein the inactivating mutation of one or more of the at least one viral gene is by insertion of one or more heterologous nucleic acid each encoding one or more anti-angiogenic protein.

[1237] 160. The recombinant oncolytic virus of embodiment 158 or embodiment 159, wherein the one or more anti-angiogenic protein is a VEGF inhibitor, an angiopoietin inhibitor, versikine, or a fusion protein of any two or more of the foregoing.

[1238] 161. The recombinant oncolytic virus of any one of embodiments 158-160, wherein the one or more anti-angiogenic protein comprises a VEGF inhibitor and/or an angiopoietin inhibitor, optionally an inhibitor of Ang2.

[1239] 162. The recombinant oncolytic virus of any one of embodiments 158-161, wherein the one or more anti-angiogenic protein comprises an anti-VEGF antibody and/or an anti-Ang2 antibody.

[1240] 163. The recombinant oncolytic virus of any one of embodiments 160-162, wherein the VEGF inhibitor is an anti-VEGF antibody, optionally an anti-VEGF-single chain antibody (scAb).

[1241] 164. The recombinant oncolytic virus of any one of embodiments 160-163, wherein the angiopoietin inhibitor is an anti-Angriopoietin-2 (Ang2) antibody, optionally an anti-Ang2 single chain antibody (scAb).

[1242] 165. The recombinant oncolytic virus of any one of embodiments 158-164, wherein the one or more anti-angiogenic protein is a bispecific anti-VEGF/anti-Ang2 antibody.

[1243] 166. The recombinant oncolytic virus of embodiment 165, wherein the bispecific anti-VEGF/anti-Ang2 antibody comprises the amino acid sequence set forth in SEQ ID NO: 23, or an amino acid sequence that has at least 85%, 90%, 91%, 92%, 93%, 94%, 95%, 96%, 97%, 98%, or 99% sequence identity to the sequence set forth in SEQ ID NO:23.

[1244] 167. The recombinant oncolytic virus of any one of embodiments 158-166, wherein the one or more anti-angiogenic protein comprises versikine.

[1245] 168. The recombinant oncolytic virus of embodiment 167, wherein the versikine comprises the amino acid sequence set forth in SEQ ID NO: 24, or comprises an amino acid sequence that has at least 85%, 90%, 91%, 92%, 93%, 94%, 95%, 96%, 97%, 98%, or 99% sequence identity to the sequence set forth in SEQ ID NO: 24.

[1246] 169. The recombinant oncolytic virus of any one of embodiments 158-168, wherein the nucleic acid genome of the recombinant oncolytic virus comprises the nucleic acid sequence set forth in any one of SEQ ID NOs: 13, 47, 82, 87, and 88, or a nucleic acid sequence that has at least 95%, 96%, 97%, 98%, or 99% sequence identity to the nucleic acid sequence set forth in any one of SEQ ID NOs: 13, 47, 82, 87, and 88.

[1247] 170. The recombinant oncolytic virus of any of embodiments 48-169, wherein the at least one heterologous nucleic acid encoding one or more heterologous gene product comprises one or more heterologous nucleic acid each encoding one or more therapeutic agent or diagnostic agent.

[1248] 171. The recombinant oncolytic virus of any one of embodiments 48, 50-52, and 54-170, wherein the inactivating mutation of one or more of the at least one viral gene is by insertion of one or more heterologous nucleic acid each encoding one or more one or more therapeutic agent or diagnostic agent.

[1249] 172. The recombinant oncolytic virus of embodiment 170 or embodiment 171, wherein the one or more therapeutic agent or diagnostic agent are selected from among an anticancer agent, an antimetastatic agent, an antiangiogenic agent, an immunomodulatory molecule, an antigen, a cell matrix degradative gene, genes for tissue regeneration and reprogramming human somatic cells to pluripotency, enzymes that modify a substrate to produce a detectable product or signal or are detectable by antibodies, proteins that can bind a contrasting agent, genes for optical imaging or detection, genes for PET imaging and genes for MRI imaging.

[1250] 173. The recombinant oncolytic virus of any of embodiments 170-172, wherein the one or more therapeutic agent or diagnostic agent comprises a therapeutic agent selected from among a hormone, a growth factor, cytokine, a chemokine, a costimulatory molecule, ribozymes, a transporter protein, a single chain antibody, an antisense RNA, a prodrug converting enzyme, an siRNA, a microRNA, a toxin, an antitumor oligopeptide, a mitosis inhibitor protein, an antimitotic oligopeptide, an anti-cancer polypeptide antibiotic, an angiogenesis inhibitor, a tumor suppressor, a cytotoxic protein, a cytostatic protein and a tissue factor.

[1251] 174. The recombinant oncolytic virus of any one of embodiments 48, 50-52, and 54-173, wherein:
[1252] (i) the at least one viral gene is or comprises A35R, optionally wherein the nucleic acid genome of the recombinant oncolytic virus comprises the nucleic acid sequence of SEQ ID NO: 3, or a nucleic acid sequence that has at least 95%, 96%, 97%, 98%, or 99% sequence identity to the nucleic acid sequence set forth in SEQ ID NO: 3; or
[1253] (ii) the at least one viral gene is or comprises A35R and J2R, optionally wherein the nucleic acid genome of the recombinant oncolytic virus comprises the nucleic acid sequence of SEQ ID NO: 12, or a nucleic acid sequence that has at least 95%, 96%, 97%, 98%, or 99% sequence identity to the nucleic acid sequence set forth in SEQ ID NO: 12; or
[1254] (iii) the at least one viral gene is or comprises J2R, and the inactivating mutation of J2R is by insertion of one or more heterologous nucleic acid each encoding one or more T cell or NK cell evader proteins, optionally wherein the one or more T cell or NK cell evader proteins comprises a set of proteins encoded by Cowpox virus ORFs 012, 203 and 018 (CPXV012-203-018), and
[1255] wherein the at least one heterologous nucleic acid encoding one or more heterologous gene product comprises one or more heterologous nucleic acid each encoding one or more complement inhibitor that is introduced into a viral membrane gene to produce a fusion gene encoding a fusion protein, optionally wherein the viral membrane gene is F14.5L, optionally wherein the fusion is at the C-terminus of the F14.5L protein, and optionally wherein the nucleic acid genome of the recombinant oncolytic virus comprises the nucleic acid sequence of SEQ ID NO: 10, or a nucleic acid sequence that has at least 95%, 96%, 97%, 98%, or 99% sequence identity to the nucleic acid sequence set forth in SEQ ID NO: 10; or
[1256] (iv) the at least one viral gene is or comprises J2R, optionally wherein the nucleic acid genome of the recombinant oncolytic virus comprises the nucleic acid sequence of SEQ ID NO: 4, or a nucleic acid sequence that has at least 95%, 96%, 97%, 98%, or 99% sequence identity to the nucleic acid sequence set forth in SEQ ID NO: 4; or
[1257] (v) the at least one viral gene is or comprises J2R and A35R, and the inactivating mutation of A35R is by insertion of one or more heterologous nucleic acid each encoding one or more immune modulating proteins, optionally wherein the one or more immune modulating proteins is selected from the group consisting of LIGHT, IRF3, IL-2, IL-12, and CXCL9, optionally wherein the one or more immune modulating proteins is LIGHT; and
[1258] optionally wherein the nucleic acid genome of the recombinant oncolytic virus comprises the nucleic acid sequence of SEQ ID NO: 11, or a nucleic acid sequence that has at least 95%, 96%, 97%, 98%, or 99% sequence identity to the nucleic acid sequence set forth in SEQ ID NO: 11.

[1259] 175. The recombinant oncolytic virus of any one of embodiments 48, 50-52, and 54-173, wherein:
[1260] (i) the at least one viral gene is or comprises J2R and A35R, and the inactivating mutation of J2R is by insertion of the one or more heterologous nucleic acid encoding one or more anti-angiogenic protein, optionally wherein the one or more anti-angiogenic protein comprises an inhibitor or VEGF and/or an inhibitor of Ang2, optionally wherein the one or more anti-angiogenic protein is a bispecific anti-VEGF/anti-Ang2 antibody; and
[1261] optionally wherein the nucleic acid genome of the recombinant oncolytic virus comprises the nucleic acid sequence of SEQ ID NO: 13, or a nucleic acid sequence that has at least 95%, 96%, 97%, 98%, or 99% sequence identity to the nucleic acid sequence set forth in SEQ ID NO: 13; or
[1262] (ii) the at least one viral gene is or comprises J2R and A35R, and the inactivating mutation of A35R is by insertion of the one or more heterologous nucleic acid encoding one or more immune modulating proteins, optionally wherein the one or more immune modulating proteins is selected from the group consisting of LIGHT, IRF3, IL-2, IL-12, and CXCL9, optionally wherein the one or more immune modulating proteins is LIGHT; and
[1263] the inactivating mutation of J2R is by insertion of the one or more heterologous nucleic acid encoding one or more anti-angiogenic protein, optionally wherein the one or more anti-angiogenic protein comprises an inhibitor or VEGF and/or an inhibitor of Ang2, optionally wherein the one or more anti-angiogenic protein is a bispecific anti-VEGF/anti-Ang2 antibody; and
[1264] optionally wherein the nucleic acid genome of the recombinant oncolytic virus comprises the nucleic acid sequence of SEQ ID NO: 47, or a nucleic acid sequence that has at least 95%, 96%, 97%, 98%, or 99% sequence identity to the nucleic acid sequence set forth in SEQ ID NO: 47; or
[1265] (iii) the at least one viral gene is or comprises J2R, and the inactivating mutation of J2R is by insertion of one or more heterologous nucleic acid each encoding an apoptosis-inducible protein, optionally wherein the apoptosis-inducible protein is an inducible DED (iDED), an inducible Fas (iFas), or an inducible Cas9 (iCas9), optionally wherein the nucleic acid genome of the recombinant oncolytic virus comprises the nucleic acid sequence of SEQ ID NO: 7, 8, or 9, or a nucleic acid sequence that has at least 95%, 96%, 97%, 98%, or 99% sequence identity to the nucleic acid sequence set forth in SEQ ID NO: 7, 8, or 9; or
[1266] (iv) the at least one viral gene is or comprises J2R, and the inactivating mutation of J2R is by insertion of one or more heterologous nucleic acid each encoding one or more immune modulating proteins, optionally wherein the one or more immune modulating proteins is selected from the group consisting of LIGHT, IRF3, IL-2, IL-12, and CXCL9, optionally wherein the one or more immune modulating proteins is IRF3; optionally wherein the nucleic acid genome of the recombinant oncolytic virus comprises the nucleic acid sequence of SEQ ID NO: 49, 50, or 93, or a nucleic acid sequence that has at least 95%, 96%, 97%, 98%, or 99% sequence identity to the nucleic acid sequence set forth in SEQ ID NO: 49, 50, or 93; or
[1267] (v) the at least one viral gene is or comprises J2R and B2R, optionally wherein the nucleic acid genome of the recombinant oncolytic virus comprises the nucleic acid sequence of SEQ ID NO: 48, or a nucleic acid sequence that has at least 95%, 96%, 97%, 98%, or 99% sequence identity to the nucleic acid sequence set forth in SEQ ID NO: 48.

[1268] 176. The recombinant oncolytic virus of any one of embodiments 48, 50-52, and 54-173, wherein the at least one viral gene is or comprises J2R and B2R.

[1269] 177. The recombinant oncolytic virus of any one of embodiments 48, 50-52, and 54-173, wherein:
[1270] (i) the at least one viral gene is or comprises J2R and B2R, and the inactivating mutation of J2R is by insertion of one or more heterologous nucleic acid each encoding one or more immune modulating proteins, optionally wherein the one or more immune modulating proteins is selected from the group consisting of LIGHT, IRF3, IL-2, IL-12, and CXCL9, optionally wherein the one or more immune modulating proteins is IRF3; optionally wherein the nucleic acid genome of the recombinant oncolytic virus comprises the nucleic acid sequence of SEQ ID NO: 80, or a nucleic acid sequence that has at least 95%, 96%, 97%, 98%, or 99% sequence identity to the nucleic acid sequence set forth in SEQ ID NO: or
[1271] (ii) the at least one viral gene is or comprises J2R, B2R, and A35R; wherein:
[1272] the inactivating mutation of J2R is by insertion of the one or more heterologous nucleic acid encoding one or more anti-angiogenic protein, optionally wherein the one or more anti-angiogenic protein comprises an inhibitor or VEGF and/or an inhibitor of Ang2, optionally wherein the one or more anti-angiogenic protein is a bispecific anti-VEGF/anti-Ang2 antibody;
[1273] the inactivating mutation of B2R is by insertion of one or more heterologous nucleic acid each encoding one or more immune modulating proteins, optionally wherein the one or more immune modulating proteins is selected from the group consisting of LIGHT, IRF3, IL-2, IL-12, and CXCL9, optionally wherein the one or more immune modulating proteins is IRF3; and
[1274] the inactivating mutation of A35R is by insertion of one or more heterologous nucleic acid encoding one or more immune modulating proteins, optionally wherein the one or more immune modulating proteins is selected from the group consisting of LIGHT, IRF3, IL-2, IL-12, and CXCL9,
[1275] optionally wherein the one or more immune modulating proteins is LIGHT; and optionally wherein the nucleic acid genome of the recombinant oncolytic virus comprises the nucleic acid sequence of SEQ ID NO: 82, or a nucleic acid sequence that has at least 95%, 96%, 97%, 98%, or 99% sequence identity to the nucleic acid sequence set forth in SEQ ID NO: 82; or
[1276] (iii) the at least one viral gene is or comprises J2R, B2R, and A56R; wherein:
[1277] the inactivating mutation of J2R is by insertion of one or more heterologous nucleic acid encoding one or more immune modulating proteins, optionally wherein the one or more immune modulating proteins is IRF3;
[1278] the inactivating mutation of A56R is by insertion of one or more heterologous nucleic acid encoding one or more immune modulating proteins, optionally wherein the one or more immune modulating proteins is IL-2, optionally wherein the IL-2 is an IL-2 superkine, optionally MDNA11; and
[1279] optionally wherein the nucleic acid genome of the recombinant oncolytic virus comprises the nucleic acid sequence of SEQ ID NO: 84, or a nucleic acid sequence that has at least 95%, 96%, 97%, 98%, or 99% sequence identity to the nucleic acid sequence set forth in SEQ ID NO: 84; or
[1280] (iv) the at least one viral gene is or comprises J2R, B2R, and A56R; wherein:
[1281] the inactivating mutation of J2R is by insertion of one or more heterologous nucleic acid encoding one or more immune modulating proteins, optionally wherein the one or more immune modulating proteins is IRF3;
[1282] the inactivating mutation of A56R is by insertion of one or more heterologous nucleic acid encoding one or more immune modulating proteins, optionally wherein the one or more immune modulating proteins comprises two or more immune modulating proteins selected from the group consisting of LIGHT, IRF3, IL-2, IL-12, and CXCL9, optionally wherein the two or more immune modulating proteins comprises IL-12 and CXCL9; and
[1283] optionally wherein the nucleic acid genome of the recombinant oncolytic virus comprises the nucleic acid sequence of SEQ ID NO: 85, or a nucleic acid sequence that has at least 95%, 96%, 97%, 98%, or 99% sequence identity to the nucleic acid sequence set forth in SEQ ID NO: 85; or
[1284] (v) the at least one viral gene is or comprises J2R, B2R, and A56R; wherein:
[1285] the inactivating mutation of B2R is by insertion of one or more heterologous nucleic acid encoding one or more immune modulating proteins, optionally wherein the one or more immune modulating proteins is IRF3;
[1286] the inactivating mutation of A56R is by insertion of one or more heterologous nucleic acid encoding one or more immune modulating proteins, optionally wherein the one or more immune modulating proteins comprises two or more immune modulating proteins selected from the group consisting of LIGHT, IRF3, IL-2, IL-12, and CXCL9, optionally wherein the two or more immune modulating proteins comprises IL-12 and CXCL9;
[1287] the inactivating mutation of J2R is by insertion of one or more heterologous nucleic acid each encoding an apoptosis-inducible protein, optionally wherein the apoptosis-inducible protein is an inducible DED (iDED); and
[1288] optionally wherein the nucleic acid genome of the recombinant oncolytic virus comprises the nucleic acid sequence of SEQ ID NO: 86, or a nucleic acid sequence that has at least 95%, 96%, 97%, 98%, or 99% sequence identity to the nucleic acid sequence set forth in SEQ ID NO: 86; or
[1289] (vi) the at least one viral gene is or comprises J2R, B2R, A35R, and A56R; wherein:
[1290] the inactivating mutation of J2R is by insertion of the one or more heterologous nucleic acid encoding one or more anti-angiogenic protein, optionally wherein the one or more anti-angiogenic protein comprises an inhibitor or VEGF and/or an inhibitor of Ang2, optionally wherein the one or more anti-angiogenic protein is a bispecific anti-VEGF/anti-Ang2 antibody;
[1291] the inactivating mutation of B2R is by insertion of one or more heterologous nucleic acid encoding one or more immune modulating proteins, optionally wherein the one or more immune modulating proteins is IRF3;
[1292] the inactivating mutation of A35R is by insertion of the one or more heterologous nucleic acid encoding one or more immune modulating proteins, optionally wherein the one or more immune modulating proteins is selected from the group consisting of LIGHT, IRF3, IL-2, IL-12, and CXCL9, optionally wherein the one or more immune modulating proteins is LIGHT;
[1293] the inactivating mutation of A56R is by insertion of one or more heterologous nucleic acid encoding one or more immune modulating proteins, wherein the one or more immune modulating proteins is IL-2 superkine MDNA11; and
[1294] optionally wherein the nucleic acid genome of the recombinant oncolytic virus comprises the nucleic acid sequence of SEQ ID NO: 87, or a nucleic acid sequence that has at least 95%, 96%, 97%, 98%, or 99% sequence identity to the nucleic acid sequence set forth in SEQ ID NO: 87; or
[1295] (vii) the at least one viral gene is or comprises J2R, B2R, A35R, and A56R; wherein:
[1296] the inactivating mutation of J2R is by insertion of the one or more heterologous nucleic acid encoding one or more anti-angiogenic protein, optionally wherein the one or more anti-angiogenic protein comprises an inhibitor or VEGF and/or an inhibitor of Ang2, optionally wherein the one or more anti-angiogenic protein is a bispecific anti-VEGF/anti-Ang2 antibody;
[1297] the inactivating mutation of B2R is by insertion of one or more heterologous nucleic acid encoding one or more immune modulating proteins, optionally wherein the one or more immune modulating proteins is IRF3;
[1298] the inactivating mutation of A35R is by insertion of the one or more heterologous nucleic acid encoding one or more immune modulating proteins, optionally wherein the one or more immune modulating proteins is selected from the group consisting of LIGHT, IRF3, IL-2, IL-12, and CXCL9, optionally wherein the one or more immune modulating proteins is LIGHT;
[1299] the inactivating mutation of A56R is by insertion of one or more heterologous nucleic acid encoding one or more immune modulating proteins, wherein the one or more immune modulating proteins is IL-2 superkine MDNA11T, optionally wherein the MDNA11T comprises the amino acid sequence set forth in SEQ ID NO: 98; and
[1300] optionally wherein the nucleic acid genome of the recombinant oncolytic virus comprises the nucleic acid sequence of SEQ ID NO: 88, or a nucleic acid sequence that has at least 95%, 96%, 97%, 98%, or 99% sequence identity to the nucleic acid sequence set forth in SEQ ID NO: 88; or
[1301] (viii) the at least one viral gene is or comprises J2R, B2R, and A56R; wherein:
[1302] the inactivating mutation of J2R is by insertion of one or more heterologous nucleic acid each encoding one or more T cell or NK cell evader proteins, optionally wherein the one or more T cell or NK cell evader proteins comprises a set of proteins encoded by Cowpox virus ORFs 012, 203 and 018 (CPXV012-203-018);
[1303] the inactivating mutation of B2R is by insertion of one or more heterologous nucleic acid encoding one or more immune modulating proteins, optionally wherein the one or more immune modulating proteins is IRF3;
[1304] the inactivating mutation of A56R is by insertion of one or more heterologous nucleic acid each encoding one or more immune modulating proteins, optionally wherein the one or more immune modulating proteins is selected from the group consisting of LIGHT, IRF3, IL-2, IL-12, and CXCL9, optionally wherein the one or more immune modulating proteins is an IL-2 superkine, optionally MDNA11 or MDNA11T;
[1305] the at least one heterologous nucleic acid encoding one or more heterologous gene product comprises one or more heterologous nucleic acid each encoding one or more complement inhibitor, optionally CRASP-2, that is introduced into a viral membrane gene, optionally F14.5L, to produce a fusion gene encoding a fusion protein, optionally wherein the fusion is at the C-terminus of the F14.5L protein; and
[1306] optionally wherein the nucleic acid genome of the recombinant oncolytic virus comprises the nucleic acid sequence of SEQ ID NO: 89, or a nucleic acid sequence that has at least 95%, 96%, 97%, 98%, or 99% sequence identity to the nucleic acid sequence set forth in SEQ ID NO: 89; or
[1307] (ix) the at least one viral gene is or comprises J2R, B2R, and A56R; wherein:
[1308] the inactivating mutation of J2R is by insertion of one or more heterologous nucleic acid each encoding one or more T cell or NK cell evader proteins, optionally wherein the one or more T cell or NK cell evader proteins comprises a set of proteins encoded by Cowpox virus ORFs 012, 203 and 018 (CPXV012-203-018);
[1309] the inactivating mutation of B2R is by insertion of one or more heterologous nucleic acid encoding one or more immune modulating proteins, optionally wherein the one or more immune modulating proteins is IRF3;
[1310] the inactivating mutation of A56R is by insertion of one or more heterologous nucleic acid encoding one or more immune modulating proteins, optionally wherein the one or more immune modulating proteins comprises two or more immune modulating proteins selected from the group consisting of LIGHT, IRF3, IL-2, IL-12, and CXCL9, optionally wherein the two or more immune modulating proteins comprises IL-12 and CXCL9;
[1311] the at least one heterologous nucleic acid encoding one or more heterologous gene product comprises one or more heterologous nucleic acid each encoding one or more complement inhibitor, optionally CRASP-2, that is introduced into a viral membrane gene, optionally F14.5L, to produce a fusion gene encoding a fusion protein, optionally wherein the fusion is at the C-terminus of the F14.5L protein; and
[1312] optionally wherein the nucleic acid genome of the recombinant oncolytic virus comprises the nucleic acid sequence of SEQ ID NO: 90, or a nucleic acid sequence that has at least 95%, 96%, 97%, 98%, or 99% sequence identity to the nucleic acid sequence set forth in SEQ ID NO: 90; or
[1313] (x) the at least one viral gene is or comprises B2R and J2R, and the inactivating mutation of J2R is by insertion of one or more heterologous nucleic acid each encoding one or more immune modulating proteins, optionally wherein the one or more immune modulating proteins is selected from the group consisting of LIGHT, IRF3, IL-2, IL-12, and CXCL9, optionally wherein the one or more immune modulating proteins is IRF3; and
[1314] optionally wherein the nucleic acid genome of the recombinant oncolytic virus comprises the nucleic acid sequence of SEQ ID NO: 91, or a nucleic acid sequence that has at least 95%, 96%, 97%, 98%, or 99% sequence identity to the nucleic acid sequence set forth in SEQ ID NO: 91; or
[1315] (xi) the at least one viral gene is or comprises B2R, J2R, and A56R, and
[1316] the inactivating mutation of J2R is by insertion of one or more heterologous nucleic acid each encoding one or more immune modulating proteins, optionally wherein the one or more immune modulating proteins is selected from the group consisting of LIGHT, IRF3, IL-2, IL-12, and CXCL9, optionally wherein the one or more immune modulating proteins is IRF3; and
[1317] the inactivating mutation of A56R is by insertion of one or more heterologous nucleic acid encoding one or more immune modulating proteins, optionally wherein the one or more immune modulating proteins comprises two or more immune modulating proteins selected from the group consisting of LIGHT, IRF3, IL-2, IL-12, and CXCL9, optionally wherein the two or more immune modulating proteins comprises IL-12 and CXCL9; and
[1318] optionally wherein the nucleic acid genome of the recombinant oncolytic virus comprises the nucleic acid sequence of SEQ ID NO: 92, or a nucleic acid sequence that has at least 95%, 96%, 97%, 98%, or 99% sequence identity to the nucleic acid sequence set forth in SEQ ID NO: 92; or
[1319] (xii) the at least one viral gene is or comprises J2R, and the inactivating mutation of J2R is by insertion of one or more heterologous nucleic acid each encoding one or more immune modulating proteins, optionally wherein the one or more immune modulating proteins is selected from the group consisting of LIGHT, IRF3, IL-2, IL-12, and CXCL9, optionally wherein the one or more immune modulating proteins is IRF3; and
[1320] optionally wherein the nucleic acid genome of the recombinant oncolytic virus comprises the nucleic acid sequence of SEQ ID NO: 93, or a nucleic acid sequence that has at least 95%, 96%, 97%, 98%, or 99% sequence identity to the nucleic acid sequence set forth in SEQ ID NO: 93.

[1321] 178. The recombinant oncolytic vaccinia virus of any one of embodiments 48-173, wherein the nucleic acid genome of the recombinant oncolytic virus comprises a nucleic acid sequence set forth in any one of SEQ ID NOs: 48, 80, 82, and 84-93, or a nucleic acid sequence that has at least 95%, 96%, 97%, 98%, or 99% sequence identity to a nucleic acid sequence set forth in any one of SEQ ID NOs 48, 80, 82, and 84-93.

[1322] 179. The recombinant oncolytic vaccinia virus of any one of embodiments 48-173, wherein the nucleic acid genome of the recombinant oncolytic virus comprises a nucleic acid sequence set forth in any one of SEQ ID NOs: 85, 86, 88, and 90, or a nucleic acid sequence that has at least 95%, 96%, 97%, 98%, or 99% sequence identity to a nucleic acid sequence set forth in any one of SEQ ID NOs 85, 86, 88, and 90.

[1323] 180. The recombinant oncolytic vaccinia virus of any one of embodiments 48-173, wherein the nucleic acid genome of the recombinant oncolytic virus comprises a nucleic acid sequence set forth in SEQ ID NO: 85, or a nucleic acid sequence that has at least 95%, 96%, 97%, 98%, or 99% sequence identity to a nucleic acid sequence set forth in SEQ ID NO 85.

[1324] 181. The recombinant oncolytic virus of any of embodiments 48-180, wherein one or more of the heterologous nucleic acid encoding a heterologous gene product is operably linked to a promoter.

[1325] 182. The recombinant oncolytic virus of embodiment 181, wherein each of the one or more heterologous nucleic acid encoding a heterologous gene product that is operably linked to a promoter is selected from the group consisting of 7.5E, 7.5E/L, SSE, 11KL, SSL, SSEL, mH5, and LEO.

[1326] 183. The recombinant oncolytic virus of any of embodiments 48-182, wherein each heterologous nucleic acid encoding a heterologous gene product is independently operably linked to a promoter, optionally wherein each heterologous nucleic acid encoding a heterologous gene product is independently operably linked to a promoter selected from the group consisting of 7.5E, 7.5E/L, SSE, 11KL, SSL, SSEL, mH5, and LEO.

[1327] 184. The recombinant oncolytic virus of embodiment 182 or embodiment 183, wherein the promoter is a poxviral promoter or is a variant or derivative thereof.

[1328] 185. The recombinant oncolytic virus of embodiment 182 or embodiment 183, wherein the promoter is a vaccinia virus promoter.

[1329] 186. The recombinant oncolytic virus of any of embodiments 182-185, wherein the promoter is selected from the group consisting of 7.5E, 7.5E/L, SSE, 11KL, SSL, SSEL, mH5, and LEO.

[1330] 187. The recombinant oncolytic virus of any of embodiments 182-186, wherein the promoter has the sequence of amino acids set forth in any one of SEQ ID NOS: 29, 53, 55, 68, 69, 70, 71, or 72.

[1331] 188. The recombinant oncolytic virus of any of embodiments 182-187, wherein the promoter is synthetic strong early promoter (SSE).

[1332] 189. The recombinant VACV strain of embodiment 188, wherein the SSE promoter comprises the sequence set forth in SEQ ID NO:29.

[1333] 190. The recombinant oncolytic virus of any of embodiments 182-189, wherein the promoter is a strong early/late promoter (SEL).

[1334] 191. The recombinant oncolytic virus of embodiment 190, wherein the SEL promoter comprises the sequence set forth in SEQ ID NO:55.

[1335] 192. The recombinant oncolytic virus of any of embodiments 182-191, wherein the promoter is mH5.

[1336] 193. The recombinant oncolytic virus of embodiment 192, wherein the mH5 promoter comprises the sequence set forth in SEQ ID NO: 53.

[1337] 194. An isolated clonal vaccinia virus (VACV) strain comprising a nucleic acid genome that has at least 95% sequence identity with the nucleic acid sequence set forth in SEQ ID NO: 1 and wherein the nucleic acid genome is characterized by one or more of:
[1338] (i) a variant 017 open reading frame (ORF) encoding an amino acid sequence that has at least 95% sequence identity to SEQ ID NO: 57 and comprises a polar uncharged amino acid at position 66, optionally a threonine (T) at position 66;
[1339] (ii) a variant 038 (K5L) ORF comprising a nucleotide insertion to effect a frameshift mutation, wherein the 038 (K5L) gene product is altered;
[1340] (iii) a variant 059 (E2L) ORF encoding an amino acid sequence that is at least 95% sequence identity to SEQ ID NO:60 and comprises a hydrophobic amino acid other than leucine at position 419, optionally a phenylalanine (F) at position 419;
[1341] (iv) a variant 104 (H4L) ORF encoding an amino acid sequence having at least 95% sequence identity to SEQ ID NO:61 and comprises a negatively charged amino acid at position 591, optionally aspartic acid (D) at position 591; and
[1342] (v) a variant 182 (A56R) ORF comprising deletion of two nucleotides to effect a frameshift mutation, wherein the 182 (A56R) ORF gene product is altered.

[1343] 195. The isolated clonal VACV strain of embodiment 194, wherein the nucleic acid genome is characterized by (i) and the variant 017 ORF encodes an amino acid sequence that has at least 96%, at least 97%, at least 98%, at least 99% or 100% sequence identity to SEQ ID NO:57.

[1344] 196. The isolated clonal VACV strain of embodiment 194 or embodiment 195, wherein the nucleic acid genome is characterized by (i) and the variant 017 ORF encodes the amino acid sequence set forth in SEQ ID NO: 57.

[1345] 197. The isolated clonal VACV strain of any of embodiments 194-196, wherein the nucleic acid genome is characterized by (ii) and the nucleotide insertion is guanine (G) corresponding to insertion after nucleotide position 32135 of SEQ ID NO:1, optionally wherein the variant 038 (K5L) ORF is set forth in SEQ ID NO: 58.

[1346] 198. The isolated clonal VACV strain of any of embodiments 194-197, wherein the nucleic acid genome is characterized by (ii) and the 038 (K5L) gene product is set forth in SEQ ID NO:59.

[1347] 199. The isolated clonal VACV strain of any of embodiments 194-198, wherein the nucleic acid genome is characterized by (iii) and the variant 059 (E2L) ORF encodes an amino acid sequence that has at least 96%, at least 97%, at least 98%, at least 99% or 100% sequence identity to SEQ ID NO:60.

[1348] 200. The isolated clonal VACV strain of any of embodiments 194-199, wherein the nucleic acid genome is characterized by (iii) and the variant 059 (E2L) ORF encodes the amino acid sequence set forth in SEQ ID NO: 60.

[1349] 201. The isolated clonal VACV strain of any of embodiments 194-200, wherein the nucleic acid genome is characterized by (iv) and the 104 (H4L) ORF encodes an amino acid sequence that has at least 96%, at least 97%, at least 98%, at least 99% or 100% sequence identity to SEQ ID NO:61.

[1350] 202. The isolated clonal VACV strain of any of embodiments 194-201, wherein the nucleic acid genome is characterized by (iv) and wherein the variant 104 (H4L) ORF encodes the amino acid sequence set forth in SEQ ID NO: 61.

[1351] 203. The isolated clonal VACV strain of any of embodiments 194-202, wherein the nucleic acid genome is characterized by (v) and the deletion of two nucleotides is deletion of two contiguous nucleotides corresponding to nucleotides after nucleotide position 165972 of SEQ ID NO:2, optionally wherein the variant 182 (A56R) is set forth in SEQ ID NO: 62.

[1352] 204. The isolated clonal VACV strain of any of embodiments 194-203, wherein the nucleic acid genome is characterized by (v) and the VACV protein is set forth in SEQ ID NO:63.

[1353] 205. The isolated clonal VACV strain of any of embodiments 194-204, wherein the nucleic acid genome is characterized by any two of (i)-(v).

[1354] 206. The isolated clonal VACV strain of any of embodiments 194-204, wherein the nucleic acid genome is characterized by any three of (i)-(v).

[1355] 207. The isolated clonal VACV strain of any of embodiments 194-204, wherein the nucleic acid genome is characterized by any four of (i)-(v).

[1356] 208. The isolated clonal VACV strain of any of embodiments 194-204, wherein the nucleic acid genome is characterized by each of (i)-(v).

[1357] 209. An isolated clonal vaccinia virus (VACV) strain comprising a nucleic acid genome that has at least 95% sequence identity with the nucleic acid sequence set forth in SEQ ID NO: 1, and wherein the nucleic acid genome is characterized by one or more of:
[1358] (i) a guanine (G) at the position corresponding to position 7770 of SEQ ID NO: 1;
[1359] (ii) a thymine (T) at the position corresponding to position 15261 of SEQ ID NO: 1;
[1360] (iii) a G at the position corresponding to position 32136 of SEQ ID NO: 1;
[1361] (iv) a G at the position corresponding to position 49455 of SEQ ID NO: 1;
[1362] (v) a cytosine (C) at the position corresponding to position 92969 of SEQ ID NO: 1;
[1363] (vi) the nucleic acid sequence CACTTATATAT at the positions corresponding to positions 106870 to 106880 of SEQ ID NO: 1;
[1364] (vii) the nucleic acid sequence GTTTTCATTA at the positions corresponding to positions 111267 to 111276 of SEQ ID NO: 1;
[1365] (viii) an adenine (A) at the position corresponding to position 162715 of SEQ ID NO: 1;
[1366] (ix) the nucleic acid sequence TACAGACACC at the positions corresponding to positions 165844 to 185853 of SEQ ID NO: 1; and
[1367] (x) a C at the position corresponding to position 187805 of SEQ ID NO: 1.

[1368] 210. The isolated clonal VACV strain of embodiment 209, wherein the nucleic acid genome is characterized by any two of (i)-(x).

[1369] 211. The isolated clonal VACV strain of embodiment 209, wherein the nucleic acid genome is characterized by any three of (i)-(x).

[1370] 212. The isolated clonal VACV strain of embodiment 209, wherein the nucleic acid genome is characterized by any four of (i)-(x).

[1371] 213. The isolated clonal VACV strain of embodiment 209, wherein the nucleic acid genome is characterized by any five of (i)-(x).

[1372] 214. The isolated clonal VACV strain of embodiment 209, wherein the nucleic acid genome is characterized by any six of (i)-(x).

[1373] 215. The isolated clonal VACV strain of embodiment 209, wherein the nucleic acid genome is characterized by any seven of (i)-(x).

[1374] 216. The isolated clonal VACV strain of embodiment 209, wherein the nucleic acid genome is characterized by any eight of (i)-(x).

[1375] 217. The isolated clonal VACV strain of embodiment 209, wherein the nucleic acid genome is characterized by any nine of (i)-(x).

[1376] 218. The isolated clonal VACV strain of embodiment 209, wherein the nucleic acid genome is characterized by each of (i)-(x).

[1377] 219. The isolated clonal VACV strain of any of embodiments 209-218, wherein the nucleic acid genome has at least 96% sequence identity with the sequence of nucleotides set forth in SEQ ID NO: 1.

[1378] 220. The isolated clonal VACV strain of any of embodiments 209-219, wherein the nucleic acid genome has at least 97% sequence identity with the sequence of nucleotides set forth in SEQ ID NO: 1.

[1379] 221. The isolated clonal VACV strain of any of embodiments 209-220, wherein the nucleic acid genome has at least 98% sequence identity with the sequence of nucleotides set forth in SEQ ID NO: 1.

[1380] 222. The isolated clonal VACV strain of any of embodiments 209-221, wherein the nucleic acid genome has at a least 99% sequence identity with the sequence of nucleotides set forth in SEQ ID NO: 1.

[1381] 223. An isolated clonal vaccinia virus (VACV) strain comprising a nucleic acid genome that has at least 99% sequence identity with the sequence of nucleotides set forth in SEQ ID NO: 1.

[1382] 224. The recombinant oncolytic virus of any one of embodiments 1-193, or the isolated clonal VACV strain of any of embodiments 194-223, wherein the nucleic acid genome has at least 99.5% sequence identity with the sequence of nucleotides set forth in SEQ ID NO: 1.

[1383] 225. The recombinant oncolytic virus of any one of embodiments 1-193, or the isolated clonal VACV strain of any of embodiments 194-224, wherein the nucleic acid genome has at least 99.9% sequence identity with the sequence of nucleotides set forth in SEQ ID NO: 1.

[1384] 226. The recombinant oncolytic virus of any one of embodiments 1-193, or the isolated clonal VACV strain of any of embodiments 194-225, wherein the nucleic acid genome has at least 99.95% sequence identity with the sequence of nucleotides set forth in SEQ ID NO: 1.

[1385] 227. The recombinant oncolytic virus of any one of embodiments 1-193, or the isolated clonal VACV strain of any of embodiments 194-226, wherein the nucleic acid genome does not comprise the sequence of nucleotides set forth in SEQ ID NO: 2.

[1386] 228. The isolated clonal VACV strain of any of embodiments 194-227, wherein the nucleic acid genome is not modified to contain non-viral heterologous nucleic acid containing an open reading frame encoding a non-viral heterologous protein.

[1387] 229. The isolated clonal VACV strain of any of embodiments 194-228, wherein the nucleic acid genome is set forth in SEQ ID NO: 1.

[1388] 230. The recombinant oncolytic virus of any one of embodiments 1-193, or the isolated clonal VACV strain of any of embodiments 194-229, wherein the recombinant oncolytic virus or the clonal VACV strain exhibits enhanced production of extracellular enveloped virions (EEV) after cell infection, optionally as determined by percentage of EEV, wherein the percentage of EEV is determined by the formula: viral titer in supernatant/(viral titer in supernatant+viral titer in cell lysate)*100.

[1389] 231. The recombinant oncolytic virus of embodiment 230, or the isolated clonal VACV strain of embodiment 244, wherein greater than 5% of infectious particles after cell infection are EEV.

[1390] 232. The recombinant oncolytic virus of embodiment 230, or the isolated clonal VACV strain of embodiment 244, wherein greater than 10% of infectious particles after cell infection are EEV.

[1391] 233. The recombinant oncolytic virus of embodiment 230, or the isolated clonal VACV strain of embodiment 244, wherein greater than 15% of infectious particles after cell infection are EEV.

[1392] 234. The recombinant oncolytic virus of any one of embodiments 230-233, or the isolated clonal VACV strain of any one of embodiments 230-233, wherein the recombinant oncolytic virus or the clonal VACV strain exhibits enhanced production of extracellular enveloped virions (EEV) after cell infection, as determined by having a percentage of at least 5%, 10%, or 15% of infectious particles being EEV.

[1393] 235. The recombinant oncolytic virus of any one of embodiments 1-193, 224-227, and 230-234, or the isolated clonal VACV strain of any of embodiments 194-234, that exhibits oncolytic activity to kill tumor cells.

[1394] 236. A VACV preparation comprising the isolated clonal VACV strain of any of embodiments 194-235.

[1395] 237. A VACV preparation comprising the recombinant oncolytic virus of any one of embodiments 1-193, 224-227, and 230-235, wherein the recombinant oncolytic virus is a recombinant oncolytic vaccinia virus.

[1396] 238. A recombinant oncolytic virus preparation comprising the recombinant oncolytic virus of any one of embodiments 1-193, 224-227, and 230-235, optionally wherein at least 70%, 80%, 90%, 95%, or 98% of the virus particles in the preparation have the genomic sequence of the clonal oncolytic virus strain.

[1397] 239. The VACV preparation of embodiment 236 or embodiment 237, that is substantially homogenous wherein a plurality of the virus particles in the preparation has the genomic sequence of the clonal VACV strain.

[1398] 240. The VACV preparation of any one of embodiments 236, 237, and 239, wherein at least 70% of the virus particles in the preparation have the genomic sequence of the clonal VACV strain.

[1399] 241. The VACV preparation of any one of embodiments 236, 237, and 239, wherein at least 80% of the virus particles in the preparation have the genomic sequence of the clonal VACV strain.

[1400] 242. The VACV preparation of any one of embodiments 236, 237, and 239, wherein at least 90% of the virus particles in the preparation have the genomic sequence of the clonal VACV strain.

[1401] 243. The VACV preparation of any one of embodiments 236, 237, and 239, wherein at least 95% of the virus particles in the preparation have the genomic sequence of the clonal VACV strain.

[1402] 244. The VACV preparation of any one of embodiments 236, 237, and 239, wherein at least 98% of the virus particles in the preparation have the genomic sequence of the clonal VACV strain.

[1403] 245. A pharmaceutical composition comprising the isolated VACV clonal strain of any of embodiments 208-248.

[1404] 246. A pharmaceutical composition comprising the VACV preparation of any of embodiments 194-234.

[1405] 247. A pharmaceutical composition comprising the recombinant oncolytic virus of any one of embodiments 1-193, 224-227, and 230-235.

[1406] 248. A recombinant vaccinia virus (VACV) strain comprising a nucleic acid genome of the VACV clonal strain of any of embodiments 194-235 that comprises an inactivating mutation in at least one viral gene.

[1407] 249. The recombinant VACV strain of embodiment 248, wherein the viral gene is selected from the group consisting of hemagglutinin (HA), J2R (thymidine kinase), F14.5L, A56R (hemagglutinin), B2R, vaccinia growth factor (VGF), A35R, A49R, A55R, B14R, C4L, C6L, C16L, NIL/N2L, E2L/E3L, K1L/K2L, K7L, superoxide dismutase locus, 7.5K, C2L-F3L, C4L-F1L, C7-K1L, B13R+B14R, A26L and I4L.

[1408] 250. The recombinant VACV of embodiment 248 or embodiment 249, wherein the inactivating mutation is a deletion of all or a portion of the at least one viral gene.

[1409] 251. The recombinant VACV strain of embodiment 250, wherein the deletion of the at least one viral gene is deletion of the entire gene ORF of a viral gene.

[1410] 252. The recombinant VACV strain of embodiment 250, wherein the deletion of the at least one viral gene is a deletion of a portion of the ORF of a viral gene, and wherein said deletion is sufficient to render the encoded gene product non-functional.

[1411] 253. The recombinant VACV strain of any of embodiments 248-252, wherein the at least one viral gene is or comprises A35R.

[1412] 254. The recombinant VACV strain of embodiment 253, wherein the nucleic acid genome of the recombinant VACV strain comprises the nucleic acid sequence set forth in SEQ ID NO: 3, or a nucleic acid sequence that has at least 95%, at least 96%, at least 97%, at least 98% or at least 99% sequence identity to the sequence set forth in SEQ ID NO:3.

[1413] 255. The recombinant VACV strain of any of embodiments 248-254, wherein the at least one viral gene is or comprises J2R.

[1414] 256. The recombinant VACV strain of embodiment 255, wherein the nucleic acid genome of the recombinant VACV strain comprises the nucleic acid sequence set forth in SEQ ID NO: 4, or a nucleic acid sequence that has at least 95%, at least 96%, at least 97%, at least 98% or at least 99% sequence identity to the sequence set forth in SEQ ID NO:4.

[1415] 257. The recombinant VACV strain of any of embodiments 248-256, wherein the at least one viral gene is or comprises B2R.

[1416] 258. The recombinant VACV strain of any of embodiments 248-257, wherein the at least one viral gene is or comprises A35R and J2R.

[1417] 259. The recombinant VACV strain of embodiment 258, wherein the nucleic acid genome of the recombinant VACV strain comprises the nucleic acid sequence set forth in SEQ ID NO: 12, or a nucleic acid sequence that has at least 95%, at least 96%, at least 97%, at least 98% or at least 99% sequence identity to the sequence set forth in SEQ ID NO:12.

[1418] 260. The recombinant VACV strain of any of embodiments 248-259, wherein the at least one viral gene is or comprises B2R and J2R.

[1419] 261. The recombinant VACV strain of embodiment 260, wherein the nucleic acid genome of the recombinant VACV strain comprises the nucleic acid sequence set forth in SEQ ID NO: 48, or a nucleic acid sequence that has at least 95%, at least 96%, at least 97%, at least 98% or at least 99% sequence identity to the sequence set forth in SEQ ID NO:48.

[1420] 262. The recombinant VACV strain of any one of embodiments 248-261, wherein the nucleic acid genome of the recombinant oncolytic virus comprises a nucleic acid sequence set forth in any one of SEQ ID NOs: 48, 80, 82, and 84-93, or a nucleic acid sequence that has at least 95%, 96%, 97%, 98%, or 99% sequence identity to a nucleic acid sequence set forth in any one of SEQ ID NOs 48, 80, 82, and 84-93.

[1421] 263. The recombinant VACV strain of any one of embodiments 248-261, wherein the nucleic acid genome of the recombinant oncolytic virus comprises a nucleic acid sequence set forth in any one of SEQ ID NOs: 85, 86, 88, and 90, or a nucleic acid sequence that has at least 95%, 96%, 97%, 98%, or 99% sequence identity to a nucleic acid sequence set forth in any one of SEQ ID NOs 85, 86, 88, and 90.

[1422] 264. The recombinant VACV strain of any one of embodiments 248-261, wherein the nucleic acid genome of the recombinant oncolytic virus comprises a nucleic acid sequence set forth in SEQ ID NO: 85, or a nucleic acid sequence that has at least 95%, 96%, 97%, 98%, or 99% sequence identity to a nucleic acid sequence set forth in SEQ ID NO 85.

[1423] 265. A nucleic acid comprising a genome of the recombinant oncolytic virus of any one of embodiments 1-193, 224-227, and 230-235, or the isolated VACV clonal strain of any of embodiments 194-234.

[1424] 266. A recombinant oncolytic virus comprising the nucleic acid of embodiment 265.

[1425] 267. The nucleic acid of embodiment 265, wherein the recombinant oncolytic virus is a recombinant oncolytic vaccinia virus.

[1426] 268. The recombinant oncolytic virus of embodiment 266, that is a recombinant oncolytic vaccinia virus.

[1427] 269. A pharmaceutical composition comprising the recombinant VACV strain of any of embodiments 248-264.

[1428] 270. A pharmaceutical composition comprising the recombinant oncolytic virus of any one of embodiments 1-193, 224-227, and 230-235, optionally wherein the recombinant oncolytic virus is a recombinant oncolytic vaccinia virus.

[1429] 271. The pharmaceutical composition of any one of embodiments 245-247, 269, and 270, further comprising a pharmaceutically acceptable carrier.

[1430] 272. The pharmaceutical composition of any one of embodiments 245-247 and 269-271, that is formulated for intravenous administration, intratumoral administration, intraperitoneal administration or intrapleural administration.

[1431] 273. The pharmaceutical composition of any one of embodiments 245-247 and 269-272, that is formulated for intravenous administration.

[1432] 274. The pharmaceutical composition of any one of embodiments 245-247 and 269-273, wherein the pharmaceutical composition is a liquid composition.

[1433] 275. The pharmaceutical composition of any one of embodiments 245-247 and 269-273, wherein the pharmaceutical composition is lyophilized.

[1434] 276. A method of treating a proliferative disorder in a subject comprising administering to the subject the recombinant oncolytic virus of any one of embodiments 1-193, 224-227, and 230-235, the isolated clonal VACV strain of any one of embodiments 194-235, the recombinant VACV strain of any one of embodiments 248-264, or the pharmaceutical composition of any one of embodiments 245-247 and 269-275.

[1435] 277. The method of embodiment 276, wherein the proliferative disorder is a tumor or a metastasis.

[1436] 278. The method of embodiment 276 or embodiment 277, wherein the proliferative disorder is a cancer.

[1437] 279. The method of embodiment 278, wherein the cancer is a pancreatic cancer, ovarian cancer, lung cancer, colon cancer, prostate cancer, cervical cancer, breast cancer, rectal cancer, renal (kidney) cancer, gastric cancer, esophageal cancer, hepatic (liver) cancer, endometrial cancer, bladder cancer, brain cancer, head and neck cancer, oral cancer (e.g., oral cavity cancer), cervical cancer, uterine cancer, thyroid cancer, testicular cancer, prostate cancer, skin cancers, such as melanoma, e.g., malignant melanoma, cholangiocarcinoma (bile duct cancer), thymic epithelial cancer, e.g., thymoma, leukemia, lymphoma, or multiple myeloma.

[1438] 280. The method of embodiment 278 or embodiment 279, wherein the cancer is Microsatellite Stable (MSS) colorectal cancer.

[1439] 281. The method of embodiment 280, wherein the nucleic acid genome of the recombinant oncolytic virus comprises the nucleic acid sequence set forth in SEQ ID NO: 8, or a nucleic acid sequence that has at least 95%, at least 96%, at least 97%, at least 98% or at least 99% sequence identity to the sequence set forth in SEQ ID NO:8.

[1440] 282. The method of any of embodiments 276-281, wherein the recombinant oncolytic virus or the isolated oncolytic virus is administered in an amount from 1×10⁵ pfu to 1×10¹⁴ pfu.

[1441] 283. The method of any of embodiments 276-282, further comprising administering a second therapeutic agent for the treatment of the proliferative disorder.

[1442] 284. The method of any of embodiments 276-283, further comprising another treatment selected from among surgery, radiation therapy, immunosuppressive therapy and administration of an anticancer agent.

[1443] 285. The method of embodiments 284, wherein the another treatment is administration of an anticancer agent selected from among a cytokine, a chemokine, a growth factor, a photosensitizing agent, a toxin, an anti-cancer antibiotic, a chemotherapeutic compound, a radionuclide, an angiogenesis inhibitor, a signaling modulator, an anti-metabolite, an anti-cancer vaccine, an anti-cancer oligopeptide, a mitosis inhibitor protein, an antimitotic oligopeptide, an anticancer antibody, an anti-cancer antibiotic, an immunotherapeutic agent and a combination of any of the preceding thereof.

[1444] 286. The method of any of embodiments 276-285, wherein the recombinant oncolytic virus or the isolated oncolytic virus is administered intravenously.

[1445] 287. The method of any of embodiments 276-286, further comprising administering AP1903 (Rimiducid) to the subject.

[1446] 288. The method of any of embodiments 276-287, wherein the recombinant oncolytic virus administered to the subject comprises a heterologous nucleic acid encoding an apoptosis inducible protein.

[1447] 289. The method of embodiment 287 or embodiment 288, wherein the nucleic acid genome of the recombinant oncolytic virus comprises the nucleic acid sequence set forth in SEQ ID NO: 8, or a nucleic acid sequence that has at least 95%, at least 96%, at least 97%, at least 98% or at least 99% sequence identity to the sequence set forth in SEQ ID NO:8.

[1448] 290. The method of any of embodiments 276-289, wherein the subject exhibits severe immune deficiency and is sensitive to virus infection.

[1449] 291. The method of any one of embodiments 276-290, wherein the nucleic acid genome of the recombinant oncolytic virus comprises a nucleic acid sequence set forth in any one of SEQ ID NOs: 48, 80, 82, and 84-93, or a nucleic acid sequence that has at least 95%, 96%, 97%, 98%, or 99% sequence identity to a nucleic acid sequence set forth in any one of SEQ ID NOs 48, 80, 82, and 84-93.

[1450] 292. A method of inhibiting virus replication, the method comprising contacting cells infected with a recombinant oncolytic virus with AP1903 (Rimiducid), wherein the recombinant oncolytic virus comprises a heterologous nucleic acid encoding an apoptosis inducible protein.

[1451] 293. A method of inhibiting virus replication, the method comprising contacting cells with AP1903 (Rimiducid), wherein the cells are infected with the recombinant oncolytic virus of any one of embodiments 1-193, 224-227, and 230-235, the isolated clonal VACV strain of any one of embodiments 194-235, or the recombinant VACV strain of any one of embodiments 248-264.

[1452] 294. The method of embodiment 292 or embodiment 293, wherein the contacting occurs in vivo in a subject.

[1453] 295. The method of embodiment 292 or embodiment 294, wherein the AP1903 (Rimiducid) has been administered to a subject previously administered with a recombinant oncolytic virus comprising the heterologous nucleic acid encoding an apoptosis inducible protein.

[1454] 296. The method of embodiment 293 or embodiment 294, wherein the AP1903 (Rimiducid) has been administered to a subject previously administered with the recombinant oncolytic virus of any one of embodiments 1-193, 224-227, and 230-235, the isolated clonal VACV strain of any one of embodiments 194-235, or the recombinant VACV strain of any one of embodiments 248-264.

[1455] 297. A method of inhibiting virus replication in a subject, the method comprising administering to a subject AP1903 (Rimiducid), wherein the subject has been previously administered a recombinant oncolytic virus comprising a heterologous nucleic acid encoding an apoptosis inducible protein.

[1456] 298. A method of inhibiting virus replication in a subject, the method comprising administering to a subject AP1903 (Rimiducid), wherein the subject has been previously administered the recombinant oncolytic virus of any one of embodiments 1-193, 224-227, and 230-235, the isolated clonal VACV strain of any one of embodiments 194-235, or the recombinant VACV strain of any one of embodiments 248-264.

[1457] 299. The method of any of embodiments 287-298, wherein the method inhibits virus replication preferentially in non-cancer cells.

[1458] 300. The method of any of embodiments 287-299, wherein the apoptosis-inducible protein is an inducible DED (iDED).

[1459] 301. The method of embodiment 300, wherein the iDED comprises the amino acid sequence set forth in SEQ ID NO:27, or an amino acid sequence that has at least 85%, 90% or 95% sequence identity to SEQ ID NO:27.

[1460] 302. The method of embodiment 300 and embodiment 301, wherein the nucleic acid genome of the recombinant oncolytic virus comprises the nucleic acid sequence set forth in SEQ ID NO: 8, or a nucleic acid sequence that has at least 95%, at least 96%, at least 97%, at least 98% or at least 99% sequence identity to the sequence set forth in SEQ ID NO:8.

[1461] 303. The method of any one of embodiments 292-302, wherein the nucleic acid genome of the recombinant oncolytic virus comprises a nucleic acid sequence set forth in any one of SEQ ID NOs: 48, 80, 82, and 84-93, or a nucleic acid sequence that has at least 95%, 96%, 97%, 98%, or 99% sequence identity to a nucleic acid sequence set forth in any one of SEQ ID NOs 48, 80, 82, and 84-93.

### IX. EXAMPLES

### Example 1: Isolation and Characterization of Oncolytic Clonal Isolates of Vaccinia Virus

[1462] Clonal isolates of vaccinia viruses were isolated and assessed for oncolytic activity of cancer cells.

[1463] A. Isolation of Vaccinia Virus Clones with Oncolytic Activity

[1464] Vaccinia Virus (VACV) clones were isolated from mix populations of VACV IHD-J (obtained from ATCC-VR-156) and Copenhagen strains. The VACV parental strains were used to infect African green monkey kidney fibroblast cells (CV-1; obtained from ATCC). Confluent CV-1 cell cultures growing in 6-well plates were infected with a series of dilutions of the VACV strains. Two days after infection, six well-isolated plaques were picked for each VACV strain. These plaques were subjected to two more rounds of plaque purification in CV-1 cells. The VACV IHD-J isolated clones were designated as VIP01, VIP02, VIP03, VIP04, VIP05, VIP06 and the Copenhagen clones were designated as VCP01, VCP02, VCP03, VCP04, VCP05, and VCP06 respectively (data not shown).

[1465] Following clone isolation, the survival of tumor cells infected with each of the VIP01-06 clone isolates was evaluated in order to select clones with the highest cell killing activity. The human cancer cell line A549 was purchased from ATCC, and cancer cell lines BT-549, HCC-2998, LOX-IMVI and COL0205 were obtained from National Cancer Institute. VIP01, VIP02, VIP03, VIP04, VIP05 and VIP06 clone isolates were incubated with BT-549, A549, HCC-2998 cells (at MOI=0.01) and with LOX-IMVI and COLO-205 (MOI=0.1). Cell viability was measured after 96 hours of incubation and expressed as percentage of survival.

[1466] As depicted in FIG. 1, VIP02 showed the lowest percentage of cell survival and the highest in vitro cell killing activity when compared to the other five clone isolates.

[1467] B. Sequencing of VIP02 Clonal Isolate

[1468] The VIP02 clone isolate was selected for further analysis as a parental isolate. Genomic DNA of the VIP02 clone isolate was extracted from purified virions using Wizard Genomic DNA Purification kit (Promega, Madison, WI). Libraries were prepared using TruSeq® DNA PCR-Free Library kit (Illumina, San Diego, CA). Sequencing was done using Illumina Miseq system. Library preparation, DNA sequencing and sequence assembly were done by Bio Applied Technologies Joint, Inc. (BATJ, San Diego, CA). The genomic DNA of the VIP02 clone isolate is set forth in SEQ. ID NO: 1. The sequence of VIP02 was compared with the genomic DNA of the IHD-W1 (SEQ. ID NO: 2) (accession number KJ125439.1), the closest match obtained after a database search. Results of this comparison are set forth in Table E1 below.

TABLE E1

| | Nucleotide Change | | | |
|---|---|---|---|---|
| Genomes | Position | Change | AA Change | ORF |
| VIP02 | nt 7770 in VIP02; 7891 in IHDW1 | “T” −> “G” | | |
| vs | nt 15261 in VIP02; 15382 in IHDW1 | “C” −> “T” | “Ala66” −> “Thr” | IHDW1_017 |
| IHDW1 | nt 32135\hat{ }32137 in VIP02; | “G” | ORF shift | IHDW1_038 |
| | 32256 . . . 32257 in IHDW1 | insertion | | (K5L) |
| | nt 49455 in VIP02; 49575 in IHDW1 | “T” −> “G” | “Leu419” −> “Phe” | IHDW1_059 |
| | | | | (E2L) |
| | nt 92969 in VIP02; 93089 in IHDW1 | “T” −> “C” | “Asn591” −> “Asp” | IHDW1_104 |
| | | | | (H4L) |
| | nt 106873 . . . 106874 in VIP02; | “TA” | | |
| | 106993\hat{ }106996 in IHDW1 | deletion | | |
| | nt 111272 . . . 111273 in VIP02; | “ATT” | | |
| | 111394\hat{ }111398 in IHDW1 | deletion | | |
| | nt 162714\hat{ }162716 in VIP02; | “A” | | |
| | 162839 . . . 162840 in IHDW1 | insertion | | |
| | nt 165848 . . . 165849 in VIP02; | “AC” | ORF shift | IHDW1_182 |
| | 165972\hat{ }165975 in IHDW1 | deletion | | (A56R) |
| | nt 187805 in VIP02; | “A” −> “C” | | |
| | 187931 in IHDW1 | | | |

[1469] C. Characterization of extracellular enveloped virus (EEV) from Clonal Isolates

[1470] The production of extracellular enveloped virus (EEV) was characterized in the IHD-J derived VIP02 and the Copenhagen derived VCP02 clone isolates. 4T1 and B16-F10 cell cultures were infected with either VIP02 or VCP02 at an MOI of 0.01. The supernatants and the infected cells were harvested at 48 hours post infection (hpi) and were titrated in CV-1 cells. The percentage of EEV was determined by the formula: viral titer in supernatant/(viral titer in supernatant+viral titer in cell lysate)*100. As shown in FIG. 2, the VIP02 clone isolate derived from the IHD-J parental strain produced a significantly larger amount of EEV than the VCP02 clone isolate, in both infected 4T1 and B16-F10 cells.

[1471] Without wishing to be bound by theory, the ability to produce large amounts of EEV compared to other clonal results indicate that VIP02 may have a higher ability to evade host immune systems and can spread better within, and among, tumors in the body and, thus, VIP02 is particularly suitable as an oncolytic virus therapy.

### Example 2: Assessment of Tumor Growth Inhibition by VACV Clonal Isolates

[1472] The oncolytic activity of VACV clonal isolates, including VIP02, on tumor growth inhibition was tested in vivo and in vitro.

[1473] A. Tumor Growth Inhibition in a Syngeneic Mouse Model

[1474] The tumor inhibitory activity of clonal isolates of the Copenhagen and the IHD-J VACV clone isolates was evaluated in vivo using the 4T1 mouse mammary gland carcinoma model.

[1475] 4T1 cells (ATCC) that stably express red fluorescent protein (RFP), designated 4T1-RFP cells, were used to generate the 4T1 mouse mammary gland carcinoma model. Female BALB/c mice, 4-6 weeks old purchased from Taconic Biosciences Inc. (Rensselaer, NY) were injected subcutaneously (s.c.) into the flank with 2×106 4T1-RFP cells in 100 μL of PBS to generate tumor stocks. The resulting tumor stock tissues were harvested, inspected, and any suspected or grossly necrotic tissue or tumor tissues were removed. Healthy tumor tissue was subsequently cut into small fragments of approximately 1 mm³ and used for orthotopic tumor implantation. All surgical procedures were performed under an 8× magnification microscope under a HEPA-filtered laminar flow hood. Animals were anesthetized by intramuscular injection of a ketamine mixture. The surgical area was sterilized using iodine and alcohol. An incision of approximately 1 cm long was made in the right second mammary gland of the mouse using surgical scissors. The mammary gland was exposed, the capsule at the transplantation site was stripped, and one 4T1-RFP tumor fragment (1 mm³) was transplanted and secured with 8-0 surgical sutures (nylon). The incision was closed with 5-0 surgical sutures.

[1476] Virus treatment was initiated when tumor volumes were approximately 100 mm³. Mice were treated (10 mice per group) once with an intravenous dose of 1×10⁷ PFU of VCP02, VIP01 and VIP02. Tumor volume and body weight were measured twice per week using a vernier caliper and an electronic scale, respectively. Tumor volume was estimated by measuring the perpendicular minor dimension (W) and major dimension (L). Approximate tumor volume was calculated with the formula (W²×L)/2. Mice were euthanized when tumors reached termination criteria (tumor volume>=3000 mm³ and/or body weight loss>=20%).

[1477] As shown in FIG. 3, a single intravenous delivery of VIP02 at a low dose significantly inhibited tumor growth in the 4T1 mouse mammary gland carcinoma model compared to vehicle only control. In contrast, neither VIP01 nor VCP02 clonal isolates were effective in inhibiting tumor growth.

[1478] B. Tumor Cell Killing In Vitro

[1479] To further confirm oncolytic activity, tumor cell killing was assessed in vitro in 2-D and 3-D cultures of different cancer cell lines. The assays were carried out with a variety of different human cancer cell lines: BT-549, NCI-H226, SW1990, M14, LOX-IMVI, COLO 205, U-251, 786-0 or PC-3 cancer cell for 2-D culture assays and MDA-MB-468, A549, M14, HCC-2998, COLO 205, U-251, 786-0, PC-3, 4T1 and CT26.WT for 3-D cell culture assays. The human cancer cell lines were purchased from ATCC or were obtained from National Cancer Institute.

[1480] For the 2-D cell culture, cells were seeded into 96-well microplates (Corning, Kennebunk, ME) at a concentration of 3,000 cells per well and incubated overnight at 37° C. under 5% (v/v) CO₂. Cells were then infected with VIP02 at MOI=0.1 (darker bars) and MOI=0.01 (lighter bars). Cell viability was measured at 96 hours post infection using CellTiter 96® AQueous One Solution Cell Proliferation Assay (Promega, Madison, WI) according to the manufacturer's instructions. The percent of viable cells (% survival) was determined.

[1481] For the 3-D cell cultures, cells were seeded into 96-well spheroid microplates (Corning, Kennebunk, ME) at a concentration of 30,000 cells per well and centrifuged at 500 g for 5 minutes. After being incubated for 4 days at 37° C. under 5% (v/v) CO₂, cells were infected with VIP02 at MOI=0.1 (darker bars) and MOI=0.01 (lighter bars). Five days after infection (120 hours), cell viability was measured using the CellTiter-Glo 3D Viability Assay (Promega, Madison, WI) according to the manufacturer's instructions. The percentage of viable cells (% survival) was determined.

[1482] As shown in FIG. 4A (2-D culture) and FIG. 4B (3-D culture), VIP02 had a potent in vitro tumor cell killing activity in both 2-D and 3-D cultures.

### Example 3: Generation and Assessment of Recombinant Vip02-Based Viral Clones Engineered with a Gene Encoding a Heterologous Stealth Protein

[1483] The VIP02 clonal isolate was chosen as a parent virus for subsequent genetic engineering. A gene encoding a stealth protein was engineered into the VIP02. The exemplary stealth proteins that were engineered into recombinant strains as described in this example include Borrelia burgdorferi complement regulatory-acquiring surface protein-2 (CRASP-2), minimized complement regulator factor H (miniFH) and Cowpox virus ORFs 012, 203 and 018 (CPXV012-203-018).

[1484] A. Generation of Stealth Recombinant Vaccinia Viruses

[1485] Recombinant VIP02 VACV strains were generated by homologous recombination using standard techniques. In this method, a gene encoding the heterologous protein (or heterologous gene product) was cloned by standard recombinant DNA techniques into a transfer vector plasmid containing a desired segment of vaccinia DNA to target a particular locus in the VIP02 clonal isolate. Typically, the DNA is inserted into a non-essential gene, for example, the F14.5 gene, and is linked to a vaccinia promoter. The heterologous gene was then inserted into a locus of the genome of the clonal isolate by double reciprocal crossover.

[1486] 1. Transfer Vector Plasmid Construction

[1487] Transfer vector plasmids generated to contain a stealth gene were generated as follows:

[1488] pIA35R: The left and right flanking sequences of the A35R gene of VACV IHD-J were PCR-amplified from VACV IHD-J genomic DNA using Q5 High-Fidelity 2× Master Mix (New England Biolabs Inc., Ipswich, MA) and the primers: 5′-GCTGAATTCGTAGGTTTAAGAAGTTGTCGGTGC-3′ (SEQ ID NO: 43) and 5′-TTTTTGTTGTCACTTGTAGAATTTTTTAACACATAGTAC-3′ (left flank) (SEQ ID NO: 44), 5′-TACTATGTGTTAAAAAATTCTACAAGTGACAACAAAAACTGCAGCGGCCGCTCGAGAGCTC AGACGGCAATGGATGGATCATAATTGATG-3′ (SEQ ID NO: 45) and 5′-GCGAAGCTTATCTTCATTAAGTACTTTAACAGTC-3′ (right flank) (SEQ ID NO: 46). The two fragments were joined together using the method of gene splicing by overlapping extension (Horton R M, Ho S N, Pullen J K, Hunt HD, Cai Z, Pease L R. Gene splicing by overlap extension. Methods Enzymol. 1993; 217:270-9. Epub 1993/01/01. doi: 10.1016/0076-6879(93)17067-f. PubMed PMID: 8474334). The resulting fragment was digested with EcoRI and HindIII and cloned into the same-cut plasmid pVM-1 to yield pIA35R. The flanking sequences of A35R were confirmed by DNA sequencing.

[1489] pITK: To generate pITK, the left and right flanking sequences of the J2R (thymidine kinase; TK) gene of VACV IHD-J were PCR-amplified from VACV IHD-J genomic DNA using the Q5 High-Fidelity 2× Master Mix (New England Biolabs Inc., Ipswich, MA) and the primers: 5′-GCTGAATTCTTTTGCGATCAATAAATGGATCACAACCAG-3′ (SEQ ID NO: 35) and 5′-AACTCGTCTAATTAATTCTGTACTTTTACCTG-3′ (left flank) (SEQ ID NO: 36), 5′-CCATGTTTTCAGGTAAAAGTACAGAATTAATTAGACGAGTTGGTACCTGCAGCGGCCGCTCG AGAGCTCGGAGGTAATGATATGTATCAATCGGTGTGTAG-3′ (SEQ ID NO: 37) and 5′-GCGAAGCTTCGTAATTACTTAGTAAATCCGCCGTACTAGG-3′ (right flank) (SEQ ID NO: 38). The two fragments were joined together using the method of gene splicing by overlapping extension (Horton et al., 1993). The resulting fragment was digested with EcoRI and HindIII and cloned into the same-cut plasmid pVM-1 to yield pITK. The flanking sequences of TK were confirmed by DNA sequencing.

[1490] Plasmid pIF14.5L-CRASP-2. To construct the pIF14.5L-CRASP-2 plasmid, the left flanking sequence of the F14.5L gene of VACV IHD-J was amplified by PCR from the VACV IHD-J genomic DNA using the Q5 High-Fidelity 2× Master Mix (New England Biolabs Inc., Ipswich, MA) and the primers: 5′-GCTCAATTGCTAGCTCGATGCTTTGTTAAAATAGATACTCCTAG-3′ (SEQ. NO ID: 31) and 5′-CAACAGTAGTTCTTGCTCCTCCTTGATTC-3′ (SEQ. NO ID: 32). The Borrelia burgdorferi complement regulator-acquiring surface protein-2 (CRASP-2, SEQ ID NO: 18) cDNA fused with the right flanking sequence of F14.5L was synthesized by IDT (Coralville, IA). The two fragments were joined together using the method of gene splicing by overlapping extension (Horton et al., 1993) and the primers 5′-GCTCAATTGCTAGCTCGATGCTTTGTTAAAATAGATACTCCTAG-3′ (SEQ. NO ID: 33) and 5′-GCGAAGCTTGACTTTGTAGCTCTCCCAGATTTCTTTTC-3′ (SEQ. NO ID: 34).

[1491] The fragment from above was then cloned into plasmid VM-1 (pVM-1). To generate pVM-1, human codon-optimized Escherichia coli guanine phosphoribosyltransferase (gpt) gene driven by the VACV early promoter p7.5E was synthesized by Integrated DNA Technologies (IDT, Coralville, IA) and digested with EcoRI and Ndel. The digested fragment was cloned into the same-cut plasmid pUC19 to yield the plasmid pVM-1. The sequence of the gpt expression cassette was confirmed by DNA sequencing. The fragment with CRASP-2 fused to the left and right flanking sequences of F14.5L from above was digested with MfeI and HindIII, then cloned into the plasmid pVM-1 that was cut with EcoRI and HindIII to yield pIF14.5L-CRASP-2. The DNA sequence of F14.5L-CRASP-2 was confirmed by DNA sequencing.

[1492] Plasmid pIF14.5L-miniFH To construct plasmid pIF14.5L-miniFH, the left flanking sequence of the F14.5L gene of VACV IHD-J was PCR-amplified from the VACV IHD-J genomic DNA using Q5 High-Fidelity 2× Master Mix (New England Biolabs Inc., Ipswich, MA) and the primers: 5′-GCTCAATTGCTAGCTCGATGCTTTGTTAAAATAGATACTCCTAG-3′ (SEQ. NO ID: 31) and 5′-CAACAGTAGTTCTTGCTCCTCCTTGATTC-3′ (SEQ NO ID: 32). The minimized complement regulator factor H (miniFH, SEQ ID NO: 19) cDNA fused with the right flanking sequence of F14.5L was synthesized by IDT (Coralville, IA). The two fragments were joined together using the method of gene splicing by overlapping extension (Horton et al., 1993) and the primers 5′-GCTCAATTGCTAGCTCGATGCTTTGTTAAAATAGATACTCCTAG-3′ (SEQ. NO ID: 33) and 5′-GCGAAGCTTGACTTTGTAGCTCTCCCAGATTTCTTTTC-3′ (SEQ. NO ID: 34). The resulting fragment was digested with MfeI and HindIII, then cloned into the plasmid pVM-1 and cut with EcoRI and HindIII to yield pIF14.5L-miniFH The DNA sequence of F14.5L-miniFH was confirmed by DNA sequencing.

[1493] Plasmid pITK-CPXV012-203-018. The DNA fragment containing cowpox virus (CPXV) open-reading frames 012 (SEQ ID NO: 20), 203 (SEQ ID NO: 21) and 018 (SEQ ID NO: 22) with their own original promoters was synthesized by IDT (Coralville, IA).

[1494] The fragment from above was then cloned into plasmid ITK (pITK). The synthesized fragment containing CPXV open-reading frames 012, 203 and 018 from above was digested with KpnI and SacI and cloned into the same-cut plasmid pITK to yield pITK-CPXV012-203-018. The DNA sequence of CPXV012-203-018 was confirmed by DNA sequencing.

[1495] 2 Homologous Recombination and Selection of Recombinant Viruses

[1496] To generate the recombinant vaccinia viruses, CV-1 cells were infected with parental viruses as indicated in Table E2 at a multiplicity of infection (MOI) of 0.1 for 1 hour and then transfected with transfer vectors, as indicted in Table E2 below and FIG. 5, using jetPRIME in vitro DNA & siRNA transfection reagent (Polyplus-transfection Inc., New York, NY). Two days post infection, infected/transfected cells were harvested and recombinant viruses were selected and plaque purified as described previously ((Falkner F G, Moss B. Transient dominant selection of recombinant vaccinia viruses. J Virol. 1990; 64(6):3108-11. Epub 1990/06/01. PubMed PMID: 2159565).

[1497] Table E2 and FIG. 5 summarize the generated recombinant VACV strains, including the parental virus and transfer vector used in their generation.

TABLE E2

| Recombinant | | | |
|---|---|---|---|
| VACVs | Parent Virus | Transfer Vector | Genotype |
| VIR11 | VIP02 | pIA35R | A35R is disrupted |
| (SEQ ID NO: 3) | (SEQ ID NO: 1) | | |
| VIR52 | VIR11 | pITK | A35R and J2R are |
| (SEQ ID NO: 12) | (SEQ ID NO: 3) | | disrupted |
| VIR27 | VIP02 | pIF14.5L-CRASP-2 | F14.5L fused with CRASP- |
| (SEQ ID NO: 5 ) | (SEQ ID NO: 1) | | 2 |
| VIR37 | VIP02 | pIF14.5L-miniFH | F14.5L fused with miniFH |
| (SEQ ID NO: 6 ) | (SEQ ID NO: 1) | | |
| VIR46 | VIR27 | pITK-CPXV012-203-018 | F14.5L fused with CRASP- |
| (SEQ ID NO: 10) | (SEQ ID NO: 5) | | 2; CPXV012, 018 and 203 |
| | | | inserted |
| | | | at J2R |

[1498] B. Assessment of Immune Evasion and Oncolytic Activity

[1499] 1. Stealth Virus In Vitro Avoidance of Host Immune Response

[1500] Recombinant virus strains VIR27, VIR37 and VIP02 were assessed for their ability to escape inhibition by complement. For the complement inhibition assay, 2 μL of virus (10⁷ pfu/mL) were mixed with 100 μL of normal human serum (Biochemed Services, Winchester, VA), BALB/c mouse serum (Biochemed Services, Winchester, VA), or DMEM-2.5 in duplicate, respectively, and then the mix was incubated at 37° C. for 1 hour. Virus concentration after incubation was calculated by titration in CV-1 cells and the percent inhibition of the virus titer was determined by comparing the virus titer after incubation with serum with the virus titer after incubation with DMEM-2.5 (FIG. 6).

[1501] As shown in FIG. 6, VIP02, and VIP02-based stealth oncolytic viruses VIR27 and VIR37, can escape complement inhibition when assessed in human and mice serum. Moreover, the percentage of inhibition was significantly lower in the VIP02-based stealth oncolytic viruses VIR27 and VIR37 when compared to VIP02, indicating that the introduction of CRASP-2 and miniFH into VIP02 significantly increases the ability of the virus to inhibit the host complement.

[1502] 2 Stealth Virus In Vivo Induced Tumor Size Reduction in Mice

[1503] The tumor inhibitory activity of VIP02 and the engineered stealth clone VIR27 expressing CRASP-2 was evaluated in vivo using the 4T1 mouse mammary gland carcinoma model, as described above in Example 2. In this experiment, virus treatment was initiated when tumor volumes were approximately 80 mm³. Mice were treated (8 mice per group) once with an intravenous dose of 1×10⁷ PFU of VIP02 or VIR27. As shown in FIG. 7, mice injected with the VIP02 and VIR27 strains showed a reduction in tumor volume at 9 days after treatment when compared to vehicle treated controls. Furthermore, the stealth strain VIR27 was more efficient than VIP02 at reducing tumor growth, as shown by a statistically significant reduction in tumor volume at 7 days post treatment. These results are consistent with a finding that introduction of the exogenous CRASP-2 protein potentiates the ability of the virus to inhibit complement.

[1504] In another similar study, the tumor inhibitory activity of stealth VIR46 (cowpox virus, CPXV, open-reading frames 012, 203 and 018 with their own original promoters) and VIR52 (A35R and J2R are disrupted) was evaluated in vivo using the 4T1 mouse mammary gland carcinoma model, as described above in Example 2. In this experiment, virus treatment was initiated when tumor volumes were approximately 90 mm³. Mice were treated (6 mice per group) once with an intravenous dose of 1×10⁷ PFU of VIP46 or VIR52. As shown in FIG. 8, mice injected with the VIR46 strain showed a statistically significant reduction in tumor volume at 20 days after treatment when compared to vehicle treated mice. In addition, VIR46 showed a significantly improved ability to reduce tumor volume when compared with VIR52.

### Example 4: Generation and Assessment of Recombinant VIP02-Based Viral Clones Engineered with a Gene Encoding a Heterologous Immune Stimulating Protein

[1505] The VIP02 clonal isolate was chosen as a parent virus for subsequent genetic engineering with an exemplary immune stimulating gene encoding a human LIGHT mutant (hmLIGHT). The generated recombinant virus was evaluated for the ability to inhibit tumor growth.

[1506] A. Generation of Immune Stimulating Recombinant Vaccinia Viruses

[1507] A recombinant VACV strain with immune stimulating activity, VIR49, was generated by insertion of the human LIGHT mutant (hmLIGHT) cDNA under the control of the VACV SSE promoter into the endogenous viral J2R gene. The recombinant VIR49 was generated by homologous recombination of a transfer vector and the parental genome.

[1508] The transfer vector was generated as follows:

[1509] Plasmid pIA35R-SSE-hmLIGHT. The human LIGHT mutant (hmLIGHT, SEQ ID NO: cDNA under the control of the VACV SSE promoter was synthesized by IDT (Coralville, IA). The synthesized fragment was digested with PstI and SacI and cloned into the same-cut plasmid pIA35R described in Example 3 to yield pIA35R-SSE-hmLIGHT. The DNA sequence of SSE-hmLIGHT was confirmed by DNA sequencing.

[1510] Parental virus VIR13 was generated by infecting CV-1 cells with VIP02 at an MOI of 0.1 for 1 hour and then transfected with pITK transfer vector described in Example 3, to yield a parental recombinant virus in which the J2R(TK) gene was disrupted. To generate the recombinant VIR49, CV-1 cells were infected with the parental virus VIR13 at an MOI of 0.1 for 1 hour and then transfected with the pIA35R-SSE-hmLIGHT transfer vector. For comparison, recombinant vaccinia strain VIR52 also was generated by infecting CV-1 cells with the parental strain VIR11 at an MOI of 0.1 for 1 hour and then transfected with the pITK transfer vector substantially as described in Example 3.

[1511] Table E3 and FIG. 9 summarize the generated recombinant VACV strains, including the parental virus and transfer vectors used in their generation.

TABLE E3

| Recombinant | | | |
|---|---|---|---|
| VACVs | Parent Virus | Transfer Vector | Genotype |
| VIR11 | VIP02 | pIA35R | A35R is disrupted |
| VIR52 | VIR11 | pITK | A35R and J2R are |
| (SEQ ID NO: 12) | (SEQ ID NO: 3) | | disrupted |
| VIR13 | VIP02 | pITK | J2R(TK) is disrupted |
| (SEQ ID NO: 4) | | | |
| VIR49 | VIR13 | pIA35R-SSE-hmLIGHT | J2R(TK) is disrupted, |
| (SEQ ID NO: 11) | (SEQ ID NO: 4) | | SSE-hmLIGHT inserted |
| | | | at A35R |

[1512] B. Assessment of Oncolytic Activity

[1513] The tumor inhibitory activity of VIR49 (mutant hLIGHT with immune system stimulating activity) was evaluated in vivo using the 4T1 mouse mammary gland carcinoma model as described above in Example 2. In this experiment, virus treatment was initiated when tumor volumes were approximately 90 mm³. Mice were treated (6 mice per group) once with an intravenous dose of 1×10⁷ PFU of VIR49 or VIR52.

[1514] As shown in FIG. 10, mice treated with VIR49 and VIR52 showed a statistically significant reduction in tumor volume when compared to the vehicle treated controls. Moreover, mice treated with VIR49 showed a significantly improved efficacy at reducing tumor volume 20 days after treatment when compared to VIR52 and the vehicle treated controls, indicating that the introduction of the hmLIGHT sequence increases the ability of the virus to stimulate the immune system.

### Example 5: Generation and Assessment of Recombinant VIP02-Based Viral Clones Engineered with a Gene Encoding an Anti-Angiogenic Protein

[1515] The VIP02 clonal isolate was chosen as a parent virus for subsequent genetic engineering with exemplary anti-angiogenic proteins, namely, anti-VEGF single chain antibody (scab) fused with anti-angiopoietin-2 scAb (anti-VEGF-anti-Ang2) (SEQ ID NO: 23) and human versikine (VK) (SEQ ID NO: 24) (anti-VEGF-anti-Ang2-SEL-VK). The generated recombinant virus was evaluated for the ability to inhibit tumor growth.

[1516] A. Generation of Anti-Angiogenic Recombinant Vaccinia Viruses

[1517] A recombinant vaccinia virus clone with anti-angiogenic activity, VIR71, was generated by inserting the mH5-anti-VEGF-anti-Ang2-SEL-VK construct into the endogenous viral J2R gene. The recombinant VIR71 was generated by homologous recombination of a transfer vector and the parental genome.

[1518] The transfer vectors used in the recombinant virus generation were generated as follows:

[1519] pITK-mH5-hFGL1: The human fibrinogen like 1 (hFGL1) cDNA under the control of the VACV modified H5 early/late promoter (mH5) was synthesized by IDT (Coralville, IA). The synthesized fragment was digested with KpnI and SacI and cloned into the same-cut plasmid pITK described in Example 3 to yield pITK-mH5-hFGL. The DNA sequence of mH5-hFGL was confirmed by DNA sequencing.

[1520] pITK-mH5-Versikine: pITK-mH5-hFGL1 was digested with PstI and SacI. The fragment containing the backbone plasmid and the mH5 promoter (pITK-mH5) was gel-purified. The human versikine was synthesized by IDT (Coralville, IA) and digested with PstI and SacI, then cloned into the same-cut plasmid pITK-mH5 to yield pITK-mH5-Versikine. The DNA sequence of mH5-Versikine was confirmed by DNA sequencing.

[1521] pITK-mH5-anti-VEGF-anti-Ang2: pITK-mH5-hFGL1 was digested with PstI and SacI. The fragment containing the backbone plasmid and the mH5 promoter (pITK-mH5) was gel-purified. The anti-VEGF single chain antibody (scAb) fused with anti-angiopoietin-2 scAb was synthesized by IDT (Coralville, IA) and digested with PstI and SacI, then cloned into the same-cut plasmid pITK-mH5 to yield pITK-mH5-anti-VEGF-anti-Ang2. The DNA sequence of mH5-anti-VEGF-anti-Ang2 was confirmed by DNA sequencing.

[1522] pITK-mH5-anti-VEGF-anti-Ang2-SEL-VK: pITK-mH5-hFGL1 was digested with PstI and SacI. The fragment containing the backbone plasmid and the mH5 promoter (pITK-mH5) was gel-purified. The fragment containing anti-VEGF-anti-Ang2 was PCR-amplified from pITK-mH5-anti-VEGF-anti-Ang2 using Q5 High-Fidelity 2× Master Mix (New England Biolabs Inc., Ipswich, MA) and the primers: 5′-CGACTGCAGACCATGGAAACCGACACAC-3′ (SEQ ID NO: 39) and 5′-CAATTTTTATAAAAATTAATTAATCATTGTCC-3′ (SEQ ID NO: 40). The fragment containing human versikine driven by the VACV synthetic strong early/late promoter (SEL) was PCR-amplified from pITK-mH5-Versikine using Q5 High-Fidelity 2× Master Mix (New England Biolabs Inc., Ipswich, MA) and the primers: 5′-GGACAATGATTAATTAATTTTTATAAAAATTGAAATTTTATTTTTTTTTTTTGGAATATAAAT ACTCGAGACCATGTTCATAAACATAAAATCC-3′ (SEQ ID NO: 41) and 5′-GCTGAGCTCATAAAAATTAATTAATCATTCAGC-3′ (SEQ ID NO: 42). The two fragments were joined together using the method of gene splicing by overlapping extension (Horton et al., 1993). The resulting fragment was digested with PstI and SacI, then cloned into the same-cut plasmid pITK-mH5 to yield pITK-mH5-anti-VEGF-Ang2-SEL-VK. The DNA sequence of mH5-anti-VEGF-Ang2-SEL-VK was confirmed by DNA sequencing.

[1523] To generate the recombinant vaccinia virus VIR71, CV-1 cells were infected with parental virus VIR11 at a multiplicity of infection (MOI) of 0.1 for 1 hour and then transfected with pITK-mH5-anti-VEGF-anti-Ang2-SEL-VK transfer vector. For comparison, recombinant vaccinia strain VIR52 also was generated by infecting CV-1 cells with the parental strain VIR11 at a MOI of 0.1 for 1 hour and then transfected with the pITK transfer vector substantially as described in Example 3.

[1524] To generate the recombinant vaccinia virus VIR86, CV-1 cells were infected with parental virus VIR49 at a multiplicity of infection (MOI) of 0.1 for 1 hour and then transfected with pITK-mH5-anti-VEGF-anti-Ang2-SEL-VK transfer vector. For comparison, recombinant vaccinia strain VIR13 also was generated by infecting CV-1 cells with the parental strain VIRO2 at a MOI of 0.1 for 1 hour and then transfected with the pITK transfer vector substantially as described in Example 4.

[1525] Table E4 and FIG. 11 summarize the generated recombinant VACV strains, including the parental virus and transfer vectors used in their generation.

TABLE E4

| Recombinant | | | |
|---|---|---|---|
| VACVs | Parent Virus | Transfer Vector | Genotype |
| VIR11 | VIP02 | pIA35R | A35R is disrupted |
| VIR52 | VIR11 | pITK | A35R and J2R are disrupted |
| (SEQ ID NO: 12) | (SEQ ID NO: 3) | | |
| VIR71 | VIR11 | pITK-mH5-anti-VEGF- | A35R is disrupted; mH5-anti- |
| (SEQ ID NO: 13) | (SEQ ID NO: 3) | anti-Ang2-SEL-VK | VEGF-anti-Ang2-SEL-VK |
| | | | inserted at J2R |
| VIR86 | VIR49 | pITK-mH5-anti-VEGF- | SSE-hmLIGHT inserted at |
| (SEQ ID NO: 47) | (SEQ ID NO: 11) | anti-Ang2-SEL-VK | A35R; mH5-anti-VEGF-anti- |
| | | | Ang2-SEL-VK inserted at J2R |

[1526] B. Assessment of Oncolytic Activity

[1527] The tumor inhibitory activity of VIR71 was evaluated in vivo using the 4T1 mouse mammary gland carcinoma model described above in Example 2. In this experiment, virus treatment was initiated when tumor volumes were approximately 90 mm³. Mice were treated (6 mice per group) once with an intravenous dose of 1×10⁷ PFU of VIR71 or VIR52.

[1528] As shown in FIG. 12A, mice injected with the anti-angiogenesis VIR71 strain showed a statistically significant reduction in tumor volume 14 days after treatment when compared with VIR52 and the vehicle treated controls. Also as shown in FIG. 12B, mice injected with the anti-angiogenesis VIR86 showed a reduction in tumor volume across 7 days post treatment when compared to both vehicle treated control and VIR13. The data demonstrates that the anti-angiogenesis VIR71 and VIR 86 strains each showed a statistically significant reduction in tumor volume when compared with the vehicle treated controls and while VIR52 and VIR13 each reduced tumor size, the VIR71 and VIR 86 strains showed a greater reduction in tumor volume than the control VIR52 and VIR13 strains. Versikine, a molecule that can act as an immune modulator, did not significantly reduced tumor size when assessed alone (data not shown). However, when fused to anti-VEGF-anti-Ang2, Versikine, significantly enhanced the tumor cell killing ability of VEGF-anti-Ang2.

### Example 6: Generation and Assessment of Recombinant VIP02-Based Viral Clones Engineered with a Gene Encoding an Apoptosis Inducing Protein

[1529] The VIP02 clonal isolate was chosen as a parent virus for subsequent genetic engineering with exemplary apoptosis inducing proteins in order to generate a viral inducible system that can inhibit viral replication in healthy cells but not in cancer cells upon induction with Rimiducid, an FDA approved drug for use in humans. The exemplary apoptosis inducing proteins that were engineered into recombinant strains as described in this example include Rimiducid inducible iCasp9, iDED or iFAS constructs containing F36V-FKBP, a full length version of the human FK506 binding protein 12(FKBP12, also known as FKBP) including a Phe to Val substitution (See Clackson et al. 1998 PNAS, 95:10437-10442) fused to either Casp9, DED or FAS. Rimiducid treatment induces FKBP12 dimerization that leads to activation of inducible Casp9, DED and FAS. The ability of these recombinant vaccinia virus strains to inhibit plaque formation, inhibit viral replication, and inhibit virus-mediated cytotoxicity was evaluated in primary healthy cells and cancer cells.

[1530] A. Generation of Apoptosis Inducing Vaccinia Viruses

[1531] The recombinant vaccinia virus clones with apoptosis-inducing activity were generated by replacing the J2R gene in the VIP02 with DNA encoding iCasp9, iDED and iFAS protein. The recombinant strains VIR40, VIR41 and VIR42 were generated by homologous recombination of a transfer vector and the VIP02 parental genome, and VIR13 was used as a control virus.

[1532] The transfer vectors used in the recombinant virus generation were generated as follows:

[1533] pITK-SSE-hFGL1tm: The human fibrinogen like 1 (hFGL1) cDNA fused with the transmembrane domain of human CD19 under the control of the VACV synthetic strong early promoter (SSE) was synthesized by IDT (Coralville, IA). The synthesized fragment was digested with KpnI and SacI and cloned into the same-cut plasmid pITK described in Example 3 to yield pITK-SSE-hFGLtm. The DNA sequence of SSE-hFGLtm was confirmed by DNA sequencing.

[1534] Plasmid pITK-SSE-iCasp9. pITK-SSE-hFGLltm was digested with PstI and SacI. The fragment containing the backbone plasmid and the SSE promoter (pITK-SSE) was gel-purified. The inducible caspase 9 (iCasp9, SEQ ID NO: 26) was synthesized by IDT (Coralville, IA) and digested with PstI and SacI, then cloned into the same-cut plasmid pITK-SSE to yield pITK-SSE-iCasp9. The DNA sequence of SSE-iCasp9 was confirmed by DNA sequencing.

[1535] Plasmid pITK-SSE-iDED. pITK-SSE-hFGLltm was digested with PstI and SacI. The fragment containing the backbone plasmid and the SSE promoter (pITK-SSE) was gel-purified. The inducible death effector domain (DED, SEQ ID NO: 27) of the Fas-associated death domain-containing protein (FADD) was synthesized by IDT (Coralville, IA) and digested with PstI and SacI, then cloned into the same-cut plasmid pITK-SSE to yield pITK-SSE-iDED. The DNA sequence of SSE-iDED was confirmed by DNA sequencing.

[1536] pITK-SSE-iFAS. pITK-SSE-hFGLltm was digested with PstI and SacI. The fragment containing the backbone plasmid and the SSE promoter (pITK-SSE) was gel-purified. The inducible Fas (SEQ ID NO: 28) was synthesized by IDT (Coralville, IA) and digested with PstI and SacI, then cloned into the same-cut plasmid pITK-SSE to yield pITK-SSE-iFAS. The DNA sequence of SSE-iFAS was confirmed by DNA sequencing.

[1537] To generate the recombinant vaccinia viruses, CV-1 cells were infected with parental virus VIP02 at a multiplicity of infection of 0.1 for 1 hour and then transfected with transfer vectors as indicated in Table E5 substantially as described in Example 3.

[1538] Table E5 and FIG. 13 summarize the generated recombinant VACV strains, including the parental virus and transfer vectors used in their generation.

TABLE E5

| Recombinant VACVs | Parent Virus | Transfer Vector | Genotype |
|---|---|---|---|
| VIR13 (SEQ ID NO: 4) | VIP02 (SEQ ID NO: 1) | pITK | J2R(TK) is disrupted |
| VIR40 (SEQ ID NO: 7) | VIP02 (SEQ ID NO: 1) | pITK-SSE-iCasp9 | SSE-iCasp9 inserted at J2R |
| VIR41 (SEQ ID NO: 8) | VIP02 (SEQ ID NO: 1) | pITK-SSE-iDED | SSE-iDED inserted at J2R |
| VIR42 (SEQ ID NO: 9) | VIP02 (SEQ ID NO: 1) | pITK-SSE-iFAS | SSE-iFAS inserted at J2R |

[1539] B. Assessment of Apoptosis and Oncolytic Activity

[1540] d. iCasp9, iDED or iFAS Protein Expression

[1541] Expression of iCasp9, iDED and iFAS was assessed in infected cancer cells by monitoring the expression of F36V-FKBP.using an anti-FKBP12 antibody.

[1542] HCT-116 Human Colon Carcinoma cells were infected with VIR13, VIR40, VIR41 and VIR42 at an MOI of 10 in the presence of 10 nM Rimiducid or vehicle control. One day after infection, cells were harvested by low-speed centrifugation and lysed using RIPA lysis buffer (VWR, Solon, OH). A protease inhibitor cocktail (Promega, Madison, WI) was added to the lysis buffer. Protein amounts were determined using the RC DC Protein Quantification Kit (Bio-Rad Laboratories, Hercules, CA). Normalized protein amounts were subjected to an SDS-PAGE (Bio-Rad Laboratories, Hercules, CA) and transferred onto a PVDF membrane for Western blotting, which was blotted with primary antibodies followed by horseradish peroxidase (HRP)-conjugated secondary antibodies. Proteins were visualized with a chemiluminescent detection kit (ClarityMax Western ECL Substrate, Bio-Rad Laboratories, Hercules, CA) and Azure Biosystems c300 (Azure Biosystems, Dublin, CA). Antibodies against FKBP12 (1:1,000) and beta-actin (1:2,000) were from Novus Biologicals (Centennial, CO).

[1543] Western blot analysis of VIR13, VIR40, VIR41 and VIR42 extracts showed that iCasp9, iDED, and iFAS were expressed in VIR40, VIR41, and VIR42 infected cells, respectively (data now shown). In the same assay, no detectable signal for FKB12 was observed in cells infected with VIR13 consistent with the lack of engineering of the apoptosis inducing systems in this recombinant virus.

[1544] e. PARP1 Protein Expression in Infected Cells Treated with Rimiducid

[1545] Activation of the inducible system with Rimiducid can be assessed by Western blot using an antibody that binds to PARP1 protein cleavage products, a marker of apoptosis. The ability of VIR40, VIR41 and VIR42 to induce apoptosis after FKBP12 dimerization induced by Rimiducid was assessed by Western blot of protein from infected human primary mammary epithelial cells and human primary colonic epithelial cells using an anti-PARP1 antibody. Anti-PARP1 (1:2,000) was from OriGene (Rockville, MD). As a control, the levels of PARP1 were also monitored in cells infected with VIR13.

[1546] Western blot results showed that Rimiducid induced cleavage of PARP1 in VIR40 and VIR41 but not in VIR13 or VIR42, indicating that iCasp9 and iDED induced apoptosis in infected human primary mammary epithelial cells and colonic epithelial cells in the presence of Rimiducid (data not shown). However, PARP1 cleavage was only detected in Hs578T human mammary gland duct carcinoma cells infected with VIR40 but not when infected with VIR13, VIR41 and VIR42, demonstrating that for cancer cells iCasp9, but not iDED and iFAS, induced apoptosis (data not shown).

[1547] f. Plaque Formation in the Presence of Rimiducid

[1548] As an alternative method for assessing apoptosis of infected cells, plaque formation after viral infection and treatment with Rimiducid was evaluated to investigate the ability of the VIR13, VIR40, VIR41 and VIR42 viral strains to inhibit viral replication in healthy and cancer cells (data not shown).

[1549] Cells were infected with VIR13, VIR40, VIR41 and VIR42 in the presence of each of 10 nM Rimiducid and vehicle control. Two or three days after infection, cells were stained with crystal violet. Pictures were taken using Azure Biosystems c300 (Azure Biosystems, Dublin, CA).

[1550] Table E6 summarizes the presence of plaque formation when healthy cells were infected with the recombinant virus strains. As expected, plaque formation was observed in all cells that were infected with the VIR13 control recombinant virus. However, Rimiducid treatment inhibited plaque formation in healthy cells infected with VIR40 and VIR41 but not when infected with VIR42 indicating that iCasp9 and iDED, but not iFAS, inhibit plaque formation in healthy cells.

TABLE E6

| Cell type | | Plaque formation | | | |
|---|---|---|---|---|---|
| Viral clone | Rimiducid | VIR13 | VIR40 | VIR41 | VIR42 |
| Human primary | − | + | + | + | + |
| mammary | + | + | − | − | + |
| epithelial cells | | | | | |
| Human primary | − | + | + | + | + |
| colonic | + | + | − | − | + |
| epithelial cells | | | | | |
| Human primary | − | + | + | + | + |
| bronchial/tracheal | + | + | − | − | + |
| epithelial cells | | | | | |
| Murine primary | − | + | + | + | + |
| mammary | + | + | − | − | + |
| epithelial cells | | | | | |

[1551] Table E7 summarizes the presence of plaque formation when various cancer cells were infected with the recombinant virus strains. As expected, plaque formation was observed in all cancer cells that were infected with the VIR13 control recombinant virus. Rimiducid treatment inhibited plaque formation in cancer cells infected with VIR40 but not in cancer cells infected with VIR41 and VIR42 indicating that iCasp9, but not iDED and iFAS, inhibit plaque formation in cancer cells.

[1552] Together, these results demonstrate that the iDED (VIR41) inducible system inhibits plaque formation in healthy cells but not in cancer cells after treatment with Rimiducid.

TABLE E7

| Cell type | | Plaque formation | | | |
|---|---|---|---|---|---|
| Viral clone | Rimiducid | VIR13 | VIR40 | VIR41 | VIR42 |
| 4T1 Mouse mammary | − | + | + | + | + |
| Gland Carcinoma | + | + | − | + | + |
| DU-145 Human | − | + | + | + | + |
| Prostate Carcinoma | + | + | − | + | + |
| PC-3 Human | − | + | + | + | + |
| Prostate Carcinoma | + | + | − | + | + |
| M14 Human | − | + | + | + | + |
| Amelanotic Melanoma | + | + | − | + | + |
| HCT-116 Human | − | + | + | + | + |
| Colon Carcinoma | + | + | − | + | + |
| HCT-15 Human | − | + | + | + | + |
| Colon | + | + | − | + | + |
| Adenocarcinoma | | | | | |
| MC-38 Murine | − | + | + | + | + |
| Colon | + | + | − | + | + |
| Adenocarcinoma | | | | | |
| CT26.WT Mouse | − | + | + | + | + |
| Colon Carcinoma | + | + | − | + | + |

[1553] C. Apoptosis Mediated Inhibition of Virus Replication

[1554] The ability of the VIR13, VIR40, VIR41 and VIR42 recombinant viruses to inhibit virus replication after treatment with Rimiducid was evaluated in various healthy primary cells and cancer cells. Cells were infected with VIR13, VIR40, VIR41 and VIR42 at an MOI of 0.01 or 10 in duplicate in the presence of each of 10 nM Rimiducid and vehicle control. One day after infection, infected cells were harvested, and virus concentration was titrated in CV-1 cells.

[1555] When assessed in cultures of human primary bronchial/tracheal epithelial cells, human primary mammary epithelial cells, and murine primary mammary epithelial cells, Rimiducid treatment significantly inhibited virus replication in cells infected with VIR40 and VIR41, but not VIR13 and VIR42, indicating that iCasp9 and iDED, but not iFAS, inhibit viral replication in healthy cells (FIG. 14).

[1556] Rimiducid treatment significantly inhibited virus replication in breast, lung, melanoma and microsatellite instable (MSI) colorectal cancer cells infected with VIR40, but not with VIR41, VIR13 and VIR42, at both MOIs of 0.01 and 10, as demonstrated by BT-549 breast cancer cells (FIG. 15A), Hs578T breast cancer cells (FIG. 15B), MCF-7 and 4T1breast cancer cells (FIG. 15C), A549 and M14 lung and melanoma cancer cells (FIG. 15D), HCT-15 MSI colon cancer cells (FIG. 15E), HCT-116 MSI colon cancer cells (FIG. 15F), and KM12 MSI colon cancer cells (FIG. 15G). These results indicate that iCasp9 engineered into VIR40, but not iDED and iFAS, inhibits virus replication in breast, lung, melanoma and MSI colon cancer cells.

[1557] The ability of Rimiducid treatment to inhibit virus replication after infection of cells with VIR13, VIR40, VIR41 and VIR42 was also evaluated in MSS (Microsatellite Stable) colorectal cancer cells, a type of difficult to treat cancer that does not respond to checkpoint inhibitors. MSS colorectal cancer cell cultures were infected with VIR13, VIR40, VIR41 and VIR42 at MOIs of 0.01 or 10 in duplicate in the presence of each of 10 nM Rimiducid and vehicle control. One day after infection, infected cells were harvested and titrated in CV-1 cells. Rimiducid treatment significantly inhibited virus replication of MSS colorectal cells infected with VIR41 and VIR40, but not VIR13 and VIR42, as demonstrated by COL0205 cancer cells (FIG. 16A), HCC-2998 cancer cells (FIG. 16B), and HT-29 cancer cells (FIG. 16C). These results indicate that iCasp9 and iDED, but not iFAS, inhibits virus replication in MSS colorectal cancer cells after treatment with Rimiducid.

[1558] These results are consistent with a finding that MSS colon cancer cells respond differently than MSI colon cancer cells to infection. iDED induction with Rimiducid inhibits viral replication in MSS cancer cells but not in MSI cancer cells.

[1559] D. Inhibition of Virus-Mediated Cytotoxicity by Apoptosis Inducing VACI 7 Clones

[1560] The ability of Rimiducid treatment to inhibit virus-mediated cytotoxicity of different types of primary healthy and cancer cells after infection with VIR13, VIR40, VIR41 and VIR42 recombinant virus was evaluated.

[1561] Different types of cells were seeded into 96-well microplates (Corning, Kennebunk, ME) at a concentration of 3,000 cells per well and incubated overnight at 37° C. under 5% (v/v) CO₂. After incubation, cells were infected with VIR13, VIR40, VIR41 and VIR42 at MOIs of 0.01 and 0.1 in duplicate in the presence of 10 nM rimiducid and DMSO as a control. Cell viability was measured using the CellTiter 96® AQueous One Solution Cell Proliferation Assay (Promega, Madison, WI) according to manufacturer's instructions.

[1562] Rimiducid treatment significantly inhibited virus-mediated cytotoxicity after infection with VIR40 and VIR41, but not with VIR13 and VIR42, in human primary bronchial/tracheal epithelial cells (HBE, FIG. 17A), human primary mammary epithelial cells (HME, FIG. 17B), murine primary mammary epithelial cells (MME) and human primary colonic epithelial (HCE, FIG. 17C). These results indicate that iCasp9 and iDED, but not iFAS, inhibit virus-mediated cytotoxicity in healthy cells.

[1563] Rimiducid treatment significantly inhibited virus-mediated cytotoxicity in breast, prostate, lung cancer and melanoma, and Microsatellite Instable (MSI) colon cancer cells infected with VIR40, but not with VIR41, VIR13 and VIR42, as demonstrated by BT-549 breast cancer cells (FIG. 18A), Hs578T breast cancer cells (FIG. 18B), 4T1 breast cancer cells (FIG. 18C), DU-145 prostate cancer cells (FIG. 18D), PC-3 prostate cancer cells (FIG. 18E), A549 lung and melanoma cancer cells (FIG. 18F), M14 lung and melanoma cancer cells (FIG. 18G), COLO 320 DM and HCT-15 MSI colon cancer cells (FIG. 18H), HCT-116 and KM12 MSI colon cancer cells (FIG. 18I), KM12 MSI colon cancer cells (FIG. 18J) and SW48 MSI colon cancer cells (FIG. 18K). These results indicate that iCasp9, but not iDED and iFAS, inhibits virus-mediated cytotoxicity in the infected cancer cells.

[1564] The ability of Rimiducid treatment to inhibit virus-mediated cytotoxicity after infection of MSS colorectal cancer cells with VIR13, VIR40, VIR41 and VIR42 was also evaluated. MSS colorectal cancer cell lines infected with VIR41 and VIR42 at MOIs of 0.01 and 0.1 showed a significantly lower percentage of survival when compared to cultures infected with VIR13 and VIR42 or the mock control, as demonstrated in COL0205 MSS colon cancer cells (FIG. 19A), HCC-2998 colon cancer cells (FIG. 19B), HT-29 cells (FIG. 19C), LS123 cells (FIG. 19D), LS174T cells (FIG. 19E), SW620 cells (FIG. 19F) and WiDR cells (FIG. 19G). These results indicate that iDED and iFAS, but not iCasp9, enhance virus-mediated cytotoxicity in MSS colon cancer cells.

### Example 7: Assessment of VIR13 Tumor Growth Inhibition in Mice

[1565] The oncolytic activity of the exemplary recombinant strain VIR13 was assessed by monitoring in vivo tumor growth following a single dose of VIR13 injected intravenously in an SL-4 mice model of colon adenocarcinoma. As shown in Table E5 and FIG. 13, VIR13 is derived from parental VIP02 but is deleted in the TK (J2R) gene and is not engineered with any further heterologous protein (i.e., heterologous gene product).

[1566] Approximately 5×10⁵ SL-4 cells in 100 μL of PBS were implanted into the right flank of female C57BL/6 mice, 4-6 weeks old. SL-4 cells are a C57BL6 murine colon adenocarcinoma cell line and were obtained from AntiCancer, Inc. (San Diego, CA). For all tumor models, virus treatment was initiated when tumor volumes were about 60 mm³. Five mice per group were treated once with an intravenous dose of 1×10⁸ PFU of VIR13 or vehicle as control. Tumor volume and body weight were measured twice per week using a Vernier caliper and an electronic scale, respectively. Tumor volume was estimated by measuring the perpendicular minor dimension (W) and major dimension (L). Approximate tumor volume was calculated with the formula (W²×L)/2. Mice were euthanized when tumors reached termination criteria (tumor volume>=3000 mm³ and/or body weight loss>=20%).

[1567] As shown in FIG. 20, treatment of mice with VIR13 significantly reduced tumor progression. Data showed that three out of five (60%) of mice infected with VIR13 were cured 19 days post injection while none of the five mice treated with a control solution showed signs tumor growth inhibition 19 days post treatment.

### Example 8: Generation and Assessment of Recombinant VIP02-Based Viral Clones Compared to VIR13

[1568] A. Generation of Recombinant Vaccinia Viruses

[1569] Recombinant VACV strains with immune modulating activity, were generated by insertion of mouse interferon regulatory factor 3 (mIRF3) under the control of the VACV SSE promoter into the endogenous viral J2R gene or by the disruption of J2R and B2R in the viral genome. The recombinant strains were generated by homologous recombination of a transfer vector and the parental genome.

[1570] The transfer vectors were generated as follows:

[1571] Plasmid pITK-SSE-mIRF3. The mouse IRF3 cDNA under the control of the VACV SSE promoter was synthesized by IDT (Coralville, IA). The synthesized fragment was digested with PstI and SacI and cloned into the same-cut plasmid pITK-SSE described in Example 3 to yield pITK-SSE-mIRF3. The DNA sequence of SSE-mIRF3 was confirmed by DNA sequencing.

[1572] Plasmid pITK-mH5-mIRF3. The mouse IRF3 cDNA under the control of the mH5 promoter was synthesized by IDT (Coralville, IA). The synthesized fragment was digested with PstI and SacI and cloned into the same-cut plasmid pITK-mH5 described in Example 3 to yield pITK-mH5-mIRF3. The DNA sequence of mH5-mIRF3 was confirmed by DNA sequencing.

[1573] Plasmid pIB2R. The left and right flanking sequences of the B2R gene of VACV IHD-J were PCR-amplified from VACV IHD-J genomic DNA using the primers: 5′-GCTGAATTCGAGATATTAAAGCGAGTAATATAG-3′ (SEQ ID NO: 94) and 5′-AGGAGCTCTCGAGCGGCCGCTGCAGGTACCAGGAAAGGCATGAAGATTCTCGTCG-3′ (SEQ ID NO: 95) (left flank), 5′-GGTACCTGCAGCGGCCGCTCGAGAGCTCCTGGTAAAAGTTAAACTTGGGGAGAATG-3′ (SEQ ID NO: 96) and 5′-ACGAAGCTTGGAAGCTGCTGCCGTATACGTGTTCTTAG-3′ (SEQ ID NO: 97) (right flank). The two fragments were joined together using the method of gene splicing by overlapping extension as described in Horton et al., Methods Enzymol., 1993; 217:270-9 hereby incorporated in its entirety. The resulting fragment was digested with EcoRI and HindIII and cloned into the same-cut plasmid pVM-1 to yield pIB2R. The flanking sequences of B2R were confirmed by DNA sequencing.

[1574] For VIR94, parental virus VIR13 was generated by infecting CV-1 cells with VIP02 at an MOI of 0.1 for 1 hour and then transfected with pITK transfer vector described in Example 3, to yield a parental recombinant virus in which the J2R(TK) gene was disrupted. To generate the recombinant VIR94, CV-1 cells were infected with the parental virus VIR13 at an MOI of 0.1 for 1 hour and then transfected with the pIB2R transfer vector. Recombinant vaccinia strain VIR93 and VIR 96 were generated by infecting CV-1 cells with the parental strain VIP02 at an MOI of 0.1 for 1 hour and then transfected with the pITK-SSE-mIRF3 or pITK-mH5-mIRF3 transfer vector respectively, as described in Example 3.

[1575] Table E8 summarizes the generated recombinant VACV strains, including the parental virus and transfer vectors used in their generation.

TABLE E8

| Recombinant | | | |
|---|---|---|---|
| VACVs | Parent Virus | Transfer Vector | Genotype |
| VIR13 | VIP02 | pITK | J2R(TK) is disrupted |
| (SEQ ID NO: 4) | (SEQ ID NO: 1) | | |
| VIR93 | VIP02 | pITK-SSE-mIRF3 | SSE-mIRF3 inserted at |
| (SEQ ID NO: 49) | (SEQ ID NO: 1) | | J2R |
| VIR94 | VIR13 | pIB2R | J2R and B2R are |
| (SEQ ID NO: 48) | (SEQ ID NO: 4) | | disrupted |
| VIR96 | VIP02 | pITK-mH5-mIRF3 | mH5-mIRF3 inserted at |
| (SEQ ID NO: 50) | (SEQ ID NO: 1) | | J2R |

[1576] B. Assessment of Modified Recombinant Vaccinia Virus Compared to VIR13

[1577] The tumor inhibitory activity of VIR41, VIR86, VIR93, VIR94, and VIR96 were evaluated in vivo using the SL-4 GFP mouse colon adenocarcinoma model. Female C57BL/6 mice that were 5-6 weeks old were implanted with 5×10⁵ SL-4 GFP cells in 100 μL of PBS in the right flank of the mice. In this experiment, mice were treated once with an intravenous dose of 1×10⁸ PFU of each indicated virus. Tumor volume and body weight were measured twice per week using vernier calipers and an electronic scale, respectively. Tumor volume was estimated by measuring the perpendicular minor dimension (W) and major dimension (L). Approximate tumor volume was calculated with the formula (W²×L)/2.

[1578] As shown in FIG. 21A-21E, mice treated with VIR13 showed a reduction in tumor volume when compared to the vehicle treated controls. Moreover, mice treated with VIR41, VIR86, VIR93, VIR94, or VIR 96 showed improved efficacy at reducing tumor volume by 3 to 7 days after treatment when compared to VIR13 and the vehicle treated controls, indicating that the introduction IRF3 and the disruption of B2R lead to increased anti-tumor activity of the recombinant virus. Further, as shown in FIG. 21F. there was no drastic loss in body weight between any of the viral treated mice in comparison to the vehicle treated control, indicating the enhanced antitumor activity of the recombinant vaccinia viruses do not induce toxicity.

### Example 9: Generation and Assessment of Recombinant VIP02 Based Viral Clones Engineered with Further Immune Modulating Genes

[1579] A. Generation of Recombinant Vaccinia Viruses Engineered with Immune Modulating Genes

[1580] Recombinant VACV strains with immune genes, were generated by insertion of immune genes under various promoters. These include mouse interferon regulatory factor 3 (mIRF3) under the control of the VACV SSE promoter into the endogenous viral J2R gene, insertion of MDNA11 under the control of 11K promoter inserted into A56R gene, insertion of mCXCL9 under the mH5 promoter inserted at A56R, and/or insertion of mscIL-12 under the 11K promoter inserted at A56R. The recombinant strains were generated by homologous recombination of a transfer vector and the parental genome.

[1581] The transfer vectors were generated as follows:

[1582] Plasmid pIB2R. The left and right flanking sequences of the B2R gene of VACV IHD-J were PCR-amplified from VACV IHD-J genomic DNA using the primers: 5′-GCTGAATTCGAGATATTAAAGCGAGTAATATAG-3′(SEQ ID NO: 94) and 5′-AGGAGCTCTCGAGCGGCCGCTGCAGGTACCAGGAAAGGCATGAAGATTCTCGTCG-3′ (SEQ ID NO: 95) (left flank), 5′-GGTACCTGCAGCGGCCGCTCGAGAGCTCCTGGTAAAAGTTAAACTTGGGGAGAATG-3′ (SEQ ID NO: 96) and 5′-ACGAAGCTTGGAAGCTGCTGCCGTATACGTGTTCTTAG-3′ (SEQ ID NO: 97) (right flank). The two fragments were joined together using the method of gene splicing by overlapping extension as described in Horton et al., Methods Enzymol., 1993; 217:270-9 hereby incorporated in its entirety. The resulting fragment was digested with EcoRI and HindIII and cloned into the same-cut plasmid pVM-1 to yield pIB2R. The flanking sequences of B2R were confirmed by DNA sequencing.

[1583] pIB2R-SSE-mIRF3. pITK-SSE-mIRF3 was digested with KpnI and SacI. The fragment containing SSE-mIRF3 was gel-purified and cloned into the same-cut plasmid pIB2R to yield pIB2R-SSE-mIRF3. The DNA sequence of SSE-mIRF3 was confirmed by DNA sequencing.

[1584] pIA56R-11K-MDNA11. A long-acting IL-2 superkine (MDNA11) (Merchant R, et. al., Jounral for immunotherapy of cancer. 2022, 10(1), hereby incorporated in its entirety) under the control of the VACV 11K promoter was synthesized by IDT (Coralville, IA). The synthesized fragment was digested with KpnI and SacI and cloned into the same-cut plasmid pIA56R to yield pIA56R-11K-MDNA11. The DNA sequence of the synthesized 11K-MDNA11 was confirmed by DNA sequencing.

[1585] pIA56R-mH5-mCXCL9-11K-mscIL-12. pIA56R-mH5-hFGL1 was digested with PstI and SacI. The fragment containing the backbone plasmid and the mH5 promoter (pIA56R-mH5) was gel-purified. The DNA fragment mCXCL9-11K-mscIL-12 containing mouse CXCL9 (mCXCL9) and mouse single chain IL-12 (mscIL-12) (Lieschke G J, et. al., Nature biotechnology. 1997, 15(1):35-40, hereby incorporated in its entirety) under the control of the VACV 11K promoter was synthesized by IDT (Coralville, IA) and digested with PstI and SacI, then cloned into the same-cut plasmid pIA56R-mH5 to yield pIA56R-mH5-mCXCL9-11K-mscIL-12. The DNA sequence of mCXCL9-11K-mscIL-12 was confirmed by DNA sequencing.

[1586] pIA56R-11K-MDNA11 T. The synthesized 11K-MDNA11 fragment was mutated using the method of gene splicing by overlapping extension to introduce a “glutamine-126 to threonine” mutation as described in Mo F, et. al. Nature 2021, 597(7877):544-8, hereby incorporated in its entirety. The resulting fragment is called 11K-MDNA11T, which was then digested with KpnI and SacI and cloned into the same-cut plasmid pIA56R to yield pIA56R-11K-MDNA11T. The DNA sequence of the 11K-MDNA11T was confirmed by DNA sequencing.

[1587] Plasmid pITK-SSE-mIRF3. The mouse IRF3 cDNA under the control of the VACV SSE promoter was synthesized by IDT (Coralville, IA). The synthesized fragment was digested with PstI and SacI and cloned into the same-cut plasmid pITK-SSE described in Example 3 to yield pITK-SSE-mIRF3. The DNA sequence of SSE-mIRF3 was confirmed by DNA sequencing.

[1588] pITK-SSE-hIRF3. pITK-SSE-hFGL1tm was digested with PstI and SacI. The fragment containing the backbone plasmid and the SSE promoter (pITK-SSE) was gel-purified. The human IRF3 (Interferon Regulatory Factor 3) cDNA was synthesized by IDT (Coralville, IA) and digested with PstI and SacI, then cloned into the same-cut plasmid pITK-SSE to yield pITK-SSE-hIRF3. The DNA sequence of SSE-hIRF3 was confirmed by DNA sequencing.

[1589] Plasmid pIA56R-mH5-hCXCL9-11k-hscIL-12. pIA56R-mH5-hFGL1 was digested with PstI and SacI. The fragment containing the backbone plasmid and the mH5 promoter (pIA56R-mH5) was gel-purified. The DNA fragment hCXCL9-11K-hscIL-12 containing human CXCL9 (hCXCL9) and human single chain IL-12 (hscIL-12) (Lieschke G J, et. al., Nature biotechnology. 1997, 15(1):35-40, hereby incorporated in its entirety) under the control of the VACV 11K promoter was synthesized by IDT (Coralville, IA) and digested with PstI and SacI, then cloned into the same-cut plasmid pIA56R-mH5 to yield pIA56R-mH5-hCXCL9-11K-hscIL-12. The DNA sequence of hCXCL9-11K-hscIL-12 was confirmed by DNA sequencing.

[1590] For generation of the recombinant vaccinia viruses listed in Table E9, CV-1 cells were infected with parental viruses at an MOI of 0.1 for 1 hour and then transfected with their respective transfer vectors (see Table E9) by use of jetPRIME in vitro DNA and siRNA transfection reagent (Polyplys-transfection Inc, New Your, NY). Two days post infection, infected/transfected cells were harvested and recombinant viruses were selected and plaque purification was carried out as described in Falkner F G, et. Al., J. Virol. 1990, 64(6):3108-11, hereby incorporated in its entirety.

[1591] Table E9 summarizes the generated recombinant VACV strains, including the parental virus and transfer vectors used in their generation.

TABLE E9

| Recombinant | | | |
|---|---|---|---|
| VACVs | Parent Virus | Transfer Vector | Genotype |
| VIR94 | VIR13 | pIB2R | J2R and B2R are |
| (SEQ ID NO: 48) | (SEQ ID NO: 4) | | disrupted |
| VIR100 | VIR93 | pIB2R | B2R is disrupted; SSE- |
| (SEQ ID NO: 80) | (SEQ ID NO: 49) | | mIRF3 inserted at J2R |
| VIR103 | VIR86 | pIB2R-SSE-mIRF3 | SSE-hmLIGHT inserted |
| (SEQ ID NO: 82) | (SEQ ID NO: 47) | | at A35R; mH5-anti- |
| | | | VEGF-anti-Ang2-SEL- |
| | | | VK inserted at J2R; |
| | | | SSE-mIRF3 inserted at |
| | | | B2R |
| VIR105 | VIR100 | pIA56R-11K-MDNA11 | B2R is disrupted; SSE- |
| (SEQ ID NO: 84) | (SEQ ID NO: 80) | | mIRF3 inserted at J2R; |
| | | | 11K-MDNA11 inserted |
| | | | at A56R |
| VIR106 | VIR100 | pIA56R-mH5-mCXCL9-11K- | B2R is disrupted; SSE- |
| (SEQ ID NO: 85) | (SEQ ID NO: 80) | mscIL-12 | mIRF3 inserted at J2R; |
| | | | mH5-mCXCL9-11K- |
| | | | mscIL-12 inserted at |
| | | | A56R |
| VIR109 | VIR102 | pIA56R-mH5-mCXCL9-11K- | SSE-iDED inserted at |
| (SEQ ID NO: 86) | (SEQ ID NO: 81) | mscIL-12 | J2R; SSE-mIRF3 |
| | | | inserted at B2R; mH5- |
| | | | mCXCL9-11K-mscIL- |
| | | | 12 inserted at A56R |
| VIR111 | VIR103 | pIA56R-11K-MDNA11 | SSE-hmLIGHT inserted |
| (SEQ ID NO: 87) | (SEQ ID NO: 82) | | at A35R; mH5-anti- |
| | | | VEGF-anti-Ang2-SEL- |
| | | | VK inserted at J2R; |
| | | | SSE-mIRF3 inserted at |
| | | | B2R; 11K-MDNA11 |
| | | | inserted at A56R |
| VIR113 | VIR103 | pIA56R-11K-MDNA11T | SSE-hmLIGHT inserted |
| (SEQ ID NO: 88) | (SEQ ID NO: 82) | | at A35R; mH5-anti- |
| | | | VEGF-anti-Ang2-SEL- |
| | | | VK inserted at J2R; |
| | | | SSE-mIRF3 inserted at |
| | | | B2R; 11K-MDNA11T |
| | | | inserted at A56R |
| VIR114 | VIR104 | pIA56R-11K-MDNA11 | F14.5L fused with |
| (SEQ ID NO: 89) | (SEQ ID NO: 83) | | CRASP-2; CPXV012, |
| | | | 018 and 203 inserted at |
| | | | J2R; SSE-mIRF3 |
| | | | inserted at B2R; 11K- |
| | | | MDNA11 inserted at |
| | | | A56R |
| VIR115 | VIR104 | pIA56R-mH5-mCXCL9-11K- | F14.5L fused with |
| (SEQ ID NO: 90) | (SEQ ID NO: 83) | mscIL-12 | CRASP-2; CPXV012, |
| | | | 018 and 203 inserted at |
| | | | J2R; SSE-mIRF3 |
| | | | inserted at B2R; mH5- |
| | | | mCXCL9-11K-mscIL- |
| | | | 12 inserted at A56R |
| VIR123 | VIR94 | pITK-SSE-hIRF3 | B2R are disrupted; SSE- |
| (SEQ ID NO: 91) | (SEQ ID NO: 48) | | hIRF3 inserted at J2R |
| VIR127 | VIR123 | pIA56R-mH5-hCXCL9-11K- | B2R is disrupted; SSE- |
| (SEQ ID NO: 92) | (SEQ ID NO: 91) | hscIL-12 | hIRF3 inserted at J2R; |
| | | | mH5-hCXCL9-11K- |
| | | | hscIL-12 inserted at |
| | | | A56R |
| VIR128 | VIP02 | pITK-SSE-hIRF3 | SSE-hIRF3 inserted at |
| (SEQ ID NO: 93) | (SEQ ID NO: 1) | | J2R |

[1592] B. Assessment of Recombinant Vaccinia Viruses Engineered with Immune Genes with SL-4 Mouse Colon Adenocarcinoma Model

[1593] The tumor inhibitory activity of VIR 100, VIR10³, VIR105, VIR106, VIR109, VIR113, VIR114, and VIR115 were evaluated in vivo using the SL-4 GFP mouse colon adenocarcinoma model. Female C57BL/6 mice that were 5-6 weeks old were implanted with 5×10⁵ SL-4 GFP cells in 100 μL of PBS in the right flank of the mice. In this experiment, mice were treated once with an intravenous dose of 1×10⁸ PFU of each indicated virus. Tumor volume and body weight were measured twice per week using vernier calipers and an electronic scale, respectively. Tumor volume was estimated by measuring the perpendicular minor dimension (W) and major dimension (L). Approximate tumor volume was calculated with the formula (W²×L)/2.

[1594] As shown in FIG. 22A-2211, mice treated with VIR94 appeared to have mild reduction in tumor volume when compared to the vehicle treated controls. VIR100 and VIR10³, as shown in FIG. 22A and FIG. 22B respectively, had a mild reduction in tumor volume compared to VIR94 and vehicle control. As shown in FIG. 22C-22H for VIR105, VIR106, VIR109, VIR113, VIR114, and VIR115, respectively, all had statistically significant reduction in tumor size when compared to both vehicle treated control mice and VIR94 treated mice. (*=p<0.05; **=p<0.01; ***=p<0.001). In addition, VIR106, and VIR115 were close to eradicating the tumor. These results indicate that recombinant vaccinia viruses engineered to contain immune proteins, such as IL-12, CXCL9, MDNA11 and MDNA11T, have enhanced and potent anti-tumor properties.

[1595] C. Comparison of Recombinant Vaccinia Viruses Engineered with MDNA11 or Mutant MDNA11T

[1596] MDNA11T (SEQ ID NO: 98) is a mutant MDNA11, which is a long-acting IL-2 superkine, to increase the immune stimulating properties of MDNA11. To test whether the MDNA11T mutant has increased efficacy at decreasing tumor mass compared to parental virus or recombinant virus with MDNA11, VIR113 was evaluated in vivo using the SL-4 GFP mouse colon adenocarcinoma model compared to VIR111, which contained MDNA11, and VIR10³, the parental strain to both VIR111 and VIR113. Female C57BL/6 mice that were 5-6 weeks old were implanted with 5×10⁵ SL-4 GFP cells in 100 μL of PBS in the right flank of the mice. In this experiment, mice were treated once with an intravenous dose of 1×10⁸ PFU of each indicated virus. Tumor volume and body weight were measured twice per week using vernier calipers and an electronic scale, respectively. Tumor volume was estimated by measuring the perpendicular minor dimension (W) and major dimension (L). Approximate tumor volume was calculated with the formula (W²×L)/2.

[1597] As shown in FIG. 23A, VIR111 did not decrease tumor volume compared to parental VIR10³. VIR113 had a significant decrease in tumor volume compared to both VIR 111 and VIR10³, indicating that viruses encoding MDNA11T have increased anti-tumor potency compared to viruses containing the unmutated MDNA11 and to recombinant viruses that do not contain either MDNA11 or MDNA11T. FIG. 23B, shows a schematic for how both MDNA11 and MDNA11T are created from wild-type human IL-2 (wt hIL-2).

[1598] D. Assessment of Recombinant Vaccinia Viruses Engineered with Immune Genes with Lewis Lung Carcinoma Mouse Model

[1599] The three strains with the largest reduction in tumor volume in the SL-4 mouse model (VIR106, VIR113, and VIR115) were evaluated in vivo using a Lewis lung carcinoma mouse cancer model to evaluate their efficacy against other cancers. Female C57BL/6 mice that were 6-7 weeks old were implanted with 1×10⁶ LLC1 cells in 100 μL of PBS in the right flank of the mice. In this experiment, mice were treated once with an intravenous dose of 1×10⁸ PFU of each indicated virus. Tumor volume and body weight were measured twice per week using vernier calipers and an electronic scale, respectively. Tumor volume was estimated by measuring the perpendicular minor dimension (W) and major dimension (L). Approximate tumor volume was calculated with the formula (W²×L)/2.

[1600] As shown in FIG. 24A, VIR106 cured 100 percent of the tumors, within 6 days after treatment, with no detectable tumor volume compared to the vehicle treated control where the tumor continued to grow over the entire test period. There was no detectable difference in weight between VIR106 and vehicle treated control indicating the recombinant vaccinia virus was not toxic (FIG. 24B). FIG. 24C shows the results where VIR106 treated mice did not have detectable tumors 8 days after treatment. As shown in FIG. 24D, VIR113 showed similar results with mice being cured of Lewis lung carcinoma, except one mouse which relapsed. VIR113 also showed no toxicity in body weight (FIG. 24E). VIR115 resulted in a statistically significant reduction in tumor volume, as shown in FIG. 23F, while not causing toxicity seen in body weight (FIG. 24G). VIR115 also cured 50% of Lewis lung carcinoma mice in the study (data not shown). These results demonstrate that the recombinant vaccinia viruses engineered with Immune genes are effective against multiple cancer models.

[1601] E. Assessment of Recombinant Vaccinia Viruses Engineered with Immune Genes with Melanoma Mouse Model

[1602] The three strains, VIR106, VIR113, and VIR115, were further evaluated in vivo using a melanoma mouse cancer model to evaluate their efficacy against other cancers. Male C57BL/6 mice that were 5-6 weeks old were implanted with 1×10⁶ B16-F10 RFP cells in 100 μL of PBS in the right flank of the mice. In this experiment, mice were treated once with an intravenous dose of 1×10⁸ PFU of each indicated virus. Tumor volume and body weight were measured twice per week using vernier calipers and an electronic scale, respectively. Tumor volume was estimated by measuring the perpendicular minor dimension (W) and major dimension (L). Approximate tumor volume was calculated with the formula (W²×L)/2.

[1603] FIG. 25A shows that VIR106 significantly reduced tumor volume compared to vehicle treated control mice. VIR106 protected mice and lead to a 100 percent survival rate over the test period (24 days) compared to vehicle treated mice which had all died by 10 days post treatment as shown in FIG. 25B. Similar results were obtained for VIR113, with reduced tumor volume compared to vehicle treated control as shown in FIG. 25C, and leading to 100% survival over the test period (24 days post treatment) compared to the vehicle treated mice which all died by 10 days post treatment as shown in FIG. 25D. VIR115 was also effective at statistically significantly reducing tumor volume compared to vehicle treated control mice as shown in FIG. 25E, and leading to 100% survival over the test period (24 days post treatment) compared to the vehicle treated mice which all died by 10 days post treatment as shown in FIG. 25F.

[1604] F. Quantification of Immune Proteins after Infection with Recombinant Vaccinia Virus

[1605] B16-F10 and Hela S3 cancer cells were infected with various recombinant vaccinia viruses at an MOI of 10 each. Four hours after infection, cells were harvested by low-speed centrifugation and lysed using RIPA lysis buffer (VWR, Solon, OH). A Halt protease and phosphatase inhibitor cocktail (Thermo Scientific, Rockford, IL) was added freshly to the lysis buffer. Protein amounts were determined using RC DC Protein Quantification Kit (Bio-Rad Laboratories, Hercules, CA). Normalized protein amounts were subjected to an SDS-PAGE (Bio-Rad Laboratories, Hercules, CA) and transferred onto a PVDF membrane for Western blotting, which was blotted with primary antibodies followed by horseradish peroxidase (HRP)-conjugated secondary antibodies. Proteins were visualized with a chemiluminescent detection kit (ClarityMax Western ECL Substrate, Bio-Rad Laboratories, Hercules, CA) and Azure Biosystems c300 (Azure Biosystems, Dublin, CA). Antibodies against phospho-IRF3 (1:1,000) and total IRF3 as well as HRP-linked anti-rabbit IgG (1:1000) were from Cell Signaling Technology (Danvers, MA). Anti-beta-actin antibody (1:1,000) was from Novus Biologicals (Centennial, CO). Heat inactivated VIR13 (iVIR13) was used as a positive control for the stimulation of phosphor-IRF3 and beta actin was used as a loading control.

[1606] As shown in FIG. 26A, expression of exogeneous mIRF3 (VIR93) resulted in a slight increase in the level of phospho-IRF3 while disruption of the B2R gene (VIR94) led to a significant increase in the level of phospho-IRF3 compared to VIR13, indicating activation of the IRF3 pathway. Combination of expression of exogeneous mIRF3 and disruption of B2R gene (VIR100, VIR106, VIR113 and VIR115) resulted in the highest level of mouse phospho-IRF3, even higher than the positive control iVIR13. Interestingly, hIRF3 (VIR123, and VIR127, both of which had the hIRF3 gene) can be phosphorated in mouse cancer cells. As shown in FIG. 26B, similar results are obtained in human Hela S3 cells. Similarly, combination of expression of exogeneous hIRF3 and disruption of the B2R gene (VIR123 and VIR127) resulted in the highest level of human phospho-IRF3, even higher than the positive control iVIR13. Disruption of B2R (VIR94) resulted in higher level of human phospho-IRF3 than the expression of exogeneous human IRF3 (VIR128). Further, mIRF3 (VIR100, VIR106, VIR113 and VIR115) can also be phosphorated in human cancer cells.

[1607] To further quantify induction of the interferon pathways by recombinant vaccinia viruses, B16-F10 and Hela S3 cells were infected with each virus at an MOI of 10. Twenty-four hours after infection, supernatants were harvested. Mouse and human interferon-beta was quantified using Verikine-HS Mouse Interferon Beta Serum ELISA Kit and Verikine-HS Human Interferon Beta Serum ELISA Kit (PBL Assay Science, Piscataway NJ), respectively. Mouse and human CXCL9 was measured using Mouse CXCL9/MIG Duoset ELISA and Human CXCL9/MIG Duoset ELISA (Biotechne/R & D Systems, Minneapolis, MN), respectively. HEK-Blue IL-12 cells (InvivoGen, San Diego, CA) were used to quantify both human and mouse bioactive IL-12.

[1608] Table E10 shows the results for interferon-beta (IFN-beta) production. VIR100, VIR106, VIR113, VIR115, VIR128, VIR123, and VIR127 all had increased levels of human IFN-beta and all of those viruses had increased mouse IFN-beta, except VIR128 when compared to mock treated cells, consistent with activation of the IRF3 pathway as shown in FIG. 26. VIR123 and VIR127, which encode human IRF3, had increased human IFN-beta production compared to recombinant viruses encoding mouse IRF3.

TABLE E10

| | B16-F10 | Hela S3 |
|---|---|---|
| Infection | mouse IFN-beta (pg/ml) | human IFN-beta (pg/ml) |
| Mock | BLOD* | BLOD |
| iVIR13 | 5881.81 | 1428.25 |
| VIR13 | BLOD | BLOD |
| VIR93 | BLOD | BLOD |
| VIR94 | BLOD | BLOD |
| VIR100 | 1.40 | 2.23 |
| VIR106 | 1.28 | 1.97 |
| VIR113 | 1.51 | 5.44 |
| VIR115 | 2.39 | 3.17 |
| VIR128 | BLOD | 6.19 |
| VIR123 | 0.88 | 85.97 |
| VIR127 | 0.68 | 51.56 |

*BLOD: Below the limit of detection (0.94 pg/ml for mIFN-beta; 1.2 pg/ml for hIFN-beta).

[1609] Table E11 shows the results for CXCL9 ELISAs and IL-12 bioassay quantifying protein production in both B16-F10 and Hela S3-12 cells. The viruses that encoded the mouse CXCL9 gene (VIR106 and VIR115) had detectable levels of mouse CXCL9, indicating that the virus was effective at delivering the gene and driving expression. Similar results were obtained for VIR127, the only recombinant virus to express human CXCL9 and the only recombinant virus to have detectable levels of human CXCL9. IL-12 production was detected in VIR106, VIR115, and VIR127 for both human and mouse cells, which were the recombinant viruses that encode either human or mouse IL-12. iVIR 13 was able to induce low levels of IL-12 in human Hela S3 cells, but not in mouse B16-F10 cells. Interestingly, VIR113, which does not carry the gene for CXCL9 or IL-12, but does encode MDNA11T and hmLIGHT, was able to induce the expression of mCXCL9 in B16-F10 cells and IL-12 in both B16-F10 and Hela S3 cells, indicating MDNA11T and/or hmLIGHT is sufficient to drive activation of these pathways.

TABLE E11

| | CXCL9 (ng/ml) | | | |
|---|---|---|---|---|
| | B16-F10 | Hela S3 | IL-12 (ng/ml) | |
| Infection | mouse CXCL9 | human CXCL9 | B16-F10 | Hela S3 |
| Mock | BLOD* | BLOD | BLOD | BLOD |
| iVIR13 | BLOD | BLOD | BLOD | 3.64 |
| VIR13 | BLOD | BLOD | BLOD | BLOD |
| VIR93 | BLOD | BLOD | BLOD | BLOD |
| VIR94 | BLOD | BLOD | BLOD | BLOD |
| VIR100 | BLOD | BLOD | BLOD | BLOD |
| VIR106 | 664.42 | BLOD | 2790.41 | 3329.36 |
| VIR113 | 381.39 | BLOD | 2545.02 | 1811.06 |
| VIR115 | 500.09 | BLOD | 3069.89 | 964.81 |
| VIR128 | BLOD | BLOD | BLOD | BLOD |
| VIR123 | BLOD | BLOD | BLOD | BLOD |
| VIR127 | BLOD | 7058.41 | 4519.37 | 1442.08 |

*BLOD: Below the limit of detection (15.6 pg/ml for mCXCL9; 62.5 pg/ml for hCXCL9; 1.56 ng/ml for IL-12).

[1610] The present invention is not intended to be limited in scope to the particular disclosed embodiments, which are provided, for example, to illustrate various aspects of the invention. Various modifications to the compositions and methods described will become apparent from the description and teachings herein. Such variations may be practiced without departing from the true scope and spirit of the disclosure and are intended to fall within the scope of the present disclosure.

The application's sequence listing, which the Patent Office published only in electronic form, follows.

SEQUENCE LISTING (106 sequences)

SEQ ID NO: 1 - DNA, 195574 bp, Vaccinia virus
  source 1..195574: mol_type = genomic DNA
  misc_feature 1..195574: note = VIP02
atcaaagagagaaagagaataaaaatatttttgtaaaactttttttatgagaccatcaaagagagaaagagaataaaaatatttttgtaaaactttttttatgagaccatcagaaagaggtttaatatttttgtgataccctgaaaggaaataggaataggaataggaatagtgtcataatcgtatcacactattgagacagaaaaagaagaagtcgcgagaggtaactttttgtgaatgtagttaagaacatttttgttttgcaaaccggaatatagtgtccggtacacttttttaattcgtggtgtgcctgaatcgttcgattaaccctactcatccaatttcagatgaatagagttatcgattcagacacacgctttgagttttgttgaatcgatgagtgaagtatcatcggttgcaccttcagatgccgatccgtcgacatacttgaatccatccttgacctcaagttcagatgattccttgcacatgtctccgatacgaacgctaaactctagattcttgacacattttgtatcgacgatcgttgaaccgatgatatcttcgtaactcactttcttatgagagatgttagacccgagtactggatgggtcttgatgtcgctgtctttctcttcttcgctacatctgatgtcgatagacacctcacagtctttgatcatagcaagagcttcttcatgagtgatcgcgggagagtccttaccttgtcctggggacacgctggacaatctagcattcactgtgtttccatcagcggattctgagatggatttaatctgaggacatttggtgaatccaaagttcattctcagacctccaccgatgatggagtaataagtggtaggaggatctacatcctcgactgatgtggaatcatcttctgattccacctcgggatttggatctgactcggactctgtaatttccgttacggattggcaaatcttatcattggtcggtgtttggtcttgctttgtgactttgataataacatcgattcccatatgatgtttgttttcttcttccgtacacgaggatgaggatgaggatgattgctgaagactggcaggcacatgcatgccaggacgatatattgtttcataattgctattgattgagtactgttctttatgattctacttccttaccatgcaataaattagaatatattttctacttttacgagaaattaattattgtatttattatttatgggtgaaaaacttactataaaaagcgggtgggtttggaattagtgatcagtttatgtatatcgcaactaccgggcatatggctatcgacatcgagaacattacccacatgataagagattgtatcagtttcgtagtcttgagtattggtattactatatagtatatagatgtcgacgctagatatacagtcgcccactagagttactgtctccgaatgcggcatgataccgtcatcattctttgctttcgttaactgtttggaggaagaatctttgttattgcatttaatctcgaaattcagagtgcacacctttctcctgtaaagaaacctgaagttgctaccttattaaggacagagaagtattcctcacgaaatacgggattacagtctttatgattcatagtaatagttagttccgacgttgagatggattcactgagaccggtagtggtcgtccgagtacacgacgtgtcgttgacgggatacagattaatttccacatcgatatagttaaaggtattactgggtacgggttcgcatttatctgcggaagagacggtgtgagaatatgttccgagaccacacggagaacagatgacgtctccggatactccgtatcctattccacattttgtttgggaaacacatgccttgcatccggatgatcctttgagaagacaataatatccgggagagcattcacagattctattgtgagtcgtgttacacgatcgcgtcttccgttacaacttagacaagcgggtaaatgattattgcgagatgtgaaggtacccgaaccacagggtgtacatcgtgtgttagtcttgctatcgcataatctggaagcgtatgttcccggacacaaattatggcgtttgtattcgttgtctttacactttccatcggatggtgcatgcggtgctatatctcttccgtttattattatacatgagagaaacaatatatacgagtataatacggacttcatgatttaataatgtagtaatcgtcgtcttgttcctgtttcctacttctccaatcatatagatattttctttctatcatggataatatttgtaatggttctttccgtacaacatactgtttagatgatattgcgcataatttccggaggcaaatacgatagtctagattgaccgatggtagactctaatttattgagtgctttgtcgacgagtttacttttatgctccatcgatagatggcactgttctatgagatcgtcgtacatgggaaatgaaatgtgtctgtccgaatgtatggctttaagatagctgtgataccgtatacaggtcggtgtcggagattcgaatctctttaaggcgacttatgtcacgatgatggaatctatcttatcgaatgatatatttttcataaatacacttttatagtcctcgtttaaacagaatttactatgtagttccgcgaatgactcgtcccttaataggcagtaggctagtatcttttttacgtagtaatcgtcgtagggagagaattctgacatcttgtagaacaacgatttaatcataggtagagatactttcagtctgtggtggatgatgtcattcacaacatccgccttgtatatgatgtttctgttttcaaacaccaagtcgaataccgtctttagtcggaaggttgatgtcgtatccgatgtatgaggcaacattgttgttacaattttgaaaggcggtattatagtattcgtctttctgaatgtcgaacctatctagtagataccgtagtatattgagagtgtatccttgattatgttttatgaatagataaagtagatgttgtccttcttccttttgttcgtgccaattgagtaacattatgagaatatgacctgttgcacaatcgttccatgatgggtgtacaatcaagattattacgtatcctcgtatcggctcctcgagataaaagagcatacaccacacgaggactatgtttggtatactgttgaaggtaagtgtgtaaccgcgttaatgtttgctccataatctattatcgcgtagatgaatcgcttctcggctcgcatcttagtgtgacttaacttgtaataattgcttttgtagaacgtggatatgtgtttacagtagtaatgaagagaagtgagtccatcctcgtcgacgcaattagggtcggatcctttgtacagaacgtaatagtttaagctcccattgaatttatatctaagataacacagcaatagatcggatgatttactaaagtcatcaatggtgtccgttagtatatcaaagatcttgttatcgattgatagtgaatgaatcagatagtggtgtagaggaatatgtcctttttcatccttgctatcaaagttacgcatgccgtggtgtaacaatatctttaatacagatggattaaatcgtgtattcatcgtatagcaatgtaatggagagttacctcgtttattcagatcgcagtgtttaataactagcttaaacagatgagacgatgtatccacatcaaagaacgtaaaatacatatgacaaacattgttgacagaaacgtgaccttcattcttaccgtcgtccataaatacgttaggtatgtaccacatactgtcgcgaacgatgcgtacaatctcgtccatctcataatgatttactttttcataattaaagatgtgaaagaaaaccgaacaatatatttttttagtaatgtttatgcgagacatataaaataaactccgtgtttatgatgccggtaaatgtttttatcatcttggacggaatcgattttgtaatatgtcatggaaacaaatgaaacaggacattatcgctccatgataaattatttaatggagtaataaagtatctccatgggtaatttcgaaatcaagttatcgtctgtattaatgttgtccactatggagtcgatcctctcattgttctttacagtttctgtaatgatggacgttagttcttttttgtaccatttgatgtcggattctttgcgtatctcaatctgtggcgtttgcttcgtttaaataatatatcaaacatggagacgcctgatatgtaggcattcttcattctattaatgtctactctatagcgctttagttccttatgacgaccggagatatcatacttactttagaaggaaaatcatcatctaggattaaggcgtatctgatacaggcgaataatggttcaggatatagatagcgtatatctctattaaatgcgtcaatcatagtctctagagtgggatggtagctaagtaataaatcaactatcctcgttttgttttctcttctgtaactacttttctggatggccgtattgattatcgagcgtgatgttgtaacactcgctccatattccaataaccgctttgcaaattgtatattattgacatcgaccgcgtaatatagtagagttttattctcattatcgatcatatctatattatccatgtacttgcttagtatatcaaatacatctattagtatggtttcataacagtgatacccgcaattattaaatctcgataatatcagaccgtacatacatagacggccattgttcgatacgtgatttacagccatgtgtccattattttccacgataaaccttacgacgtttacatcgacgagattattattaacaaagtagtcgtgcagaggatagttgttgtccgttatctaacatgcatcgaacgaccatatcgccgtaatgtaagtagtttatcaacatggcttgtacgatggattcatcctgttgtctaaatctctttagaatgttatcgatgatgtagtggttatagtctctggaatcgtaagaagtaatactacgcattacgtcgacaagagtatgacgtctctcaataagaagattaacgatttccatgtctacattatatggggttactctaaatcgcttgtttagataatccgcctctaatatagggctgacgtcgtatactctacacgtgtccacatcctttattaataatttaacaatctctatatctatggttgagcaagaccagtagtattggatgggtaaagatcctccttcgtctctgccatggatggaaacattgttattgatcaaacatttaattacatccttggatagagattgagattctctatgagacgatatatagtaatgaagagagttcttacacatatcactgtcgtacatacaggtacgaaatacgtaaccggtgctgtaacattctgatttaagaagccatagcaatacttctggtctcggattaggcgtcgttacgtatatatccaccaatccgagaccattgattgcataattcgtattcttggacggacgtatccgtttatccacaattaggtattttagcagacgtaagtcgatattatccgaagacatatacgaatacagatcgaaatcatttatattcgacttgagttcgttagaggaattcgaatagctggatatcagtagatgcacaatttgagattttacgtatctatgcttactgtatgctcctagcggagttaatccttcgttgtttctacaaagtctctcgactccgcgagagagtaacagtcgaacaatcttaatgtctgtatcgcatttattgaagacgtaacaatgtagcgcattgtttcctcgtctatctatatgttttgataagttgtgacacgtttcaatttctagttttatttttttgtacgtcacatcttcatccagtagacgacatagaatacatgtgcaatccatagctattctggtgctaattattcctatttcacgaaaaatgatgaaggcaatcattcctcataagatgataaaaagtgtagtgagagagcatgaaggagatttagtatttagcagtgcggatatgatccaagagggtgagatagtcgttctcgttcagaatctttcgcagcataagtagtatgtcgatatacttatcgttgaagactcttccagagacgatagctgattgagtacaaagtccaatgattgcacgaagttcttcggcggttttcatggagtcatttctgatgaaacatttaatgatctccacgcaattgtcgatattgtcccacggaagtgaatccttcaactcaccaccaaagagctccgttgcatcagttctgaaagagatgagaagcctgtagagagaccctgcgctttctctatgggtccatctatgagaaacccacaggatgtattcagtcagacaatgtctgacgtcggccacggtattcagggagtccttagtagcgtggcaatgacagggtctgaactgggcacaaggagaggccattgtaaaggtagacctgtagccgtttatgctaatagagggctttaatttccatttttttaatgggttgtggatgaggaatgagagtgatatcatattgagatacgtagttatgtagaggtgtatttcctatattatttactttcggtttcatattttaccaactctttaataaatttcttttcacgatgcatcttattaaatgacgttttctcataagtggacatatagatgcagaagtaatgaagaaaagtattacctctatcatctacataattagggtctgctcctttttttaacaacttatacagtacgtagtagtagtttatcggttttaaatcaagtctagaatatatagtggattaatatatttttatattagctaaagctatctatactatcagaaagcatatcattctcaacttcatcatgagttaaatatttgtgtaatggatgtcatgaacattaaacgtattcatgacatactcctttaataggttttttaaaacagatgattcaaatccttcattcattagataacagtgtaacggagtcgtaccttctactagtttgtttatatcacagcattctacaaacagtctaaacaatagagaagacggacagactttaacgtataaatgacacatgttatcgatattcgttgatgaattattattaaacgtagttatgataaatgattctaacgacatctctcgctagagataaaatctagtatcgtatcattaaacatctttgcatcatactcgcatagcatagtttttcataattaatacaatatttaaaagacttattcggaaagtattttaatacatgtatcatcgatggagatccatatgaggagtcacttgtagttcttcagtagtaataacagtgctatcatcgatagtataattatatgtagaaggttcatatgttgttgtaattggagtaactgttggtagttcttccgtggaatcaataattatactaacagcaatagtataattatataaatatgttccgttgatatcacatattttaatgaactcatttctaacaccctcagctatatctgtccaattaaatgtagccaacaatctactacgttctctttgattgactacttgtacggtagcgacgctacactatctttattgtcttctacatgctccaattgaatgtcatgatacaacgcagtttttcttatgcatgtttcataacaccacgaacatgtcgcagtaagatatatagccagagataatttctgtaaattcatgattgccggtcataaacaagcccgtcaataattgtggctatatattcagtttatagagcaaaataattaagcacaatagcgcttaatctcaaaatatgttatgtttatttttttcatattaaacatactggttaaaatcctctaaaggctgatcttcatctataaatcaagatcataattacatttagacagtggtttcatgtttataaaaatgttctttttgtgtgaataaggaatatactaatcaataatcaaccatcgaccccattacgatagtatgcaggcaaccccccattagagaggtacgtgtaatcagtctctccagttttagtatttttataagtcattgttacataaacggcttttaaacagtctcctcgataataagccatatctggaaatttattaaatactcgagtcattttacgcacggtcaaaaaagtaagtaatgtcgacgacttcttacattctatagaaacacctagaatactcattttcttttggaaaatatcctcagactctgatttgaacaatgcacgacctatagtaaaccgtgaccaataagttatattagtcaatggtatatccaaaccatcaggtgtggatagtacgccgatagtccagtctttggtatcgatagtgtagttattgaactgagaagttaccgtatagtctttttggtcatctctaaacaaggaaactaatacctctacactattgaacgatttatcttccgtaatgggtggaataacgggaatataaagtggactagcgatggatgaagtcacgaatataagacacgctattaatccgtatatcatcattttgatattacttataataacgatttgtttaatttttagtttatactattaattgtaaatgatattattatttttttaagtattatcagctttagtttatactattactatttgtaatatttagacatagataaacgtgataaaagtctatttgtttatatttattgcggatagcagtatttccctataaaaagtatacgtcctgtgttgtctttaatcatgtacatgaatggatggtttatgtagaccttcgtacgatataccatcgaaaagttagtcataaatactcctgtaacggccgatgcttctgtatactcctcattaacatctataaacgtcgtatgtagaaatttttctacagtgatagtttcattacacatcttgctaaaatctgcataatatccgaatatattagtaagtcctaaattttctaaaatcggtaccagattatacggttctgtcatttccactttaaactttggcatatacaagtctatacttttagtagataacataccacaccattttttaaatttttcatctgttatatttttttctatgttatatataccttctatgtcgtccggtagtataattaccatactagagtttccctcgtatggaatatcgataatagagaatcctccgaataattcattaatatgtacatattgcaagttattctcggtacccaccatcatatcaacactggtaactatattcttagaaatataaaacttgtctgtatatgtaagatgtttagaaaatggatatttccacattgctttaaaatggacggcgctaacaactgtcatacgagtattaatggatagcggactagtcaataaggaattaattttaccatttgtcatcgtcttaacccattcgttgattagttcctttgtttggttagcattattaaagtttacagtttgaaaatcgtcttttattttttgtaggaaggaggcgtggaactcgatactatcgctaccgtatattttatttgcggtagctagtgtcgcacaatacggaatatctacgtccatgtcattattgtcatccttcttatcatcgggtgtattctcattcatattctctatatattttgatagttgttcagctgtagaaccagctgctccatgatttagaatagataaagtagataaaatagaaactggagaaatcaaaacattttcatcagggtgttttaagattagttctttaaagatatccatggtatagaccaaacaataacgataacgatatatatcataaataaataatgttaaatttcagtttatgtttgtaccccgtattcatacttaacaaattggtattgcgtacacaatcaatcatattacataccattaataatgcaagcataaaaaatcgttagtagatgtttctaaatataggttccgtaagcaaagaatataagaatgaagcggtaatgataaaatcaatcgttatctaaaatgatcatactcatttattttattctattatattaacacatacatttttaacagcaacacattcaatattgtattgttatttttatattatttacacaattaacaatatattattagtttatattactgaattaataatataaaattcccaatcttgtcataaacacacactgagaaacagcataaacacaaaatccatcaaaaatgtcgatgaaatatctgatgttgttgttcgctgctatgataatcagatcattcgccgatagtggtaacgctatcgaaacgacattgccagaaattacaaacgctacaacagatattccagctatcagattatgcggtccagagggagatggatattgtttacacggtgactgtatccacgctagagatatcgacggtatgtattgtagatgctctcatggttatacaggcattagatgtcagcatgtagtattagtagactatcaacgttcagaaaaaccaaacactacaacgtcatatatcccatctcccggtattgtgcttgtattagtaggcattattattatgtgttgtctattatctgtttataggttcactcgaagaactaataaactacctctacaagatatggttgtgccataatttttataaatttttttatgagtatttttacaaaaaaaatgtataaagtgtatgtcttatgtatatttataaaaatgctaagtatgcgatgtatctatgttatttgtatttatctaaacaatacctctacctctagatattatacaaaaattttttatttcggcatattaaagtaaaatctagttaccttgaaaatgaatacagtgggtggttccgtatcaccagtaagaacataatagtcgaatacagtatccgattgagattttgcatacaatactagtctagaaagaaatttgtaatcattttctgtgacgggagtccatatatctgtatcatcgtctagtttatcagtgtcccatgctatatttctgttatcatcattagttaatgaaaataactctcgtgcttcagaaaagtcaaatattgtatccatacatacatctccaaaactatcgcttatacgtttatctttaacgatacctatacctagatggttatttactaacagacattttccagatctattgactataactcctatagtttccacatcaaccaagtaatgatcatctattgttatataacaataacataactcttttccatttttatcagtatgtatatctatatcaacgtcgtcgttgtagtgaatagtagtcattgatctattatatgaaacggatatgtctagaacggcaattgtcttacgtccagttaacactttcgttgatttaaagtctagagtctttgcaaacataatatccttatccgactttatatttcctgtagggtggtataattttattttgcctccacatatcggtgtttccaaatatattactagacaatattccatatagttattagttaagggtacccaattagaacacgtacgcttattatcatcatttggatcgtatttcataaaagttattgtactatcgatgtcaacacattctacattttttaatcgtctatatagtatttttctgatattttctataatatcagaattgtcttccatcggaagttgtatactatcggaatcagttacatgtttaaataattctctgatgtcattccttatacaatcaaattcattattaaacagtttaatagtctgtagacctttatcgtcgtaaatatccattgtcttattagttacgcttatttttatgtgttttacgttgctttattatattttataagaatgattgtttgacgaatcacgagaactattaagacacattattaggtatatattataaaaaagtttttgattacgatgttataagaggaaagaggacacattaacatcatacatcaattaactacattcttataacatcgtaatcaaaagaattgcaattttgatgtataacaactgtcaatgggttatggaattgtatattacatattatacggtatgttggtaacgacaaataccgatcggtaatcgtttgccggtgtaatagaattatatatatctatctattacaccggctgagtatacataataataagttgtggtagtatgatctccatatttataatttaggactttgtattcagtatttttggaatcataaaaaataaaaaaaagttttactaatttaaaatttaaaaagtatttacatttttttcactgtttagtcgcggatatggaattcgatcctgccaaaatcaatacatcatctatagatcatgtaacaatattacaatacatagatgaaccaaatgatataagactaacagtatgcattatccgaaatattaataacattacatattatatcaatatcacaaaaataaatacacatttggctaatcaatttcgggcttggaaaaaacgtatcgccggaagggactatatgactaacttatctagagatacaggaatacaacaatcaaaacttactgaaactatacgtaactgtcaaaaaaatagaaacatatatggtctatatatacactacaatttagttattaatgtggttattgattggataaccgatgtgattgttcaatcaatattaagagggttggtaaattggtacatagctaataatacctatactccaaatacacccaataatacaacaaccatttctgagttggatatcatcaaaatactaaataaatacgaggacgtgtatagagtaagtaaagaaaaagaatgtggaatttgctatgaagttgtttactcaaaacgattagaaaacgatagatactttggtttattggattcgtgtactcatatattttgcataacatgcatcaatatatggcataaaacacgaagagaaaccggtgcgtcggataattgtcctatatgtcgtacccgttttagaaacataacaatgagcaagttctataagctagttaactaataaataaaaagtttaatttgttgacgacgtatgtcgttattttttctcgtataaaagattaatttgattctaatataatctttagtattggataaatatcaattcaaattaattccattagattatatcataaataaaaatagtagcacgcactacttcagccaaatattcttttttgaaacgccatctatcgtagtgaggacacaagtgaacctataatgagcaaatttattagtatcggttacatgaaggactttacgtagagtggtgattccactatctgtggtacgaacggtttcatcttctttgatgccatcacccagatgttctataaacttggtatcctcgtccgatttcatatcctttgccaaccaatacatatagctaaactcaggcatatgttccacacatcctgaacaatgaaattctccagaagatgttacaatgtctagatttggacatttggtttcaaccgcgttaacatatgagtgaacacacccatacatgaaagcgatgagaaataggattttcatcttgccaaaatatcactagaaaaaatttatttatcaattttaaaggtataaaaaatacttattgttgctcgaatattttgtatttgatggtatacggaagattagaaatgtaggtattatcatcaactgattctatggttttatgtattctatcatgtttcactattgcgttggaaataatatcatatgcttccacatatattttattttgttttaactcataatactcacgtaattctggattattggcatatctgtgaataattttagctccatgatcagtaaatattaatgagaacatagtattaccacctaccattatttttttcatttcgttcaattcttgattgcaaagatctatataatcattatagcgttgacttatggactctggaatcttagacgatgtacagtcatctataatcatggcatatttaatacattgttttatagcatagtagttatctacgatgttagatatttctctcaatgaatcaatcacacaatctaatgtaggtttatgacataatagcattttcagcagttcaatgtttctagattcgttgatggcaatggctatacatgtatatccgttatttgatctaatgttgacatctgaaccggattctagcagtaaagatactagagattgtttattatatctaacagccttgtgaagaagtgtttctcctcgtttgtcaatcatgttaatgtctttaagataaggtaggcaaatgtttatagtactaagaattgggcaagcataagacatgtcacaaagaccctttttgtatgtataagtgtagaaattataacatccatagttggatttacataggtgtccaatcgggatctctccatcatcgagatgattgacggcatctcccccttccttttttagtagatatttcatcgtgtaagaatcaatattaatatttctaaagtatccgtgtatagcctctttatttaccacagctccatattccaacatgcattccactaaagggatatcgatatcgccgaatgtcatatactcaattagtatatgttggaggacatccgagttcattgttttcaatatcaaagagatggtttccttatcatttctccatagtggtacaatactacacattattccgtgaggctttccattctccaaaaacaatttgaccaaatctacatctttattgtatctataatcactatttagataatcagccataattcctcgagtgcaacatgttagatcgtctatatatgaataagccgtgttatctattcctttcattaacaatttaacgatgtctatatctatatgagatgacttaatataatattgaagagctgtacaatagtttttatctatagaagacggcttgattccgtgattaattagacatttaacaacttccggacgcacatatgctctcgtatccgactctgaatacagatgagagatgatatacagatgcaatacggtaccgcaatttcgtagttgataatcatcatacgcgtatccgtactcgtcctcataaagaacactgcagccattttctatgaacaaatcaataattttaggaacaggatcattgtcattacataattttctataactgaacgatggttttcacatttaacactcaagtcaaatccatgttctaccaacacctttatcaagtcaacgtctacatttttggatttcatatagctgaatatattaaagtcatttatgttgctaaatccagtggcttctagtagagccatcgctatatcctttaactttaacatgtctactatttgtgtattcttctaatggggtagctgtctccaatttttgcgtaatggattagtgccactgtctagtagtagtttgacgacctcgacattattacaatgctcattaaaaaggtatgcgtgtaaagcattattcttgaattggttcctggtatcattaggatctctgtctctcaacatctgtttaagttcatcgagagccacctcctcattttccaaatagtcaaacattttgactgaatagaagtgaatgagctactgtgaactctatacacccacacaactaatgtcattaaatattatttttttgaatgtatttataccatgtcaaaaacttgtacaattattaataaaaataatttagtgtttaaattttaccagttccagattttacacctccgttaaccccactttttacaccactggacgaccctcctccccacattccaccgccaccagatgtataagttttagatcctttattactaccatcatgtccatggataaagacactccacatgccgccactaccccctttagaagacatattaataagacttaagagttaaggacaagtttaacaataaaattaatcacgagtaccctactaccaacctacactattatatgattatagtttctatttttacagtaccttaactaaagtttctagtcacaagagcaatactaccaacctacactattatatgattatagtttctatttttataggaacgcgtacgagaaaatcaaatgtctaatttctaacggtagtgttgataaacgattatcgtcaatggatacctcctctatcatgtcgtctattttcttactttgttctattaacttattagcattatatattatttgattataaaacttatattgcttattagcccaatctgtaaatatcggattattaacatatcgtttctttgtaggtttatttaacttgtacatcactgtaagcatgtccgtaccatttattttaatttgacgcatatccgcaatttctttttcgcagtcggttataaattctatatatgatggatacatgctacatgtgtacttataatcgactaatatgaagtacttgatacatattttcagtaacgatttattattaccacctatgaataagtacctgtgatcgtctaggtaatcaactgttttcttaatacattcgatggttggtaatttactcagaataatttccaatatcttaatatataattctgctatttctggaatatatttatctgccagtataacacaaatagtaatacatgtaaacccatattttgttattatattaatgtctgcgccattatctattaaccattctactaggctgacactatgcgacttaatacaatgataaagtatactacatccatgtttatctattttgtttatatcatcaatatacggcttacaaagttttagtatcgataacacatccaactcacgcatagagaaggtagggaataatggcataatatttattaggttatcatcattgtcattatctacaactaagtttccattttttaaaatatactcgacaactttaggatctctattgccaaatttttgaaaatatttatttatatgcttaaatctatataatgtagctccttcatcaatcatacatttaataacattgatgtatactgtatgataagatacatattctaacaatagatcttgtatagaatctgtatatcttttaagaattgtggatattaggatattattacgtaaactattacacaattctaaaatataaaacgtatcacggtcgaataatagttgatcaactatataattatcgattttgtgatttttcttcctaaactgtttacgtaaatagttagatagaatattcattagttcatgaccactatagttactatcgaataacgcgtcaaatatttcccgtttaatatcgcatttgtcaagataataatagagtgtggtatgttcacgataagtataataacgcatctctttttcgtgtgaaattaaatagtttatcacgtccaaagatgtagcataaccatcttgtgacctagtaataatataataatagagaactgttttacccattctatcatcataatcagtggtgtagtcgtaatcgtaatcgtctaattcatcatcccaattataatattcaccagcacgtctaatctgttctattttgatcttgtatccatactgtatgttgctacatgtaggtattcctttatccaataatagtttaaacacatctacattgggatttgatgttgtagcgtatttctctacaatattaataccatttttgatactatttatttctatacctttcgaaattagtaatttcaataagtctatatcgatgttatcagaacatagatattcgaatatatcaaaatcattgatatttttatagtcgactgacgacaataacaaaatcacaacatcgtttttgatattattatttttcttggtaacgtatgcctttaatggagtttcaccatcatactcatataatggatttgcaccactttctatcaatgattgtgcactgctggcatcgatgttaaatgttttacaactatcatagagtatcttatcgttaaccatgattggttgttgatgctatcgcattttttggtttctttcatttcagttatgtatggatttagcacgtttgggaagcataagctcatatgatttcagtactgtagtgtcagtactattagtttcgatcagatcaatgtctagatctatagaatcaaaacacgataggtcagaagataatgaatatctgtaggcttcttgttgtactgtaacttctcgttttgttagatggttgcatcgtgctttaacatcaatggtacaaattttatcctcgctttgtgtatcatattcgtccctactataaaattgtatattcagattatcatgagatgtgtatacgctaacggtatcaataaacggagcacaccatttagtcataaccgtaatccaaaaatttttaaagtatatcttaacgaaagaagttgtgtcattgtctacggtgtatggtactagatcctcataagtgtatatatctagagtaatgtttaatttatcaaatggttgataatatggatcctcatggcaatttcctaagacgaaaataagacataaacacgcaataaatctaattgcggacatggttactccttaaaaaaatactaataatcaccttggctatttagtaagtgtcatttaacactatactcatattaatccatggactcataatctctatacgggattaacggatgttctatatacggggatgagtagttctcttctttaactttatactttttactaatcatatttagactgatgtatgggtaatagtgtttgaagagctcgttctcatcatcagaataaatcaatatctctgtttttttgttatacagatgtattacagcctcatatattacgtaatagaacgtgtcatctaccttattaactttcaccgcatagttgtttgcaaatacggttaatcctttgacctcgtcgatttccgaccaatctgggcgtataatgaatctaaactttaatttcttgtaatcattcgaaataatttttagtttgcatccgtagttatcccctttatgtaactgtaaatttctcaacgcgatatctccattaataatgatgtcgaattcgtgctgtatacccatactgaatggatgaacgaataccgacggcgttaatagtaatttactttttcatctttacatattgggtactagttttactatcataagtttataaattccacaagctactatggaataagccaaccatcttagtataacacacatgtcttaaagtttattaattaattacatgttgttttatatatcgctacgaatttaaacagagaaatcagtttaggaaaaaaaattatctatctacatcatcacgtctctgtattctacgatagagtgctactttaagatgagacatatccgtgtcatcaaaaatatactccattaaaatgattattccggcagcgaacttgatattggatatatcacaacctttgttaatatctacgacaatagacagcagtcccatggttccataaacagtgagtttatctttctttgaagagatattttgtagagatcttataaaactgtcgaatgacatcgcatttatatctttagctaaatcgtatatgttaccatcgtaatatctaaccgcgtctatcttaaacgtttccatcgctttaaagacgtttccgatagatggtctcatttcatcagtcatactgagccaacaaatataatcgtgtataacatctttgatagaatcagactctaaagaaaacgaatcggctttattatacgcattcatgataaacttaatgaaaaatgtttttcgttgtttaagttggatgaatagtatgtcttaataattgttattatttcattaattaatatttagtaacgagtacactctataaaaacgagaatgacataactaatcataactagttatcaaagtgtctaggacgcgtaattttcatatggtatagatcctgtaagcattgtctgtattctggagctattttctctatcgcattagtgagttcagaatatgttataaatttaaatcgaataacgaacataactttagtaaagtcgtctatattaactcttttattttctagccatcgtaataccatgtttaagatagtatattctctagttactacgatctcatcgttgtctagaatatcacatactgaatctacatccaattttagaaattggtctgtgttacatatctcttctatattattgttgatgtattgtcgtagaaaactattacgtagaccattttctttataaaacgaatatatagtactccaattatctttaccgatatatttgcacacataatccattctctcaatcactacatctttaagattttcgttgttaagatatttggctaaactatataattctattagatcatcaacagaatcagtatatatttttctagatccaaagacgaactctttggcgtcctctataatattcccagaaaagatattttcgtgttttagtttatcgagatctgatctgttcatatacgccatgattgtacggtacgttatgataaccgcataaaataaaaatccattttcatttttaaccaatactattcataattgagattgatgtaatactttgttactttgaacgtaaagacagtacacggatccgtatctccaacaagcacgtagtaatcaaatttggtgttgttaaacttcgcaatatttatcaatttagatagaaacttatactcatcatctgttttaggaatccatgtattattaccactttccaacttatcattatcccaggctatgtttcgtccatcatcgttgcgcagagtgaataattcttttgtattcggtagttcaaatatataatccatgcatagatcggtaaagctattgtagatgtgatttttcctaaatctaatataaaactcgtttactagcaaacactttcctgatttatcgaccaagacacatatggtttctaaatctatcaagtggtggggatccatagttatgacgcagtaacatagattattaccttcttaactgtcgctaatatctatatatttattgttatcgtattggattctgcatatagatggcttgtatgtcaaagatatagaacacataaccaatttatagtcgcgctttacattctcgaatctaaagttaagagatttagaaaacattatatcctcggatgatgttatcactgtttctggagtaggatatattaaagtctttacagatttcgtccgattcaaataaatcactaaataatatcccacattatcatctgttagagtagtatcattaaatctattatattttatgaaagatatatcactgctcacctctatatttcgtacatttttaaactgtttgtataatatctctctgatacaatcagatatatctattgtgtcggtagacgataccgttacatttgaattaatggtgttccattttacaacttttaacaagttgaccaattcatttctaatagtatcaaacgctccatgattaaatattttaatagtatccattttatatcactacggacacaaagtagctgacataaaccattgtataatttttatgttttatgtttattagcgtacacattttggaagttccggcttccatgtatttcctggagagcaagtagatgatgaggaaccagataggttatatccgtacttgcacttaaagtttacattgtcgttgtatgagtatgatcttttaaacccgctagacaagtatccgtttgatattgtaggatgtggacatttaacaatctgacacgtgggtggatcggaccattctcctcctgaacacaggacaccagagttaccaatcaacgaatatccactattgcaactataagttacaacgcttccatcggtataaaaatcctcgtatccgttatgtcttccgttggatatagatggaggggattggcatttaacagattcacaaataggtgcctcgggattccataccatagatccagtagatcctaattcacaatacgatttagattcaccgatcaaatgatatccgctattacaagagtacgttatactagagccaaagtctactccgccaatatcaagttggccattatcgatatctcgaggcgatgggcatctccgtttaatacattgattaaagagtgtccatccagtacctgtacatttagcatatataggtcccattttttgctttctgtatccaggtagacatagatattctatagtgtctcctatgttgtaattagcattagcatcagtctccacactattcttaaatttcatattaatgggtcgtgacggaatagtacagcatgatagaacgcatcctattcccaacaatgtcaggaacgtcacgctctccaccttcatatttatttatccgtaaaaatgttatcctggacatcgtacaaataataaaaagcccatatatgttcgctattgtagaaattgtttttcacagttgctcaaaaacgatggcagtgacttatgagttacgttacactttggagtctcatctttagtaaacatatcataatattcgatattacgagttgacatatcgaacaaattccaagtatttgattttggataatattcgtattttgcatctgctataattaagatataatcaccgcaagaacacacgaacatctttcctacatggttaaagtacatgtacaattctatccatttgtcttccttaactatatatttgtatagataattacgagtctcgtgagtaattccagtaattacatagatgtcgccgtcgtactctacagcataaactatactatgatgtctaggcatgggagacttttttatccaacgatttttagtgaaacattccacatcgtttaatactacatatttttcatacgtggtataaactccacccattacatatatatcatcgtttacgaataccgacgcgcctgaatatctaggagtaattaagtttggaagtcttatccatttcgaagtgccgtgtttcaaatattctgccacacccgttgaaatagaaaattctaatcctcctattacatataactttccattgttaacacaagtactaacttctgattttaacgacgacatattagtaaccgttttccattttttcgtttcaagatctacccgcgatacggaataaacatgtctattgttaatcatgccgccaataatgtatagacaattatgtaaaacatttgcattatagaattgtctatctgtattaccgactatcgtccaatattctgttctaggagagtaatgggttattgtggatatataatcagagtttttaatgactactatattatgttttataccatttcgtgtcactggctttgtagatttggatatagttaatcccaacaatgatatagcattgcgcatagtattagtcataaacttgggatgtaaaatgttgatgatatctacatcgtttggatttttatgtatccactttaataatatcatagctgtaacatcctcatgatttacgttaacgtcttcgtgggataagatagttgtcagttcatcctttgataattttccaaattctggatcggatgtcaccgcagtaatattgttgattatttctgacatcgacgcattatatagttttttaattccatatcttttagaaaagttaaacatccttatacaatttgtggaattaatattatgaatcatagtttttacacatagatctactacaggcggaacatcaattattatggcagcaactagtatcatttctacattgtttatggtgatgtttatcttcttccagcgcatatagtctaatagcgattcaaacgcgtgatagtttataccattcaatataatcgcttcatcctttagatggtgatcctgaatgcgtttaaaaaaattatacggagatgccgtaataatttccttattcacttgtataatttccccattgatagaaaatatcacgctttccattcttgaagtactataagtaattatagtataatgtaaaggtttatatattcaatattttttataaaaaaatcatttcgacattaattcctttttaaatttccgtctatcatctatagaaacatattctatgaatttataaaatgcttttacgtgtcctatcgtaggcgatagaaccgctaaaaagcctattgaatttctacaaaagaatctattatatggtatagggagagtataaaacattaaatgcccgtacttattaaagtattcagtagccaatcctaactctttcgaatacttattaatggctcttgttctgtacgaatctatttttttgaacaacggacctagtggtatatcttgttctatgtatctaaaataatgtctgactagatccgttagtttaatatcctcagtcatcttgtctagaatggcaaatctaactgcgggtttaggctttagtttagtttttatatctacatctatgtctttatctaacaccaaaaatataatagctaatattttattacaatcatccggatattcttctacgatctcactaactaatgtttctttggttatactagtatagtcactatcggacaaataaagaaaatcagatgatcgatgaataatacatttaaattcatcatctgtaagatttttgagatgtctcattaaaatattattagggtcagtactcattatcattaggcagctattacttattttattatttttcaccatatagatcaatcattagatcatcaaaatatgtttcaatcatcctaaagagtatggtgaatgactcttcccatctaatttctgaacgttcaccaatgtctctagccactttggcactaatagcgatcattcgcttagcgtcttctatattattaactggttgattcaatctatctagcaatggaccgtcggacagcgtcattctcatgttcttaatcaatgtacatacatcgccgtcatctaccaattcatccaacaacataagctttttaaaatcatcattataataggtttgatcgttgtcatttctccaaagaatatatctaataagtagagtcctcatgcttagtaatttaactattttagttaacaactattttttatgttaaatcaattagtacaccgctatgtttaatacttattcatattttagtttttaggattgagaatcaatacaaaaattaatgcatcattaattttagaaatacttagtttccacgtagttaatgaaacatttgaactcatcgtacaagacgttctcgtacaggacgtaactataaaccggtttatatttgttcaagatagatacaaatccgataactttttttacgaattctacgggatccactttaaaagtgtcataccgggttctttttatttttttaaacagatcaatggtgtgatgttgattaggtcttttacgaatttgatatagaatagcgtttacatattctccataatggtcaatcgccatttgttcgtatgtcataaattctttaattatatgacactgtgtattgtttagttcatccttgttcattgttaggaatctatccaaaatggcaattatactagaactataggtgcgttgtatacacatattgatgtgtctgtttatacaatccatgatatttggatccatgctactaccttcgggtaaaattgtagcatcatataccatttctagtactttaggttcattattatccattgcagaggacgtcatgatcgcatcctaaaaaaatatattatttttatgttattttgttaaaaataatcatcgaatacttcgtaagatactccttcatgaacataatcagttacaaaacgtttatatgaagtaaagtatctacgatttttacaaaagtccggatgcataagtacaaagtacgcgataaacggaataataatagatttatctagtctatctttttctatagctttcatagttagatacatggtctcagaagtaggattatgtaacatcagcttcgataaaatgactgggttatttagtcttacacattcgctcatacatgtatgaccgttaactacagagtctacactaaaatgattgaacaatagatagtctaccattgtttcgtattcagatagtacagcgtagtacatggcatcttcacaaattatatcattgtctaatagatatttgacgcatcttatggatcccacttcaacagccatcttaaaatcggtaaaatcatattgctttcctttatcattaataatttctaaaacatcatctctatcataaaagatacaaatattaactgtttgatccgtaataacattgctagtcgatagcaatttgttaataagatgcgctgggctcaatgtcttaataagaagtgtaagaggactatctccgaatttgttttgtttattaacatccgttgatggaagtaaaagatctataatgtctacattcttgactgttttagagcatacaatatggagaggtgtatttccatcatgatctggttttgagggactaattcctagtttcatcatccatgagattgtagaagcttttggattgtctgacataagatgtctatgaatatgatttttgccaaatttatccactatcctggcttcgaatccgatggacattatttttttaaacactctttctgaaggatctgtacacgccaacaacggaccacatccttcttcatcaaccgagttgttaatcttggctccatactgtaccaataaatttattctctctatgacttcatcatctgttcccgagagataatatagaggcgttttatgctgtttatcacacgcgtttggatctgcgccgtgcgtcagcagcatcgcgactattctattattattaattttagaagctatatgcaatggataatttccatcatcatccgtctcatttggagagtatcctctatgaagaagttcttcgacaaatcgttcatctagtcctttaattccacaatacgcatgtagaatgtgataattatttccagaaggttcgatagcttgtagcatattcctaaatacatctaaatttttactattatatttggcataaagagatagataatactcggccgacataatgttgtccattgtagtataaaaattaatatttctatttctatttctgtatatttgcaacaatttactctctataacaaatatcataacttagttcttttatgtcaagaaggcactggtttagttcatctataaatgtcacgccataactaccacgcatgctatactcagaattatgataaagatatttatccttggggtgtaggtaatggggattaatctttgttggatcagtctctaagttaacacatgtcacacatgatccatttatagttatatcacacgatgatgatttatgaattgattccggaagatcgctatcgtattttgtggttccacaattcatttccatacatgttattgtcacactaatattatgatgaactttatctagccgctgagtggtaaacaacagaacagatagtttattatctttaccaacaccctcagccgctgccacaaatctctgatccgtatccatgatggtcatgtttatttctagtccgtatccagtcaacactatgttagcatttctgtcgatatagctttcactcatatgacactcaccaataatagtagaattaatgtcgtaatttacaccaatagtgagttcggcggcaaagtaccaataccggtaatcttgtcgaggaggacatatagtattcttgtattctaccgaatacccgagagatgcgatacaaaagagcaagactaatttgtaaaccatcttactcaaaatatgtaacaatagtacgatgcaatgagtaagacaataggaaatctatcttatatacacataattattctatcaattttaccaattagttagtgtaatgttaacaaaaatgtgggagaatctaattagtttttctttacacaattgacgtacatgagtctgagttccttgtttttgctaattatttcatccaatttattattcttgactatatcgagatcttttgtataggagtcagacttgtattcaacatgcttttctataatcattttagctatttcggcatcatccaatagtacattttccagattagcagaatagatattaatgtcgtatttgaacagagcctgtaacatctcaatgtctttattatctatagccaatttaatgtccggaatgaagagaagggaattattggtgtttgtcgacgtcatatagtcgagcaagagaatcatcatatccacgtgtccattttttatagtggtgtgaatacaactaaggagaatagccagatcaaaagtagatggtatttctgaaagaaagtatgatacaatacttacatcattaagcatgacggcatgataaaatgaagttttccatccagttttcccatagaacatcagtctccaatttttcttaacaaacagttttaccgtttgcatgttaccactatcaaccgcataatacaatgcagtgtttcccttgtcatcaaattgtgaatcatccagtccactgaatagcaaaatctttactattttggtatcttccaatgtggctgcctgatgtaatggaaattcattctctagaagatttttcaatgctccagcgttcaacaacgtacatactagacgcacgttattatcagctattgcataatacaaggcactatgtccatggacatccgccttaaatgtatctttactagagagaaagcttttcagctgcttagacttccaagtattaattcgtgacagatccatgtctgaaacgagacgctaattagtgtatattttttcattttttataattttgtcatattgcaccagaattaataatatctctaatagatctgattagtagatacatggctatcgcaaaacaacatatacacatttaataaaaataatatttattaagaaaattcagatttcacgtacccatcaatataaataaaataatgattccttacaccgtacccatattaaggagattccaccttacccataaacaatataaatccagtaatatcatgtctaatgatgaacacaaatggtgtattaaattccagtttttcaggagatgatctcgccgtagctaccataatagtagatgcctctgctacagttccttgttcgtcgacatctatctttgcattctgaaacattttataaatatataatgggtccctagtcatatgtttaaacgacgcattatctggattaaacatactaggagccatcatttcggctatcgacttaatatccctcttattttcgatagaaaatttagggagtttaagattgtacactttattccctaattgaaacgaccaatagtctaattttgcagccgtaatagaatctgtgaaatgggtcatattatcacctattgccaggtacatactaatattagcatccttatacggaaggcgtaccatgtcatattctttgtcatcgattgtgattgtatttccttgcaatttagtaactacgttcatcatgggaaccgttttcgtaccgtacttattagtaaaactagcattgcgtgttttagtgatatcaaacggatattgccatgtacctttaaaatatatagtattaatgattgcccatagagtattattgtcgagcatattagaatctactacattagacataccggatctacgttctactatagaattaattttattaaccgcatctcgtctaaagtttaatctatataggccgaatctatgatattgttgataatacgacggtttaatacacacagtattatctacgaaactttgataagttagatcagtgtacgtatatttagatgttttcagcttagctaatcctgatattaattctgtaaatgctggacccagatctctttttctcaaatccatagtcttcaataattctattctagtattacctgatgcaggcaatagcgacataaacatagaaaacgaatagccaaacggcgagaagacaatattatcatcttgaatatttttatacgctactataccggcattggtaaatccttgcagacgataggtagacgctgaacacgttaacgatagtatcaataacgcaatcatgattttatggtattaataattaaccttatttttatgttcggtataaaaaaattattgatgtctacacatccttttgtaattgacatctatatatccttttgtataatcaactctaatcactttaacttttacagttttccctaccagtttatccctatattcaacatatctatccatatgcatcttaacactctctgccaagatagcttcagagtgaggatagtcaaaaagataaatatatagagcataatccttctcgtatactctgccctttattacatcgcccgcattgggcaacgaataacaaaatgcaagcatcttgttaacgggctcgtaaattgggataaaaattatgtttttatatctattttattcaagagaatattcaggaatttctttttccggttgtatctcgtcgcagtatatatcatttgtacattgtttcatattttttaatagtttacaccttttagtaggactagtatcgtacaattcatagctgtattttgaattccaatcacgcataaaaatatcttccaattgttgacgaagacctaatccatcatccggtgtaatattaatagatgctccacatgtatccgtaaagtaatttcctgtccaatttgaggtacctatataggccgttttatcggttaccatatatttggcatggtttaccctagaatacggaatgggaggatcagcatctggtacaataaatagctttacttctatatctatgtttttagattttagcatagcgatagatcttaaaaagtttctcatgataaacgaagatcgttgccagcaactaatcaatagcttaacggatacttgtctgtctatagcggatcttcttaattcatcttctatataaggccaaaacaaaattttacccgccttcgaataaataatagggataaagttcataacagatacataaacgaatttactcgcatttctaatacatgacaataaagcggttaaatcattggttctttccatagtacatagttgttgcggcgcagaagcaataaatacagagtgtggaacaccacttacgttaatactaagaggatgatctgtattataatacgacggataaaagtttttccaattatatggtagattgttaactccaagataccagtatacctcaaaaatttgagtgagatccgctgccaagttcctattattgaagatcgcaatacccaattctttgacctgagttagtgatctccaatccatgttagcgcttcctaaataaatatgtgtattatcagatatccaaaattttgtatgaagaactcctcctaggatatttgtaatatctatgtatcgtacttcaactccggccatttgtagtctttcaacatcctttaatggtttgttagatttattgacggctactctaactcttactcctcttttgggtaattgtacaatctcgtttaatattatcgtgccgaaattcgtacccacttcatccgataaactccaataaaaagatgatatatctagtgtttttgtggtattggatagaatttccctccacatgttaaatgtagacaaatatactttatcaaattgcatacctataggaatagtctctgtaatcactgcgattgtattatccggattcattttatttgttaaaaaataatcctatatcacttcactctattaaaaatccaagtttctatttctttcatgactgattttttaacttcatccgtttccttatgaagatgatgtttggcaccttcataaatttttatttctctattacaatttgcatgttgcatgaaataatatgcacctaaaacatcgctaatctcattgtttgttccctggagtatgagagtcgggggggtgttaatcttggaaattatttttctaaccttgttggtagccttcaagacctgactagcaaatccagccttaattttttcatgattgattaatgggtcgtattggtatttataaactttatccatatctctagatactgattctggacatagctttccgactggcgcatttggtgtgatggttcccataagtttggcagctagcagattcagttttgaaacagcatctgcattaactagaggagacattagaatcattgctgtaaacaagtttggattatcgtaagaggctagtatagaaattgttgctcccatggaatgacccaataagtagatttaatagttaccacgtgctgtaccaaagtcatcaatcatcattttttcaccattacttcttccatgtccaatatgatcatgtgagaatactaaaattcctaacgatgatatgttttcagctagttcgtcataacgtccagaatgtttaccagctccatgacttatgaatactaatgccttaggatatgtaataggtttccaatatttacaatatatgtaatcattgtccagattgaacatacagtttgcactcatgattcacgttatataactatcaatattaacagttcgtttgatgatcatattatttttatgttttattgataattgtaaaaacatacaattaaatcaatatagaggaaggagacggatactgtcttttgtgagatagtcatggcgactaaatcagattatgaggatgctgttttttactttgtggatgatgataaaatatgtagtcgcgactccatcatcgatctaatagatgaatatatcacgtggagaaatcatgttatagtgtttaacaaagatattaccagttgtggaagactgtacaaggaattgatgaagttcgatgatgccgctatacagtactatggtattgataaaattaatgagattgtcgaagctatgagcgaaggagaccactacatcaattttacaaaagtccatgatcaggaaagtttattcgctaccataggaatatgtgctaaaatcactgaacattggggatacaaaaagatttcagaatctagattccaatcattgggaaacattacagatctgatgaccgacgataatataaacatcttgatactttttctagaaaaaaaattgaattgatgatataggggtcttcataacgcataattattacgttagcattctatatccgtgttaaaaaaaattatcctatcatgtatttgagagttttatatgtagcaaacatgatagctgtgatgccaataagctttagatattcacgcgtgctagtgttagggatggtattatctggtggtgaaatgtccgttatataatctacaaaacaatcatcgcatatagtatgcgatagtagagtaaacatttttatcgtttctactgggttcatacatcgtctacccaattcggttatgaatgaaattgtcgccaatcttacacccaaacccttgttatccattagcatagtattaacttcgttatttatgtcataaactgtaaatgattctgtagatgccatatcatacatgatattcatgtccctattataatcattactaactttatcacaatatatgttgataatatctatatatgatctagtctttgtgggcaactgtctatacaagtcgtctaaacgttgtttactcatatagtatcgaacagccatcattacatggtcccgttccgttgatagataatcgagtatgttagtggacttgtcaaatctatataccatattttctggaagtggatatacatagtcgtgatcaacattattgctagcctcatcttctatatcctgtactataccattatctatatcatctacataatctacgatattattatacataaacatcgacaacatactattgtcaattatctaagtcctgttgatccaaacccttgatctcctctatctgtactatctagagattgtacttcttccagttctggataatatatacgttgatagattagctgggctattctatcccccgtatttacattaaacgtacattttccattattaataagaataactcctatgtttcccctataatcttcgtctattacaccgcctcctatatcaatgccttttagggacagaccagacctaggagctattctaccatagcagaacttaggcatggacatactaatatctgtcttaattaactgtcgttctccaggagggatagtataatcgtaagcgctatataaatcatatccggcggcgtaaggtgattgcctagtaggagatttagctctgttagtttccttaacaaatctaactggtgagttaatattcatgttgaacataaaactaatattttatttcaaaattatttaccatcccatatattccatgaataagtgtgatgattgtacacttctatagtatctatatacgattcacgataaaatcctcctatcaatagcagtttattatccactatgatcaattctggattatccctcggataaataggatcatctatcagagtccatgtattgctggattcacaataaaattccgcatttctaccaaccaagaataaccttctaccgaacactaacgcgcatgatttataatgaggataataagtggatggtccaaactgccactgatcatgattgggtagcaaatattctgtagttgtatcagtttcagaatgtcctcccattacgtatataacattgtttatagatgccactgctggattacatctaggtttcagaagactcggcatattaacccaagcagcatccccgtggaaccaacgctcaacagatgtgggatttggtagacctcctactacgtataatttattgttagcgggtatcccgctagcatacagtctggggctattcatcggaggaattggaatccaattgtttgatatataatttacagctatagcattgttatgtatttcattgttcatccatccaccgatgagatatactacttctccaacatgagtacttgtacacatatggaatatatctataatttgatccatgttcataggatactctatgaatggatacttgtatgatttgcgtggttgtttatcacaatgaaatattttggtacagtctagtatccattttacattatttatacctctgggagaaagataatttgacctgattacatttttgataaggagtagcagatttcctaatttatttcttcgctttatataccacttaatgacaaaatcaactacataatcctcatctggaacatttagttcatcgctttctagaataagtttcatagatagataatcaaaattgtctatgatgtcatcttccagttccaaaaagtgtttggcaataaagtttttagtatgacataagagattggatagtccgtattctatacccatcatgtaacactcgacacaatattcctttctaaaatctcgtaagataaagtttatacaagtgtagatgataaattctacagaggttaatatagaagcacgtaataaattgacgacgttatgactatctatatatacctttccagtatatgagtaaataactatagaagttaaactgtgaatgtcaaggtctagacaaacccttgtaactggatctttatttttcgtgtatttttgacgtaaatgtgtgcgaaagtaaggagataactttttcaatatcgtagaattgactattatattgccacctatagcatcaataattgttttgaatttcttagtcatagacaatgctaatatattcttacagtacacagtattaacaaatatcggcatttatgtttctttaaaagtcaacatctagagaaaaatgattatctttttgagacataactcccattttttggtattcacccacacgtttttcgaaaaaattagtttttccttccaatgatatattttccatgaaatcaaacggattggtaacattataaatttttttaaatcccaattcagaaatcaatctatccgcgacgaattctatatatgttttcatcatttcacaattcattcctataagtttaactggaagagccgcagtaagaaattcttgttcaatggatactgcatctgttataatagatctaacggtttcttcactcggtggatacaataaatgtttaaacatcaaacatgcgaagtcgcagtgtagaccctcgtctctactaattagttcgttggaaaacgtgagtccgggcattaggccacgctttttaagccaaaatatggaagcgaatgatccggaaaagaagattccttctactgcagcaaaggcaataagtctctctccataaccggcgctgtcatgtatccacttttgagcccaatcggccttcttttttacacaaggcattgtttctatggcattaaagagatagtttttttcattactatctttaacataagtatcgatcaaaagactatacatttccgaatgaatgttttcaatggccatctgaaatccgtagaaacatctagcctcggtaatctgtacttctgtacaaaatcgttccgccaaattttcattcactattccgtcactggctgcaaaaaacgccaatacatgttttataaaatatttttcgtctggtgttagtttattccaatcattgatatctttagatatatctacttcttccactgtccaaaatgatgcctctgcctttttatacatgttccagatgtcatgatattggattgggaaaataacaaatctatttggatttggtgcaaggatgggttccataactaaattaacaatatcaataaattttttttcagttatctatatgcctgtacttggattttttgtacatcgatatcgccgcaatcactacaataattacaagtattattgatagcattgttattagtactatcataattaaattatcgacattcatgggtgctgaataatcgttattatcatcattatcattttgtaattgtgacatcatactaaataaatcgtttgcgagattgttgtgggaagcgggcatggaggatgcattatcattattatttaacgccttccatttggattcacaaatatggcgcgcgttcaacattttatggaaactataattttgtgaaaacagataacaagaaaactcgtcatcgttcaaatttttaacgatagtaaaccgattaaacgtcgagctaatttctaacgctagcgactctgttggatatgggtttccagatatatatcttttcagttcccctacgtatctataatcatctgtaggaaatggaagatatttccatttatctactgttcctaatatcatatgtggtggtgtagtagaaccattaagcgcgaaagatgttatttcgcatcgtattttaacttcgcaataatttctggttagataacgcactctaccagtcaagtcaatgatattagcctttacagatatattcatagtagtcgtaacgatgactccatcttttagatgcgatactcctttgtatgtaccagaatcttcgtacctcaaactcgatatatttaaacaagttaatgagatattaacgcgttttatgaatgatgatatataaccagaagttttatcctcggtggctagcgctataaccttatcattataataccaactagtgtgattaatatgtgacacgtcagtgtgggtacaaatatgtacattatcgtctacgtcgtattcgatacatccgcatacagccaacaaatataaaatgacaaatactctaacgccgttcgtacccatcttgatgcggtttaataaatgttttgatttcaatttattgtaaaaaaagattcggttttatactgttcgatattctcattgcttatattctcatctatcatctccacacagtcaaatccgtggttagcatgcacctcatcaaccggtaaaagactatcggactcttctatcattataactctagaatatttaatttggtcattattaatcaagtcaattatcttatttttaacaaacgtgagtattttactcattttttataaaaacttttagaaatatacagactctatcgtgtgtctatatcttctttttatatccaatgtatttatgtctgatttttcttcatttatcatatataatggtccaaattctacacgtgcttcggattcatccagatcattaaggttcttataattgtaacatccttctcttccctcttctacatcttccttcttattcttattcttagcgtcacagaatctaccacagcaggatcccatgacgagcgtcatattaaactaatccattttcaattataatatatgattagtaatgaccattaaaataaaaaatattcttcataaccggcaagaaagtgaaaagttcacattgaaactatgtcagtagtatacatcatgaaatgatgatatatatatactctattttggtggaggattatatgatataattcgtggataatcattcttaagacacatttcttcattcgtaaatcttttcacgttaaatgagtgtccatattttgcaatttcttcatatgatggcggtgtacgtggacgaggctgctcctgttcttgttgtggtcgccgactgtcgtgtttgcgtttatccctccattatcgcgattgcgtagatggagtactattatataccttgtaattaaatttttttattaattaaacgtataaaaacgttccgtatctgtatttaagagccagatttcgtctaatagaacaaatagctacagtaaaaataactagaataattgctacacccactagaaaccacggatcgtaatacggcaatcggttttcgataataggtggaacgtatattttatttaaggacttaacaattgtctgtaaaccacaatttgcttccgcggatcctgtattaactatctgtaaaagcatatgttggccgggcggagccgaacattctccgatatccaatttctgtatatctataatattattaacctccgcatacgcattacagttcttttctagcttggataccgcactaggtacatcgtctagatctattcctatttcctcagcgatagctcttctatccttttccggaagcaatgaaatcacttcaataaatgattcaaccatgagtgtgaaactaagtcgagaattactcatgcatttgttagttattcggagcgcgcaatttttaaactgtcctataacctctcctatatgaatagcacaagtgacattagtagggatagaatgttgagctaatttttgtaaataactatctataaaaagattatacaaagttttaaactctttagtttccgccatttatccagtctgagaaaatgtctctcataataaatttttccaagaaactaattgggtgaagaatggaaacctttaatctatatttatcacagtctgttttggtacacatgatgaattcttctaatgccgtactaaattcgatatctttttcgatttctggatatgtttttaataaagtatgaacaaagaaatggaaatcgtaataccagttatgtttaactttgaaattgttttttattttcttgttaatgattccagccacttgggaaaagtcaaagtcgtttaatgccgatttaatacgttcattaaaaacaaactttttatcctttagatgaattattattggttcattggaatcaaaaagtaagatattatcgggtttaagatctgcgtgtaaaaagttgtcgcagcatggtagttcgtagattttaatgtataacagagccatctgtaaaaagataaactttatgtattgtaccaaagatttaaatcctaatttgatagctaactcggtatctactttatctgccgaatacagtgctaggggaaaaattataatgtttcctctttcgtattcgtagttagttctcttttcatgttcgaaaaagtgaaacatgcggttaaaatagtttataacattaatattactgttaataactgccgggtaaaagtgggatagtaatttcacgaatttgatactgtcctttctctcgttaaacgcctttagaaaaactttagaagaatatctcaatgatagttcctgaccatccatagtttgtatcaataatagcaacatatgaagaacacgtttatacagagtatgtaaaaatgttaatttatagtttaatcccatggcccacgcacacacgattaattttttttcatctccctttagattgttgtatagaaatttgggtactgtgaactccgccgtagtttccatgggactatataattttgtggcctcgaatacaaattttactacatagttatctatcttaaaaactataccatatcctcctgtagatatgtgataaaaatcgtcgtttataggataaaatcgtttatccttttgttggaaaaaggatgaattaatgtaatcattctcttctatctttagtagtgtttccttattaaaattcttaaaataatttaacaatctaactgacggagcccaattttggtgtaaatctaattgggacattatattgttaaaatacaaacagtctcctaatataacagtatctgataatctatggggagacatccattgatattcaggggatgaatcattggcaacacccatttattgtacaaaaagccccaatttacaaacgaaagtccaggtttgatagagacaaactattaactattttgtctctgtttttaacacctccacagtttttaatttctttagtaatgaaattattcacaatatcagtatcttctttatctaccagagattttactaacttgataaccttggctgtctcattcaatagggtagtaatatttgtatgtgtgatattgatatctttttgaattgtttcttttagaagtgattctttgatggtgccagcatacgaattacaataatgcagaaactcggttaacatgcaggaattatagtaagccaattccaattgttgcctgtgttgtattagagtgtcaatatgagcaatggtgtccttgcgtttctctgatagaatgcgagcagcgattttggcgttatcatttgacgatatttctggaatgacgaatcctgtttctactaactttttggtaggacaaagtgaaacaatcaagaagatagcttctcctcctatttgtggaagaaattgaactcctctagatgatctactgacgatagtatctccttgacagatattggaccgaattacagaagtacctggaatgtaaagccctgaaaccccctcattttttaagcagattgttgccgtaaatcctgcactgtgaccaagatagagagctcctttggtgaatccatctctatgtttcagtttaaccaagaaacagtcagctggtctaaaatttccatctctatctaatacagcatctaacttgatgtcaggaactatgaccggtttaatgttatatgtaacattgagtaaatccttaagttcataatcatcactgtcatcagttatgtacgatccaaacaatgtttctactggcatagtggatacgaagatgctatccatcagaatgtttccctgattagtattttctatatagctattcttctttaaacgattttccaaatcagtaactatgttcatttttttaggagtaggacgcctagccagtatggaagaggattttctagatcctctcttcaacatctttgatctcaatggaatgcaaaaccccatagtgaaacaaccaacgataaaaataatattgtttttcactttttataattttaccatctgactcatggattcattaatatctttataagagctactaacgtataattctttataactgaactgagatatatacaccggatctatggtttccataattgagtaaatgaatgctcggcaataactaatggcaaatgtataaaacaacgaaattatactagagttgttaaagttaatattttctatgagctgttccaataaattatttgttgtgactgcgttcaagtcataaatcatcttgatactatccagtaaacagtctttaagttctggaatattatcatcccattgtaaagcccctaattcgactatcgaatatcctgctctgatagcagtttcaatatcgacggacgtcaatactgtaataaaggtggtagtattgtcatcatcgtgataaactacgggaatatggtcgttagtaggtacggtgactttacacaacgcgatatataactttccttttgtaccatttttaacgtagttgggacgtcctgcagggtattgttttgaagaaatgatatcgagaacagatttgatacgatatttgttggattcctgattattcactataatataatctagacagatagatgattcgataaatagagaaggtatatcgttggtaggataatacatccccattccagtattctcggatactctattgatgacactagttaagaacatgtcttctattctagaaaacgaaaacatcctacatggactcattaaaacttctaacgctcctgattgtgtctcgaatgcctcgtacaaggatttcaaggatgccatagattctttgaccaacgatttagaattgcgtttagcatctgatttttttattaaatcgaatggtcggctctctggtttgctaccccaatgataacaatagtcttgtaaagataaaccgcaagaaaatttatacgcatccatccaaataaccctagcaccatcggatgatattaatgtattattatagattttccatccacaattattgggccagtatactgttagcaacggtatatcgaatagattactcatgtaacctactagaatgatagttcgtgtactagtcataatatctttaatccaatctaagaaatttaaaattagattttttacactgttaaagttaacaaaggtattacccggatacgtggatatcatatatggcattggtccattatcagtaatagctccataaactgatacggcgatggtttttatatgtgtttgatctaacgaggaagaaattcgcgcccacaattcatctctagatatgtatttaatatcaaacggtaacacatcaatttcgggacgcgtatatgtttctaaatttttaatccaaatataatgatgacctatatgccctattatcatactgtcaactatagtacacctagagaacttacgatacatctgtttcctataatcgttaaattttacaaatctataacatgctaaaccttttgacgacaaccattcattaatttctgatatggaatctgtattctcgataccgtattgttctaaagccagtgctatatctccctgttcgtgggaacgctttcgtataatatcgatcaacggataatctgaagtttttggagaataatatgactcatgatctatttcgtccataaacaatctagacataggaattggaggcgatgatcttaattttgtgcaatgagtcgtcaatcctataacttctaatattgtaatattcatcatcgacataacactatctatgttatcatcgtatattagtataccacggccttcttcatttcgtgccaaaataatatacagtcttaaataattacgcaatatctcaatagtttcataattgttagctgttttcatcaaggtttgtatcctgtttaacatgatggcgttctataacgtctctattttctatttttaattttttaaatttttaacgatttactgtggctagatacccaatctctctcaaatatttttttagcctcgcttacaagctgtttatctatactattaaaactgacgaatccgtgattttggtaatgggttccgtcgaaatttgccgaagtgatatgaacatattcgtcgtcgactatcaacaattttgtattattctgaatagtgaaaaccttcacagatagatcattttgaacacacaacgcgtctagacttctggcggttgccatagaatatacgtcgttcttatcccaattaccaactagaagtctgatcttaactcctctattaatggctgcttctataatggagttgtaaatgtcaggccaatagtagctattaccgtcgacacgtgtagtgggaactatggccaaatgttcaatatctatactagtcttagccgacttgagtttatcaataactacatcagtgtctagatctctagaatatcccaataggtgttctggagaatcagtaaagaacactccacctataggattcttaatatgatacgcagtgctaactggcagacaacaagccgcagagcataaattcaaccatgaattttttgcgctattaaaggctttaaaagtatcaaatcttctacgaagatctgtggccagcgggggataatcagaatatacacctaacgttttaatcgtatgtatagatcctccagtaaatgacgcgtttcctacataacatctttcatcatctgacacccaaaaacaaccgagtagtagtcccacattattttttttatctatattaacggttataaaatttatatccgggcagtgactttgtagctctcccagatttcttttccctcgttcatctagcaaaactattattttaatccctttttcagatgcctcttttagtttatcaaaaataagcgcgcccctagtcgtactcagaggattacaacaaaaagatgctatgtatatatatttcttagctagagtgataatttcgttaaaacattcaaatgttgttaaatgatcggatctaaaatccatattttctggtagtgtttctaccagcctacattttgctcccgcaggtaccggtgcaaatggccacatttagttaacataaaaacttatacatcctgttctatcaacgattctagaatatcatcggctatatcgctaaaattttcatcaaagtcgacatcacaacctaactcagtcaatatattaagaagttccatgatgtcatcttcgtttatttctatatccgtatccattgtagattgttgaccgattatcgagtttaaatcattactaatactcaatccttcagaatacaatctgtgtttcattgtaaatttataggcggtgtatttaagttggtagattttcaattatgtatcaatatagcaacagtagttcttgctcctccttgattctagcatcctcttcattattttcttctacgtacataagcatgtccaatacgttagacaacacaccgacgatggcggccgccacagacacgaatatgactagaccgatgaccatttaaaaacccctctctagctttcacttaaactgtatcgattattcttttagaacatgtataatataaaaacattattctatttcgaatttaggcttccaaaaatttttcatccgtaaaccgataataatatatatagacttgttaatagtcggaataaatagattaatgcttaaactatcatcatctccacgattagagatacaatatttacattctttttgctgtttcgaaactttatcaatacacgttaatacaaacccaggaaggagatattgaaactgaggctgttgaaaatgaaacggtgaatacaataattcagataatgtaaaatcatgattccgtattctgatgatattagaactgctaatggatgtcgatggtatgtatctaggagtatctattttaacaaagcatcgatttgctaatatacaattatcattttgattaattgttattttattcatattcttaaaaggtttcatatttatcaattcttctacattaaaaatttccatttttaatttatgtagccccgcaatactcctcattacgtttcattttttgtctataatatccattttgttcatctcggtacatagattatccaattgagaagcgcatttagtagttttgtacattttaagtttattgacgaatcgtcgaaaactagttatagttaacattttattatttgataccctgatattaatacccctgccgttactattatttataactgatgtaacccacgtaacattagaattaattatcgatagtaatgcatcgacgcttccaaaattgtctattataaactcaccgataatttttttattgcatgttttcatattcattaggattatcaaatctttaatcttattacgattgtatgcgttgatattacaagacgtcattctaaaagacggaggatctccatcaaatgccagacaatcacgtacaaagtacatggaaataggttttgttctattgcgcatcatagattcatatagaacacccatagaaatactaatttgttttactctataaaatactaatgcatctatttcatcgttttgtataacgtctttccaagtgccaaattccaaatttttttcattgatagtaccaaattcttctatctctttaactacttgcatagataggtaattacagtgatgcctacatgccgttttttgaaactgaatagatgcgtctagaagcgatgctacactagtcacaatcaccactttcatatttagaatatatgtatgtaaaaatatagtagaatttcattttgtttttttctatgctataaatgaattctcattttgcatctgctcatactccgttttatatcaataccaaagaaggaagatatctggttctaaaagccgttaaagtatgcgatgttagaactgtagaatgcgaaggaagtaaagcttcctgcgtactcaaagtagataaaccctcatcgcccgcgtgtgagagaagaccttcgtccccgtccagatgcgagagaatgaataaccctggaaaacaagtcccgtttatgaggacggacatgctacaaaatatgttcgcggctaatcgcgataatgtagcttctagacttttgtcctaaaatactattatatccttttcgatattaataaatccgtgtcgtccaggttttttatctctttcagtatgtgaatagataggtattttatctctattcatcatcgaatttaagagatccgataaacattgtttgtattctccagatgtcagcatctgatacaacaatatatgtgcacataaacctctggcacttatttcatgtaccttccccttatcactaaggagaatagtatttgagaaatatgtatacatgatattatcatgaattagatatacagaatttgtaacactctcgaaatcacacgatgtgtcggcgttaagatctaatatatcactcgataacacattttcatctagatacactagacattttttaaagctaaaatagtctttagtagtgacagtaactatgcgattattttcatcgatgatacatttcatcggcatattattacgcttaccatcaaagactataccatgtgtatatctaacgtattctagcatggttgccatacgtgcattaaacttttcaggatctttggatagatcttccaatctatctatttgagaaaacatttttatcatgttcaatagttgaaacgtcggatccactatatagatattatctataaagattttaggaactacgttcatggtatcctggcgaatattaaaactatcaatgatatgattatcgttttcatcttttatcaccatatagtttctaagatatgggattttacttaatataatattatttcccgtgataaattttattagaaaggccaaatctataagaaaagtcctagaattagtctgaagaatatctatatcgccgtaccgtatatttggattaattagatatagagaatatgatccgtaacatatacaacttttattatggcgtctaagatattcttccatcaacttattaacatttttgactagggaagatacattatgacgtcccattacttttgccttgtctattactgcgacgttcatagaatttagcatatctcttgccaattcttccattgatgttacattataagaaattttagatgaaattacatttggagctttaatagtaagaactcctaatatgtccgtgtatgtggtcactaatacagattgtagttctataatcgtaaataatttacctatattatatgtttgagtctgtttagaaaagtagctaagtatacgatcttttatttctgatgcagatgtatcaacatcggaaaaaaatctttttttattcttttttactaaagatacaaatatgtctttgttaaaaacagttattttctgaatatttctagcttgtaattttaacatatgatattcgttcacactaggtactctgcctaaataggtttctataatctttaatgtaatattaggaagagtattctgatcaggattcctattcattttgaggatttaaaactctgattattgtctaatatggtctcaacacaaactttttcacagagcgatagagtttttgataactcgtttttcttaagaaatataaaactactgtttccagagctcgctctatcttttattttatctaattcgatacaaactcctgatactggttcagaaagtaattcattaattttcagtcctttatagaagatatttaatatagataatacaaaattttcagttcttgatatcgatctgattgatcctagaactagatatattaataacgtgctcattaggcagtttatggcagcttgataattagatatagtatattccagttcatatttattagataccgcattgcccagattttgatattctatgaattcctctgaaaataaatccaaaataactagacattctattttttgtggattagtgtactctcttccctctatcatgttcactactggtgtccacgatgataaatatctagagggaatataatatagtccataggatgccaatctagcaatgtcgaataactgtaatttgattcttcgttcttcattatgaattgattcttgaggtataaacctaacacaaattatattattagacttttcgtatgtaatgtctttcatgttataagtttttaatcctggaatagaatctattttaatgaggcttttaaacgcagagttctccaacgagtcaaagcataatactctgttgtttttcttatatacgatgttacgattttcttctttgaatggaataggtttttgaattagtttataattacaacataatagataaggaagtgtgcaaatagtacgcggaaaaaacataatagctcccctgttttcatccatggttttaagtaaatgatcactggcttctttagtcaatggatattcgaacattaaccgtttcatcatcattggacagaatccatatttcttaatgtaaagagtgatcaaatcattgtgtttattgtaccatcttgttgtaaatgtgtattcggttatcggatctgctcctttttctattaaagtatcgatgtcgatctcgtctaagaattcaactatatcgacatatttcatttgtatacacataaccattactaacgtagaatgtataggaagagatgtaacgggaacagggtttgttgattcgcaaactattctaatacataattcttctgttaatacgtcttgcacgtaatctattatagatgccaagatatctatataattattttgtaagatgatgttaactatgtgatctatataagtagtgtaataattcatgtatttcgatatatgttccaactctgtctttgtgatgtctagtttcgtaatatctatagcatcctcaaaaaatatattcgcatatattcccaagtcttcagttctatcttctaaaaaatcttcaacgtatggaatataataatctattttacctcttctgatatcattaatgatatagtttttgacactatcttctgtcaattgattcttattcactatatctaagaaacggatagcgtccctaggacgaactactgccattaatatctctattatagcttctggacataattcatctattataccagaattaatgggaactattccgtatctatctaacatagttttaagaaagtcagaatctaagacctgatgttcatatattggttcatacatgaaatgatctctattgatgatagtgactatttcattctctgaaaattggtaactcattctatatatgctttccttgttgatgaaggatagaatatactcaatagaatttgtaccaacaaactgttctcttatgaatcgtatatcatcatctgaaataatcatgtaaggcatacatttaacaattagagacttgtctcctgttatcaatatactattcttgtgataatttatgtgtgaggcaaatttgtccacgttctttaattttgttatagtagatatcaaatccaatggagctacagttcttggcttaaacagatatagtttttctggaacgaattctacaacattattataaaggactttgggtagataagtgggatgaaatcctattttaattaatgcgatagccttgtcctcgtgcagatatccaaacgcttttgtgatagtatggcattcattgtctagaaacgctctacgaatatctgtgacagatatcatctttagagaatatactagtcgcgttaatagtactacaatttgtattttttaatctatctcaataaaaaaattaatatgtatgattcaatgtataactaaactactaactgttattgataactagaatcagaatctaatgatgacgtaaccaagaagtttatctactgccaatttagctgcattatttttagcatctcgtttagattttccatctgccttatcgaatactcttccgtcgatgtctacacaggcataaaatgtaggagagttactaggccccactgattcaatacgaaaagaccaatctctcctagtaatttggcagtactcattaataacggtgacagggttagcacctttccaatcaataatttttttagccggaataacatcatcaaaagacttatgatcctctctcattgatttttcgcgggatacatcatctattatggcgtcagccataacatcagcatccggcttatccgcctccgttgtcataaaccaacgaggaggaatatcgtcggagctgtacaccatagcactacgttgaagatcgtacagagctttattaacttctcgcttctccatattaagttgtctagttagttgtgcagcagtagctccttcgattccaatggttttaatagcctcacacacaatctctgcgttagaacgttcgtcgatatagattttagacatttttagagagaactaacacaaccagcaataaaactgaacctactttatcatttttttattcatcatcctctggtggttcgtcgttcctatcgaatgtggatctgattaacccgtcatctataggtgatgctggttctggagattctggaggagatggattattatctggaagaatctctgttatttccttgttttcatgtatcgattgcgttgtaacattaagattgcgaaatgctctaaatttgggaggcttaaagtgttgtttgcaatctctacacgcatgtctaactagtggaggttcgtcagcggctctagtttgaatcatcatcggcgtagtattcctacttttacagttaggacacggtgtattgtatttctcgtcgagaacgttaaaataatcgttgtaactcacatcctttattttatctatattgtattctactcctttcttaatgcattttataccgaataagagatagcgaaggaattctttttcggtgccgctagtacccttaatcatatcacatagtgttttatattccaaatttgtggcaatagacggtttatttctatacgatagtttgtttctggaatcctttgagtattctataccaatattattctttgattcgaatttagtttcttcgatattagattttgtattacctatattcttgatgtagtactttgatgatttttccatggcccattctattaagtcttccaagttggcatcatccacatattgtgatagtaattctcggatatcagtagcggctaccgccattgatgtttgttcattggatgagtaactactaatgtatacattttccatttataacacttatgtattaactttgttcatttatattttttcattattatgttgatattaacaaaagtgaatatatatgttaataattgtattgtggttatacggctacaatttcataatgagtggaagtcagtgtccgatgatcaatgacgatagctttactctgaaaagaaagtatcaaatcgatagtgcggagtcaacaataaaaatggataagaagaggataaagtttcagaatagagccaaaatggtaaaagaaataaatcagacaataagagcagcacaaactcattacgagacattgaaactaggatacataaaatttaagagaatgattaggactactactctagaagatatagcaccatctattccaaataatcagaaaacttataaactattctcggacatttcagccatcggcaaagcatcacagaatccgagtaagatggtatatgctctgctgctttacatgtttcccaatttgtttggagatgaccatagattcattcgttatagaatgcatccaatgagtaaaatcaaacacaagatcttctctcctttcaaacttaatcttattagaatattagtggaagaaagattctataataatgaatgcagatctaataaatggagaataattggaacacaagttgataaaatgttgatagctgaatctgataaatatacaatagatgcaaggtataacctaaaacccatgtatagaatcaagggaaaatctgaagaagataccctcttcatcaaacagatggtagaacaatgtgtgacatcccaggaattggtggaaaaagtgttgaagatactgtttagagatttgttcaagagtggagaatacaaagcatacagatacgatgatgatgtagaaaatggatttattggattggatacactaaaattaaacattgttcatgatatagttgaaccatgtatgcctgttcgtaggccagtggctaagatactgtgtaaagaaatggtaaataaatactttgagaatccgctacatattattggtaaaaatcttcaagagtgcattgactttgttagtgaataggcatttcatctttctccaatactaattcaaattgttaaattaataatggatagtataaatagttattagtgataaaatagtaaaaataattattagaataagagtgtagtatcatagataactctcttctataaaaatggattttattcgtagaaagtatcttatatacacagtagaaaataatatagattttttaaaggatgatacattaagtaaagtaaacaattttaccctcaatcatgtactagctctcaagtatctagttagcaattttcctcaacacgttattactaaggatgtattagctaataccaatttttttgttttcatacatatggtacgatgttgtaaagtgtacgaagcggttttacgacacgcatttgatgcacccacgttgtacgttaaagcattgactaagaattatttatcgtttagtaacgcaatacaatcgtacaaggaaaccgtgcataaactaacacaagatgaaaaatttttagaggttgccgaatacatggacgaattaggagaacttataggcgtaaattatgacttagttcttaatccattatttcacggaggggaacccatcaaagatatggaaatcatttttttaaaactgtttaagaaaacagacttcaaagttgttaaaaaattaagtgttataagattacttatttgggcatacctaagcaagaaagatacaggcatagagtttgcggataatgatagacaagatatatatactctatttcaacaaactggtagaatcgtccatagcaatctaacagaaacgtttagagattatatctttcccggagataagactagctattgggtgtggttaaacgaaagtatagctaatgatgcggatatcgttcttaatagacacgccattaccatgtatgataaaattcttagttatatatactctgagataaaacaaggacgcgttaataaaaacatgcttaagttagtttatatctttgagcctgaaaaagatatcagagaacttctgctagaaatcatatatgatattcctggagatatcctatctattattgatgcaaaaaacgacgattggaaaaaatattttattagtttttataaagctaattttattaacggtaatacatttattagtgatagaacgtttaacgaggacttattcagagttgttgttcaaatagatcccgaatatttcgataatgaacgaattatgtctttattctctacgagtgctgcggacattaaacgatttgatgagttagatattaataacagttatatatctaatataatttatgaggtgaacgatatcacattagatacaatggatgatatgaagaagtgtcaaatctttaacgaggatacgtcgtattatgttaaggaatacaatacatacctgtttttgcacgagtcggatcccatggtcatagagaacggaatactaaagaaactgtcatctataaaatccaagagtagacggctgaacttgtttagcaaaaacattttaaaatattatttagacggacaattggctcgtctaggtcttgtgttagatgattataaaggagacttgttagttaaaatgataaaccatcttaagtctgtggaggatgtatccgcattcgttcgattttctacagataaaaaccctagtattcttccatcgctaatcaaaactattttagctagttataatatttccatcatcgtcttatttcaaaggtttttgagagataatctatatcatgtagaagaattcttggataaaagcatccatctaaccaagacggataagaaatatatacttcaattgataagacacggtagatcatagaacagaccaaatatattattaataatttgtatatacatagatataattatcacatattaaaaattcacacatttttgataaatgggaactgctgcaacaattcagactcccaccaaattaatgaataaagaaaatgcagaaatgattttggaaaaaattgttgatcatatagttatgtatattagtgacgaatcaagtgattcagaaaataatcctgaatatattgattttcgtaacagatacgaagactatagatctctcattataaaaagtgatcacgagtttgtaaagctatgtaaaaatcatgcagagaaaagttctccagaaacgcaacaaatgattatcaaacacatatacgaacaatatcttattccagtatctgaagtactattaaaacctataatgtccatgggtgacataattacatataacggatgtaaagacaatgaatggatgctagaacaactctctaccctaaactttaacaatctccgcacatggaactcatgtagcataggcaatgtaacgcgtctgttttatacattttttagttatctgatgaaagataaactaaatatataagtataatcccattctaatactttaacctgatgtattacctgcatcttattagaatattaacctaactaaaagacataacataaaaactcattacatagttgataaaaagcggtaggatataaatattatggctgccaccgttccgcgttttgacgacgtgtacaaaaatgcacaaagaagaattctagatcaagaaacattttttagtagaggtctaagtagaccgttaatgaaaaacacatatctatttgataattacgcgtatggatggataccagaaactgcaatttggagtagtagatacgcaaacttagatgcaagtgactattatcccatttcgttgggattacttaaaaagttcgagtttctcatgtctctatataaaggtcctattccagtatacgaagaaaaagtaaatactgaattcatagccaatggatcgttctctggtagatacgtatcatatcttcgaaagttttctgctcttccaacaaacgagtttattagttttttgttactgacttccattccaatctataatatcttgttctggtttaaaaatactcagtttgatattactaaacacacattattcagatacgtctatacagataatgccaaacacctggcgttggctaggtatatgcatcaaacaggagactataagcctttgtttagtcgtctcaaagagaattatatatttaccggtcccgttccaataggtatcaaagatatagatcaccctaatcttagtagagcaagaagtccatccgattatgagacattagctaatattagtactatattgtactttaccaagtatgatccggtattaatgtttttattgttttacgtacctgggtattcaattactacaaaaattactccagccgtagaatatctaatggataaactgaatctaacaaagagcgacgtacaactgttgtaaattattttatgcttcgtaaaatgtaggttttgaaccaaacattctttcaaagaatgagatgcataaaactttattatccaatagattgactatttcggacgtcaatcgtttaaagtaaacttcgtaaaatattctttgatcactgccgagtttaaaacttctatcgataattgtctcatatgttttaatatttacaagttttttggtccatggtacattagccggacaaatatatgcaaaataatatcgttctccaagttctatagtttctggattatttttattatattcagtaaccaaatacatattagggttatctgcggatttataatttgagtgatgcattcgactcaacataaataattctagaggagacgatctactatcaaattcggatcgtaaatctgtttctaaagaacggagaatatctatacatacctgattagaattcatccgtccttcagacaacatctcagacagtctggttttgtacatcttaatcatattcttatgaaacttggaaacatctcttctagtttcactagtacctttattaattctctcaggtacagattttgaattcgacgatgccgagtatttcatcgttgtatatttcttcttcgattgcataatcagattcttatataccgcctcaaactctattttaaaattattaaacaatactctactattaatcagtcgttctaactctttcgctatttctatagacttatctacatcttgactgtctatctctgtaaacacggagtcggtatctccatacacgctacgaaaacgaaatctgtaatctataggcaacgatgttttcacaatcggattaatatctctatcgtccatataaaatggattacttaatggattggcaaaccgtaacataccgttagataactctgctccatttagtaccgattctagatacaagatcattctacgtcctatggatgtgcaactcttagccgaagcgtatgagtatagagcactatttctaaatcccatcagaccatatactgagttggctactatcttgtacgtatattgcatggaatcataaatggccttttcagttgaactggtagcctgttttaacatctttttatatctggctctctctgccaaaaatgttcttaatagtctaggaatggttccttctatcgatctatcgaaaattgctatttcagagatgaggttcggtagtctaggttcacaatgaaccgtaatatatctaggaggtggatatttctgaagcaatagctgattatttatttcttcttccaatctattggtactaacaacgacaccgactaatgtttccggagatagatttccaaagatacacacattaggatacagactgttataatcaaagattaatacattattactaaacattttttgttttggagcaaataccttaccgccttcataaggaaacttttgttttgtttctgatctaactaagatagttttagtttccaacaatagctttaacagtggacccttgatgactgtactcgctctatattcgaataccatggattgaggaagcacatatgttgacgcacccgcgtctgtttttgtttctactccataatactcccacaaatactgacacaaacaagcatcatgaatacagtatctagccatatctaaagctatgtttagattataatccttatacatctgagctaaatcaacgtcatcctttccgaaagataatttatatgtatcattaggtaaagtaggacataatagtacgactttaaatccattttcccaaatatctttacgaattactttacatataatatcctcatcaacagtcacataattacctgtggttaaaacctttgcaaatgcagcggctttgcctttcgcgtccgtagtatcgtcaccgatgaacgtcatttctctaactcctctatttaatactttacccatgcaactgaacgcgttcttggatatagaatccaatttgtacgaatccaatttttcagatttttgaatgaatgaatatagatcgaaaaatatagttccattattgttattaacgtgaaacgtagtattggccatgccgcctactcccttatgactagactgatttctctcataaatacagagatgtacagcttcctttttgtccggagatctaaagataatcttctctcctgttaataactctagacgattagtaatatatctcagatcaaagttatgtccgttaaaggtaacgacgtagtcgaacgttagttccaacaattgtttagctattcgtaacaaaactatttcagaacatagaactagttctcgttcgtaatccatttccattagtgactgtatcctcaaacatcctctatcgacggcttcttgtatttcctgttccgttaacatctcttcattaatgagcgtaaacaataatcgtttaccacttaaatcgatataacagtaacttgtatgcgagattgggttaataaatacagaaggaaacttcttatcgaagtgacactctatatctagaaataagtacgatcttgggatatcgaatctaggtatttttttagcgaaacagttacgtggatcgtcacaatgataacatccattgttaatctttgtcaaatattgctcgtccaacgagtaacatccgtctggagatatcccgttagaaatataaaaccaactaatattgagaaattcatccatggtggcattttgtatgctgcgtttctttggctcttctatcaaccacatatctgcgacggagcattttctatctttaatatctagattataacttattgtctcgtcaatgtctatagttctcatctttcccaacggcctcgcattaaatggaggaggagacaatgactgatatatttcgtccgtcactacgtaataaaagtaatgaggaaatcgtataaatacggtctcaccatttcgacatctggatttcagatataaaaatctgttttcaccgtgactttcaaaccaattaatgcaccgaacatccatttatagaatttagaaatatattttcatttaaatgaatcccaaacattggggaagagccgtatggaccattatttttatagtactttcgcaagcgggtttagacggcaacatagaagcgtgtaaacgaaaactatatactatagtcagcactcttccatgtcctgcatgtagacggcacgcgactatcgctatagaggacaataatgtcatgtctagcgatgatctgaattatatttattattttttcatcagattatttaacaatttggcatctgatcccaaatacgcgatcgatgtgacaaaggttaaccctttataaacttaacccattataaaacttatgattagtcacaactgaaataaccgcgtgattattttttggtataattctacacggcatggtttctgtaactatgaattcaacccccgttacattagtgaaatctttaacaaacagcaagggttcgtcaaagacataaaactcattgtttacaatcgaaatagaccccctatcacacttaaaataaaaaatatccttatcctttaccaccaaataaaattctgattggtcaatgtgaatgtattcacttaacagttccacaaatttatttattaactccgaggcacatacatcgtcggtattttttatggcaaactttactcttccagcatccgtttctaaaaaaatattaacgagttccatttatatcatccaatattattgaaatgacgttgatggacagatgatacaaataagaaggtacggtacctttgtccaccatctcctccaattcatgctctattttgtcattaactttaatgtatgaaaacagtacgccacatgcttccatgacagtgtgtaacactttggatacaaaatgtttgacattagtataattgttcaagactgtcaatctataatagatagtagctataatatattctatgatggtattgaagaagatgacaaccttggcatattgatcatttaacacagacatggtatcaacagatagcttgaatgaaagagaatcagtaattggaataagcgtcttctcgatagagtgtccgtataccaacatgtctgatattttgatgtattccattaaattatttagttttttctttttattttcgttaaacagcatttctgtcaacggaccccaacatcgttgaccgattaagttttgattgatttttccgtgtaatgcgtatctagtcagatcgtatagcctatccaataatccatcatctgtgcgtagatcacatcgtacactttttaattctctatagaagagcgacagacatctggagcaattacagacagcaatttctttattctctacagatgtaagatacttgaagacattcctatgatgatgcagaattttggataacacggtattgatggtatctgttaccataattcctttgatggctgatagtgtcagagcacaagatttccaatctttgacaatttttagcaccattatctttgttttgatatctatatcagacagcatggtgcgtctgacaacacagggattaagacggaaagatgaaatgattctctcaacatcttcaatggataccttgctattttttctggcattatctatatgtgcgagaatatcctctagagaatcagtatcctttttgatgatagtggatctcaatgacatgggacgtctaaaccttcttattttatcaccagattgcatggtgatttgtcttctttcttttatcataatgtaatctctaaattcatcggcaaattgtctatatctaaaatcataatatgagatgtttacctctacaaatatctgttcgtccaatgttagagtatctacatcagttttgtattccaaattaaacatggcaacggatttaattttatattcctctattaagtcctcgtcgataataacagaatgtagataatcatttaatccatcgtacatggttggaagatgcttgttgacaaaatctttaattgtcttgatgaaggtgggactatatctaacatcttgattaataaaatttataacattgtccataggatactttgtaactagttttatacacatctcttcatcggtaagtttagacagaatatcgtgaacaggtggtatattatattcatcagatatacgaagaacaatgtccaaatctatattgtttaatatattatatagatgtagcgtagctcctacaggaatatctttaactaagtcaatgatttcatcaaccgttagatctattttaaagttaatcatataggcattgatttttaaaaggtatgtagccttgactacattctcattaattaaccattccaagtcactgtgtgtaagaagattatattctatcataagcttgactacatttggtcccgataccattaaagaattcttatgatataaggaaacagcttttaggtactcatctactctacaagaattttggagagccttaacgatatcagtgacgtttattatttcaggaggaaaaaacctaacattgagaatgtcggagttaatagcttccagatacagtgattttggcaatagtccgtgtaatccataatccagtaacacgagctggtgcttgctagacaccttttcaatgtttaatttttttgaaataagctttgataaagccttcctcgcaaattccggatacatgaacatgtcggcgacatgattaagtattgttttttcattatttttatattttctcaacaagttctcaataccccaatagatgatagaatatcacccaatgcgtccatgttgtctatttccaacaggtcgctatatccaccaatagaagtttttccaaaaaagattctaggaacagttctaccaccagtaatttgttcaaaatagtcacgcaattcattttcgggtttaaattctttaatatcgacaatttcatacgctcctcttttgaaactaaacttatttagaatatccagtgcatttctacaaaaaggacatgtatacttgacaaaaattgtcactttgttattggccaacctttgttgtacaaattcctcggccattttaatatttaagtgatataaaactatctcgacttatttaactctttagtcgagatatatggacgcagatagctatatgatagccaactacagaaggcaaacgctataaaaaacataattacgacgagcatatttataaatatttttattcagcattacttgatatagtaatattaggcacagtcaaacattcaaccactctcgatacattaactctctcattttctttaacaaattctgcaatatcttcgtaaaaagattcttgaaactttttagaatatctatcgactctagatgaaatagcgttcgtcaacatactatgttttgtatacataaaggcgcccattttaacagtttctagtgacaaaatgctagcgatcctaggatcctttagaatcacatagattgacgattcgtctctcttagtaactctagtaaaataatcatacaatctagtacgcgaaataatattatccttgacttgaggagatctaaacaatctagttttgagaacatcgataagttcatcgggaatgacatacatactatctttaatagaactcttttcatccagttgaatggattcgtccttaaccaactgattaatgagatcttctattttatcattttccagatgatatgtatgtccattaaagttaaattgtgtagcgcttctttttagtctagcagccaatactttaacatcactaatatcgatatacaaaggagatgatttatctatggtattaagaattcgtttttcgacatctgtcaaaaccaattcctttttgcctgtatcatccagttttccatcctttgtaaagaaattattttctactagactattaataagactgataaggattcctccataattgcacaatccaaactttttaacaaaactagactttacaagatctacaggaatgcgtacttcaggtttcttagcttgtgattttttcttttgtggacattttcttgtgaccaactcatctaccatttcattgattttagcagtgaaataagctttcaatgcacgggcactgatactattgaaaacgagttgatcttcaaattccgccatttaagttcaccaaacaacttttaaatacaaatatatcaatagtagtagaataagaactataaaaaaaataataattaaccaataccaaccccaacaaccggtattattagttgatgtgactgttttctcatcacttagaacagatttaacaatttctataaagtctgtcaaatcatcttccggagaccccataaatacaccaaatatagcggcgtacaacttatccatttatacattgaatattggcttttctttatcgctatcttcatcatattcatcatcaatatcaacaagtcccagattacgagccagatcttcttctacattttcagtcattgatacacgttcactatctccagagagtccgataacgttagccaccacttctctatcaatgattagtttcttgagtgcgaatgtaatttttgtttccgttccggatctatagaaaactacaggtgtgataattgccttggccaattgtctttctcttttactgagtgattctagttcaccttctatagatctgagaatggatgattctccagtcgaaacatattctaccatggatccgtttaatttgttgatgaagatggattcatccttaaatgttttctctgtaatagtttccaccgaaagactatgcaaagaatttggaatgcgttccttgtgcttaatgtttccatagacggcttctagaagttgatacaacataggactagccgcggtaacttttatttttagaaagtatccatcgcttctatcttgtttagatttatttttataaagtttagtctctccttccaacataataaaagtggaagtcatttgactagataaactatcagtaagttttatagagatagacgaacaattagcgtattgagaagcatttagtgtaacgtattcgatacattttgcattagatttactaatcgattttgcatactctataacacccgcacaagtctgtagagaatcgctagatgcagtaggtcttggtgaagtttcaactctcttcttgattaccttactcatgattaaacctaaataattgtactttgtaatataatgatatatattttcactttatctcatttgagaataaaaatgtttttgtttaaccactgcatgatgtacagatttcggaatcgcaaaccaccagtggttttattttatccttgtccaatgtgaattgaatgggagcggatgcgggtttcgtacgtagatagtacattcccgtttttagaccgagactccatccgtaaaaatgcatactcgttagtttggaataactcggatctgctatatggatattcatagattgactttgatcgatgaaggctcccctgtctgcagccatttttatgatcgtcttttgtggaatttcccaaatagttttataaactcgcttaatatcttctggaaggtttgtattctgaatggatccaccatctgccataatcctattcttgatctcatcattccataattttctctcggttaaaactctaaggagatgcggattaactacttgaaattctccagacaatactctccgagtgtaaatattactggtatacggttccaccgactcattatttcccaaaatttgagcagttgatgcagtcggcataggtgccaccaataaactatttctaagaccgtatgttctgattttatcttttagaggttcccaattccaaagatccgacggtacaacattccaaagatcatattgtagaataccgttactggcgtacgatcctacatatgtatcgtatggtccttccttctcagctagttcacaactcgcctctaatgcaccgtaataaatggtttcgaagatcttcttatttagatcttgtgcttccaggctatcaaatggataatttaagagaataaacgcgtccgctaatccttgaacaccaataccgataggtctatgtctcttattagagatttcagcttctggaataggataataattaatatctataattttattgagatttctgacaattactttgaccacatccttcagtttgagaaaatcaaatcgcccatctattacaaacatgttcaaggcaacagatgccagattacaaacggctacctcattagcatccgcatattgtattatctcagtgcaaagattactacacttgatagttcctaaattttgttgattactctttttgttacacgcatccttataaagaatgaatggagtaccagtttcaatctgagattctataatcgctttccagacgactcgagcctttattatagatttgtatctcctttctctttcgtatagtgtatacaatcgttcgaactcgtctccccaaacattgtccaatccaggacattcatccggacacatcaacgaccactctccgtcatccttcactcgtttcataaagagatcaggaatccaaagagctataaatagatctctggttctatgttcctcgtttcctgtattctttttaagatcgaggaacgccataatatcagaatgccacggttccaagtatatggccataactccaggccgtttgtttcctccctgatctatgtatctagcggtgttattataaactctcaacattggaataataccgtttgatataccattggtaccggagatatagcttccactggcacgaatattactaattgatagacctattccccctgccattttagagattaatgcgcatcgttttaacgtgtcatagataccctctatgctatcatcgatcatgttaagtagaaaacagctagacatttggtgacgactagttcccgcattaaataaggtaggagaagcgtgcgtaaaccatttttcagaaagtagattgtacgtctcaatagctgagtctatatcccattgatgaattcctactgcgacacgcattaacatgtgctgaggtctttcaacgatcttgttgtttattttcaacaagtaggatttttccaaagttttaaaaccaaaatagttgtatgaaaagtctcgttcgtaaataataaccgagttgagtttatccttatatttgttaactatatccatggtgatacttgaaataatcggagaatgtttcccatttttaggattaacatagttgaataaatcctccatcacttcactaaatagtttttttgtttccttgtgtagatttgatacggctattctggcggctagaatggcataatccggatgttgtgtagtacaagtggctgctatttcggctgccagagtgtccaattctaccgttgttactccattatatattccttgaataaccttcatagctattttaataggatctatatgatccgtgtttaagccataacataattttctaatacgagacgtgattttatcaaacatgacattttccttgtatccatttcgtttaatgacaaacatttttgttggtgtaataaaaaaattatttaacttttcattaatagggatttgacgtatgtagcgtacaaaattatcgttcctggtatatagataaagagtcctatatatttgaaaatcgttacggctcgattaaactttaatgattgcatagtgaatatatcattaggatttaactccttgactatcagggcggcaccagaaattaccatcaaaagcattaatacagttatgccgatcgcagttagaacggttatagcatccaccatttatatctaaaaattagatcaaagaatatgtgacaaagtcctagttgtatactgagaattgacgaaacaatgtttcttacatatttttttcttattagtaactgacttaatagtaggaactggaaagctagacttgattattctataagtatagatacccttccaaataatattctctttgataaaagttccagaaaatgtagaattttttaaaaagttatcttttgctattaccaagattgtgtttagacgcttattattaatatgagtgatgaaatccacaccgcctctagatatcgcttttatttccacattagatggtaaatccaatagtgaaactatctttttaggaatgtatggactcgcgtttagaggagtgaacgtcttaggcgtcggaaaggatgattcatcaaacgaataaacaatttcacaaatggatgttaatgtattagtaggaaattttttgacgctagtggaattgaagattctaatggatgatgttctacctatttcatccgataacatgttaatttccgacaccaacggttttaatatttcgatgatatacggtagtctctctttcggacttatatagcttattccacaatacgagtcattatatactccaaaaaacaaaataactagtataaaatctgtatcgaatgggaaaaacgaaattatcgacataggtatagaatctggaacattgaacgtattaatacttaattctttttctgtggtaagtaccgataggttattgacattgtatggttttaaatattctataacttgagacttgatagatattagtgatgaattgaaaattatttttatcaccacgtgtgtttcaggatcatcgtcgacgcccgtcaaccaaccgaatggagtaaaataaatatcattaatatatgctctagatattagtatttttatcaatcctttgattatcatcttctcgtaggcgaatgattccatgatcaagagtgatttaagaacatcctccggagtattaatgggcttagtaaacagtccatcgttgcaataataaaagttatccaagttaaaggatattatgcattcgtttaaagatatcacctcatctgacggagacaattttttggtaggttttagagactttgaagctacttgtttaacaaagttattcatcgtcgtttactattctatttaattttgtagttaatttatcacatatcacattaattgactttttggtccatttttccatacgtttatattcttttaatcctgcgttatccgtttccgttatatccagggatagatcttgcaagttaaatagaatgctcttaaataatgtcatttttttatccgctaaaaatttaaagaatgtataaacttttttcaaagatttaaaacttttaggtggagttctagtacacaatatcataaacaaactaataaacatcccgcattcagattccaacagctgattaacttccacattaatacagcctattttcgctccaaatgtacattcgaaaaatctgaataaaacatcgatgtcacaatttgtattatccaatacagaatgtctgtgattcgtgttaaaaccatcggagaaggaatagaaataaaaattattatagtggtggaattcagttggaatattgcctccggagtcataaaaggatactaaacattgttttttatcataaattacacatttccaatgagacaaataacaaaatccaaacattacaaatctagaggtagaacttttaattttgtctttaagtatatacgataagatatgtttattcataaacgcgtcaaatttttcatgaatcgctaaggagtttaagaatctcatgtcaaattgtcctatataatccacttcggatccataagcaaactgagagactaagttcttaatacttcgattgctcatccaggctcctctctcaggctctattttcatcttgacgacctttggattttcaccagtatgtattcctttacgtgataaatcatcgattttcaaatccatttgtgagaagtctatcgccttagatactttttcccgtagtcgaggtttaaagaaatacgctaacggtatactagtaggtaactcaaagacatcatatatagaatggtaacgcgtctttaactcgtcggttaactctttcttttgatcgagttcgtcgctactattgggtctgctcaggtgccccgactctactagttccaacatcataccgataggaatacaagacactttgccagcggttgtagatttatcatatttctccactacatatccgttacaatttgttaaaaatttagatacatctatattgctacataatccagctagtgaatatatatgacataataaattggtaaatcctagttctggtattttactaattactaaatctgtatatctttccatttatcatggaaaagaatttaccagatatcttcttttttccaaactgcgttaatgtattctcttacaaatattcacaagatgaattcagtaatatgagtaaaacggaacgtgatagtttctcattggcggtgtttccagttataaaacatagatggcataacgcacacgttgtaaaacataaaggaatatacaaagttagtacagaagcacgtggaaaaaaagtatctcctccatcactaggaaaacccgcacacataaacctaaccgcgaagcaatatatatacagtgaacacacaataagctttgaatgttatagttttctaaaatgtataacaaatacagaaatcaattcgttcgatgagtatatattaagaggactattagaagctggtaatagtttacagatattttccaattccgtaggtaaacgaacagatactataggtgtactagggaataagtatccatttagcaaaattccattggcctcattaactcctaaagcacaacgagagatattttcagcgtggatttctcatagacctgtagttttaactggaggaactggagtgggtaagacgtcacaggtacccaagttattgctttggtttaattatttatttggtggattctctactctagataaaatcactgactttcacgaaagaccagtcattctatctcttcctaggatagctttagttagattgcatagcaataccattttaaaatcattgggatttaaggtactagatggatctcctatttctttacggtacggatctataccggaagaattaataaacaaacaaccaaaaaaatatggaattgtattttctacccataagttatctctaacaaaactatttagttatggcactcttattatagacgaagttcatgagcatgatcaaataggagatattattatagcagtagcgagaaagcatcatacgaaaatagattctatgtttttaatgactgccacgttagaggatgacagggaacggctaaaagtatttttacctaatcccgcatttatacatattcctggagatacactgtttaaaattagcgaggtatttattcataataagataaatccatcttccagaatggcatacatagaagaagaaaagagaaatttagttactgctatacagatgtatactcctcctgatggatcatccggtatagtctttgtggcatccgttgcacagtgtcacgaatataaatcatatttagaaaaaagattaccgtatgatatgtatattattcatggtaaggtcttagatatagacgaaatattagaaaaagtgtattcatcacctaatgtatcgataattatttctactccttatttggaatccagcgttactatacacaatgttacacacatttatgatatgggtagagtttttgtccccgctccttttggaggatcgcaacaatttatttctaaatctatgagagatcaacgaaaaggaagagtaggaagagttaatcctggtacatacgtctatttctatgatctgtcttatatgaagtctatacagcgaatagattcagaatttctacataattatatattgtacgctaataagtttaatctaacactccccgaagatttgtttataatccctacaaatttggatattctatggcgtacaaaggaatatatagactcgttcgatattagtacagaaacatggaataaattattatccaattattatatgaagatgatagagtatgctaaactttatgtactaagtcctattctcgctgaggagttggataactttgagaggacgggagaattaactagtattgtacgagaagccattttatctctaaatttacgaattaagattttaaattttaaacataaagatgatgatacgtatatacacttttgtaaaatattattcggtgtctataacggaacaaacgctactatatattatcatagacctctaacgggatatatgaatatgatttcagatactatatttgttcctgtagataataactaaaaatcaaactctaatgaccacatctttttttagagatgaaaaattttctacatctccttttgtagacacgactaaacattttgcagaaaaaagtttattagtgtttagataatcgtatacttcatcagtgtagatagtaaatgtgaacagataaaaggtattcttgctcaatagattggtaaattccatagaatatattaatcctttcttcttgagatcccacatcatttcaaccagagacgttttatccaatgatttacctcgtactataccacatacaaaactagattttgcagtgacgtcgtacctggtattcctaccaaacaaaattttacttttagttcttttagaaaattctaaggtagaatctctatttgccaatatgtcatctatggaattaccactagcaaaaaatgatagaaatatatattgatacatcgcagctggttttgatctactatactttaaaaacgaatcagattccataattgcctgtatatcatcagctgaaaaactatgttttacacgtattccttcggcatttctttttaatgatatatcttgtttagacaatgataaagttatcatgtccatgagagacgcgtctccgtatcgtataaatatttcattagatgttagacgcttcattaggggtatacttctataaggtttcttaatcagtccatcattggttgcgtcaagaactactatcggatgttgttgggtatctctagtgttacacatggccttactaaagtttgggtaaataactatgatatctctattaattatagatgcatatatttcattcgtcaaggatattagtatcgacttgctatcgtcattaatacgtgtaatgtaatcatataaatcatgcgatagccaaggaaaatttaaatagatgttcatcatataatcgtcgctataattcatattaatacgttgacattgactaatttgtaatatagcctcgccacgaagaaagctctcgtattcagtttcatcgataaaggataccgttaaatataactggttgccgatagtctcatagtctattaagtggtaagtttcgtacaaatacagaatccctaaaatattatctaatgttggattaatctttaccataactgtataaaatggagacggagtcataactattttaccgtttgtacttactggaatagatgaaggaataatctccggacatgctggtaaagacccaaatgtctgtttgaagaaatccaatgttccaggtcctaatctcttaacaaaaattacgatattcgatcccgatatcctttgcattctatttaccagcatatcacgaactatattaagattatctatcatgtctattctcccaccgttatataaatcgcctccgctaagaaacgttagtatatccatacaatggaatacttcatttctaaaatagtattcgttttctaattctttaatgtgaaatcgtatactagaaagggaaaaattatctttgagttttccgttagaaaagaaccacgaaactaatgttctgattgcgtccgattccgttgctgaattaatggatttacaccaaaaactcatataacttctagatgtagaagcattcgctaaaaaattagtagaatcaaaggatataagtagatgttccaacaagtgagcaattcccaagatttcatctatatcattctcgaatccgaaattagaaattcccaagtagatatcctttttcatccgatcgttgatgaaaatacgaactttattcggtaagacaatcatttactaaggagtaaaataggaagtaatgttcgtatgtcgttatcatcgtataaattaaaggtgtgttttttaccattaagtgacattataattttaccaatattggaattataatataggtgtatttgcgcactcgcgacggttgatgcatcggtaaatatagctgtatctaatgttctagtcggtatttcatcatttcgctgtctaataatagcgttttctctatctgtttccattacagctgcctgaagtttattggtcggataatatgtaaaataataagaaatacatacgaataacaaaaataaaataagatataataaagatgccatttagagatctaattttgttcaacttgtccaaattcctacttacagaagatgaggaatcgttggagatagtgtcttccttatgtagaggatttgaaatatcttatgatgacttgataacttactttccagataggaaataccataaatatatttataaagtatttgaacatgtagatttatcggaggaattaagtatggaattccatgatacaactttgcgagatttagtttatcttagattgtacaagtattccaagtgtatacggccgtgttataaattaggagataatctaaaaggcatagttgttataaaggacaggaatatttatattagggaagcaaatgatgacttgatagaatatctcctcaaggaatacactcctcagatttatacatattctaatgagcgcgtccccataactggttcaaaattaattctttgtggattttctcaagttacatttatggcgtatacaacgtcgcatataacaacaaataaaaaggtagatgttctcgtttccaaaaaatgtatagatgaactagtcgatccaataaattatcaaatacttcaaaatttatttgataaaggaagcggaacaataaacaaaatactcaggaagatattttattcggtaaccggtggccaaactccataggtagctttttctatttcggattttagaatttccaaattcaccagcgatttatcggttttggtgaaatccaaggatttattaatgtccacaaatgccatttgttttgtctgtggattgtatttgaaaatggaaacgatgtagttagatagatgcgctgcgaagtttcctattagggttccgcgcttcacgtcacccagcatacttgaatcaccatcctttaaaaaaaatgataagatatcaacatggagtatatcatactcggattttaattcttctactgcatcactgacattttcacaaatactacaatacggtttaccgaaaataatcagtacgttcttcatttatgggtatcaaaaacttaaaatcgttactgctggaaaataaatcactgacgatattagatgataatttatacaaagtatacaatggaatatttgtggatacaatgagtatttatatagccgtcgccaattgtgtcagaaacttagaagagttaactacggtattcataaaatacgtaaacggatgggtaaaaaagggagggcatgtaaccctttttatcgatagaggaagtataaaaattaaacaagacgttagagacaagagacgtaaatattctaaattaaccaaggacagaaaaatgctagaattagaaaagtgtacatccgaaatacaaaatgttaccggatttatggaagaagaaataaaggcaaaaatgcaattaaaaatcgataaacttacatttcaaatatatttatctgattctgataacataaaaatatcattgaatgagatactaacacatttcaacaataatgagaatgttacattattttattgtgatgaacgagacgcagaattcgttatgtgtctcgaggctaaaacacatttctctaccacaggagaatggccgttgataataagtaccgatcaggatactatgctatttgcatctactgataatcatcctaagatgataaaaaacttaactcaactgtttaaatttgttccctcggcagaggataactatttagcaaaattaacggcgttagtgaatggatgtgatttctttcctggactctatggggcatctataacacccaccaacttaaacaaaatacaattgtttagtgattttacaatcgataatatagtcactagtttggcaattaaaaattattatagaaagactaactctaccgtagacgtgcgtaatattgttacgtttataaacgattacgctaatttagacgatgtctactcgtatgttcctccttgtcaatgcactgttcaagaatttatattttccgcattagatgaaaaatggaatgaatttaaatcatcttatttagagaccgttccgttaccctgtcaattaatgtacgcgttagaaccacgtaaggagattgatgtttcagaagttaaaactttatcatcttatatagatttcgaaaatactaaatcagatatcgatgttataaaatctatatcctcgatttttggatattctaacgaaaactgtaacacgatagtattcggcatctataaggataatttactactgagtataaataattcattttactttaacgatagtctgttaataaccaatactaaaagtgataatataataaatataggttactagattaaaaatggtgttccaactcgtgtgctctacatgcggtaaagatatttctcacgaacgatataaattgattatacgaaaaaaatcattaaaggatgtactcgtcagtgtaaagaacgaatgttgtaggttaaaattatctacacaaatagaacctcaacgtaacttaacagtgcaacctctattggatataaactaatatggatccggttaattttatcaagacatatgcgcctagaggttctattatttttattaattataccatgtcattaacaagtcatttgaatccatcgatagaaaaacatgtgggtatttattatggtacgttattatcggaacacttggtagttgaatctacctatagaaaaggagttcgaatagtcccattggatagtttttttgaaggatatcttagtgcaaaagtatacatgttagagaatattcaagttatgaaaatagcagctgatacgtcattaactttattgggtattccgtatggatttggtcatgatagaatgtattgttttaaattggtagctgactgttataaaaatgccggtgttgaaacatcgtctaaacgaatattaggtaaagatatttttctgagccaaaacttcacagacgataatagatggataaagatatatgattctaataatttaacattttggcaaattgattaccttaaagggtgagttaatatgcataactactcctccgttgttttttccctcgttctttttcttaacgttgtttgccatcactctcataatgtaaagatattctaaaatggtaaacttttgcatatcggacgcagaaattggtataaatgttgtaattgtattatttcccgtcaatggactagtcacagctccatcagttttatatcctttagagtatttctcactcgtgtctaacattctagagcattccatgatctgtttatcgttgatattggccggaaagatagattttttattttttattatattactattggcaattgtagatataacttctggtaaatatttttctaccttttcaatctcttctattttcaagccggctatatattctgctatattgttgctagtatcaataccttttcttgctaagaagtcatatgtggtattcactatatcagttttaactggtagttccattagcctttccacttctgcagaataatcagaaattggttctttaccagaaaatccagctactataataggctcaccgatgatcattggcaaaatcctatattgtaccagattaatgagagcatatttcatttccaataattctgctagttcttgagacattgatttatttgatgaatctagttggttctctagatactctaccatttctgccgcatacaataacttgttagataaaatcagggttatcaaagtgtttagcgtggctagaatagtgggcttgcatgtattaaagaatgcggtagtatgagtaaaccgttttaacgaattatatagtctccagaaatctgtggcgttacatacatgagccgaatgacatcgaagattgtccaatatttttaatagctgctctttgtccattatttctatatttgactcgcaacaattgtagataccattaatcactgattcctttttcgatgccggacaatagcacaattgtttagctttggactctatgtattcagaattaatagatatatctcttaatacagattgcactatacattttgaaactatgtcaaaaattgtagaacgacgctgttctgcagccatttaactttaaataatttacaaaaatttaaaatgagcatccgtataaaaatcgataaactgcgccaaattgtggcatatttttcagagttcagtgaagaagtgtctataaatgtagactcgacggatgagttaatgtatatttttgccgccttgggcggatctgtaaacatttgggccattatacctctcagtgcatcagtgttctaccgcggagccgaaaatattgtgtttaatcttccggtgtccaaggtaaaatcgtgtttgtgtagttttcacaatgatgccatcatagatatagaacctgatctggaaaataatctagtaaaactttctagttatcatgtagtaagtgtcgattgtaacaaggaactgatgcctattaggacagatactactatttgtctaagtatagatcaaaagaaatcttacgtgtttaattttcacaagtatgaagaaaaatgttgtggtagaaccgtcattcatttagaatggttgttgggctttatcaagtgtattagtcagcatcagcatttggctattatgtttaaagatgacaatattattatgaagactcctggtaatactgatgcgttttccagggaatattctatgactgaatgttctcaagaactacaaaagttttctttcaaaatagctatctcgtctctcaacaaactacgaggattcaaaaagagagtcaatgtttttgaaactagaatcgtaatggataatgacgataacattctaggaatgttgttttcggatagagttcaatcctttaagatcaacatctttatggcgtttttagattaatactttcaatgagataaatatgggtggcggagtaagtgttgagctccctaaacgggatccgcctccgggagtacccactgatgagatgttattaaacgtggataaaatgcatgacgtgatagctcccgctaagcttttagaatatgtgcatataggaccactagcaaaagataaagaggataaagtaaagaaaagatatccagagtttagattagtcaacacaggacccggtggtctttcggcattgttaagacaatcgtataatggaaccgcacccaattgctgtcgcacttttaatcgtactcattattggaagaaggatggaaagatatcagataagtatgaagagggtgcagtattagaatcgtgttggccagacgttcacgacactggaaaatgcgatgttgatttattcgactggtgtcagggggatacgttcgatagaaacatatgccatcagtggatcggttcagcctttaataggagtgatagaactgtagagggtcaacaatcgttaataaatctgtataataagatgcaaacattatgtagtaaagatgctagtgtaccaatatgtgaatcatttttgcatcatttacgcgcacacaatacagaagatagcaaagagatgatcgattatattctaagacaacagtctgcggactttaaacagaaatatatgagatgtagttatcccactagagataagttagaagagtcattaaaatatgcggaacctcgagaatgttgggatccagagtgttcgaatgccaatgttaatttcttactaacacgtaattataataatttaggactttgcaatattgtacgatgtaatactagcgtgaacaacttacagatggataaaacttcctcattaagattgtcatgtggattaagcaatagtgatagattttctactgttcccgtcaatagagcaaaagtagttcaacataatattaaacattcgttcgacctaaaattgcatttgatcagtttattatctctcttggtaatatggatactaattgtagctatttaaatgggtgccgcggcaagcatacagacgacggtgaatacactcagcgaacgtatctcgtctaaattagaacaagaagcgaacgctagtgctcaaacaaaatgtgatatagaaatcggaaatttttatatccgacaaaaccatggatgtaacctcactgttaaaaatatgtgctctgcggacgcggatgctcagttggatgctgtgttatcagccgctacagaaacatatagtggattaacaccggaacaaaaagcatacgtgccagctatgtttactgctgcgttaaacattcagacaagtgtaaacactgttgttagagattttgaaaattatgtgaaacagacttgtaattctagcgcggtcgtcgataacaaattaaagatacaaaacgtaatcatagatgaatgttacggagccccaggatctccaacaaatttggaatttattaatacaggatctagcaaaggaaattgtgccattaaagcgttgatgcaattgacgactaaggccactactcaaatagcacctagacaagttgctggtacaggagttcagttttatatgattgttatcggtgttataatattggcagcgttgtttatgtactatgccaagcgtatgctgttcacatccaccaatgataaaatcaaacttattttagccaataaggaaaacgtccattggactacttacatggacacattctttagaacttctccgatggttattgctaccacggatatacaaaactgaaaatatattgataatattttaatagattaacatggaagttatcgctgatcgtctagacgatatagtgaaacaaaatatagcggatgaaaaatttgtagattttgttatacacggtctagagcatcaatgtcctgctatacttcgaccattaattaggttgtttattgatatactattatttgttatagtaatttatatttttacggtacgtctagtaagtagaaattatcaaatgttgttggtggcgctagtcatcacattaactattttttattactttatactataatagtactagactgacttctaacaaacatctcacctgccataaataaatgcttgatattaaagtcttctatttctaacactattccatctgtggaaaataatactctgacattatcgctaattgacacatcggtgagtgatatgcctataaagtaataatcttctttgggcacatataccagtgtaccaggttctaacaacctatttactggtgctcctgtagcatactttttctttaccttgagaatatccatcgtttgcttggtcaatagcgatatgtgattttttatcaaccactcgaaaaagtaattggagtgttcatatcctctacgggctattgtctcatggccgtgtatgaaatttaagtaacacgactgtggtagatttgttctatagagccggttgccgcaaatagatagaactaccaatatgtctgtacaaatgttaaacattaattgattaacagaaaaaacaatgttcgttctgggaatagaaaccagatcaaaacaaaattcgttagaatatatgccacgtttatacattgaatataaaataactacagtttgaaaaataacagtatcatttaaacatttaacttgcggggttaatctcacaactttactgtttttaaactgttcaaaatatagcatcgatccatgagaaatacgtttagccgcctttaatagaggaaatcccaccgcctttctggatctcaccaacgacgatagttctgaccagcaactcatttcttcatcatccacctgttttaacatataataggcaggagatagatatccgtcattgcaatattccttctcgtaggcacacaatctaatattgataaaatctccattctcttctctgcatttattatcttgtttcggtggctgattaggctgtagtcttggtttaggctttggtatatcgttgttgaatctattttggtcattaaatctttcatttcttcctggtatatttttatcacctcgtttggttggatttttgtctatattatcgtttgtaacatcggtacgggtattcatttatcacaaaaaaaacttctctaaatgagtctactgctagaaaacctcatcgaagaagataccatattttttgcaggaagtatatctgagtatgatgatttacaaatggttattgccggcgcaaaatccaaatttccaagatctatgctttctatttttaatatagtacctagaacgatgtcaaaatatgagttggagttgattcataacgaaaatatcacaggagcaatgtttaccacaatgtataatataagaaacaatttgggtctaggagatgataaactaactattgaagccattgaaaactatttcttggatcctaacaatgaagttatgcctcttattattaataatacggatatgactgccgtcattcctaaaaaaagtggtaggagaaagaataagaacatggttattttccgtcaaggatcatcacctatcttgtgtattttcgaaactcgtaaaaagattaatatttataaagaaaatatggaatccgcatcgactgagtatacacctatcggagacaacaaggctttgatatctaaatatgcgggaattaatatcctaaatgtgtattctccttccacatccataagattgaatgccatttacggattcaccaataaaaataaactagagaaacttagtactaataaggaactagaatcgtatagttctagccctcttcaagaacccattaggttaaatgattttctgggactattggaatgtgttaaaaagaatattcctctaacagatattccgacaaaggattgattactataaatggagaatgttcctaatgtatactttaatcctgtgtttatagagcccacgtttaaacattctttattaagtgtttataaacacagattaatagttttatttgaagtattcgttgtattcattctaatatatgtattttttagatctgaattaaatatgttcttcatgcctaaacgaaaaatacccgatcctattgatagattacgacgtgctaatctagcgtgtgaagacgataaattaatgatctatggattaccatggatgacaactcaaacatctgcgttatcaataaatagtaaaccgatagtgtataaagattgtgcaaagcttttgcgatcaataaatggatcacaaccagtatctcttaacgatgttcttcgcagatgatgattcattttttaagtatttggctagtcaagatgatgaatcttcattatctgatatattgcaaatcactcaatatctagactttctgttattattattgatccaatcaaaaaataaattagaagccgtgggtcattgttatgaatctctttcagaggaatacagacaattgacaaaattcacagactttcaagattttaaaaaactgtttaacaaggtccctattgttacagatggaagggtcaaacttaataaaggatatttgttcgactttgtgattagtttgatgcgattcaaaaaagaatcctctctagctaccaccgcaatagatcctattagatacatagatcctcgtcgcgatatcgcattttctaacgtgatggatatattaaagtcgaataaagtgaacaataattaattctttattgtcatcatgaacggcggacatattcagttgataatcggccccatgttttcaggtaaaagtacagaattaattagacgagttagacgttatcaaatagctcaatataaatgcgtgactataaaatattctaacgataatagatacggaacgggactatggacgcatgataagaataattttgaagcattggaagcaactaaactatgtgatgtcttggaatcaattacagatttctccgtgataggtatcgatgaaggacagttctttccagacattgttgaattctgtgagcgtatggcaaacgaaggaaaaatagttatagtagccgcactcgatgggacatttcaacgtaaaccgtttaataatattttgaatcttattccattatctgaaatggtggtaaaactaactgctgtgtgtatgaaatgctttaaggaggcttccttttctaaacgattgggtgaggaaaccgagatagaaataataggaggtaatgatatgtatcaatcggtgtgtagaaagtgttacatcgactcataatattatattttttatctaaaaaactaaaaataaacattgattaaattttaatataatacttaaaaatggatgttgtgtcgttagataaaccgtttatgtattttgaggaaattgataatgagttagattacgaaccagaaagtgcaaatgaggtcgcaaaaaaactaccgtatcaaggacagttaaaactattactaggagaattattttttcttagtaagttacagcgacacggtatattagatggtgccaccgtagtgtatataggatcggctcctggtacacatatacgttatttgagagatcatttctataatttaggagtgatcatcaaatggatgctaattgacggccgccatcatgatcctattttaaatggattgcgtgatgtgactctagtgactcggttcgttgatgaggaatatctacgatccatcaaaaaacaactgcatccttctaagattattttaatttctgatgtaagatccaaacgaggaggaaatgaacctagtacggcggatttactaagtaattacgctctacaaaatgtcatgattagtattttaaaccccgtggcatctagtcttaaatggagatgcccgtttccagatcaatggatcaaggacttttatatcccacacggtaataaaatgttacaaccttttgctccttcatattcagctgaaatgagattattaagtatttataccggtgagaacatgagactgactcgagttaccaaattagacgctgtaaattatgaaaaaaagatgtactaccttaataagatcgtccgtaacaaagtagttgttaactttgattatcctaatcaggaatatgactattttcacatgtactttatgctgaggaccgtgtactgcaataaaacatttcctactactaaagcaaaggtactatttctacaacaatctatatttcgtttcttaaatattccaacaacatcaactgaaaaagttagtcatgaaccaatacaacgtaaaatatctagcaaaaattctatgtctaaaaacagaaatagcaagagatccgtacgcggtaataaatagaaacgtgctactgagatatactaccgatatagagtataatgatttagttactttaataaccgttagacataaaattgattctatgaaaactgtgtttcaggtatttaacgaatcatccataaattatactccggttgatgatgattatggagaaccaatcattataacatcgtatcttcaaaaaggtcataacaagtttcctgtaaattttctatacatagatgtggtaatatctgacttatttcctagctttgttagactagatactacagaaactaatatagttaatagtgtactacaaacaggcgatggtaaaaagactcttcgtcttcccaaaatgttagagacggaaatagttgtcaagattctctatcgccctaatataccattaaaaattgttagatttttccgcaataacatggtaactggagtagagatagccgatagatctgttatttcagtcgctgattaatcaattagtagagatgagataagaacattataataatcaataatattatcttatatctcgtttagaaaaatgctaatattaaaatagctaacgctagtaatccaatcggaagccatttgatatctataatagggtatctaatttcctgattcagatagcggacagctatattctcggtagctactcgtttggaatcacaaacattatttacatctaatttactatctgtaatggaaacgtttcccaatgaaatggtacaatccgatacattgcattttgttatatttttttttaaagaggctggtaacaacgcatcgcttcgtttacatggctcgtaccaacaataatagggtaatcttgtatctattcctatccgtactatgcttttatcaggataaatacatttacatcgtatatcgtctttgttagcatcacagaatgcataaatttgttcgtccgtcatgataaaaatttaaagtgtaaatataactattatttttatagttgtaataaaaagggaaatttgattgtatactttcggttctttaaaagaaactgacttgataaaaatggctgtaatctctaaggttacgtatagtctatatgatcaaaaagagattaatgctacagatattatcattagtcatgttaaaaatgacgacgatatcggtaccgttaaagatggtagactaggtgctatggatggggcattatgtaaaacttgtgggaaaacggaattggaatgtttcggtcactggggtaaagtaagtatttataaaactcatatagttaagcctgaatttatttcagaaattattcgtttactgaatcatatatgtattcactgcggattattgcgttcacgagaaccgtattccgacgatattaacctaaaagagttatcgggacacgctcttaggagattaaaggataaaatattatccaagaaaaagtcatgttggaacagcgaatgtatgcaaccgtatcaaaaaattactttttcaaagaaaaaggtttgtttcgtcaacaagttggatgatattaacgttcctaattctctcatctatcaaaagttaatttctattcatgaaaagttttggccattattagaaattcatcaatatccagctaacttattttatacagactactttcccatccctccgctgattattagaccggctattagtttttggatagatagtatacccaaagagaccaatgaattaacttacttattaggtatgatcgttaagaattgtaacttgaatgctgatgaacaggttatccagaaggcggtaatagaatacgatgatattaaaattatttctaataacactaccagtatcaatttatcatatattacatccggcaaaaataatatgattagaagttatatcgtcgcccgacgaaaagatcagaccgctagatctgtaattggtcccagtacatctatcaccgttaatgaggtaggaatgcccgcatatattagaaatacacttacagaaaagatatttgttaatgcctttacagtggataaagttaaacaactattagcgtcaaaccaagttaaattttactttaataaacgattaaaccaattaacaagaatacgccaaggaaagtttatcaaaaataaaatacatttattgcctggtgattgggtagaagtagctgttcaagaatatacaagtattatttttggaagacagccgtctctacatagatacaacgtcatcgcttcatctatcagagctaccgaaggagatactatcaaaatatctcccggaattgccaactctcaaaatgctgatttcgacggagatgaagaatggatgatattggagcaaaatcctaaagccgtaattgaacaaagtattcttatgtatccgacgacgttactcaaacacgatattcatggagcccccgtttatggatctattcaagatgaaatcgtagcagcgtattcattgtttaggatacaagatctttgtttagatgaagtattgaacatcttggggaaatatggaagagagttcgatcctaaaggtaaatgtaaattcagcggtaaagatatctatacttacttgataggtgaaaagattaattatccgggtctcttaaaggatggtgaaattattgcaaacgacgtagatagtaattttgttgtggctatgaggcatctgtcattggctggactcttatccgatcataagtcgaacgtggaaggtatcaactttattatcaagtcatcttatgtttttaagagatatctatctatttacggttttggggtgacattcaaagatctgagaccaaattcgacgttcactaataaattggaggccatcaacgtagaaaaaatagaacttatcaaagaagcatacgccaaatatctcaacgatgtaagagacgggaaaatagttccattatctaaagctttagaggcggactatgtggaatccatgttatccaacttgacaaatcttaatatccgagagatagaagaacatatgagacaaacgctgatagatgatccagataataacctcctgaaaatggccaaagcgggttataaagtaaatcctacagaactaatgtatattctaggtacgtatggacaacaaaggattgatggtgaaccagcagagactcgagtattgggtagagtcttaccttactatcttccagactctaaggatccagaaggaagaggttacattcttaattctttaacaaaaggattaacgggttctcaatattacttttcgatgctggttgccagatctcaatctactgatatcgtctgtgaaacatcacgtaccggaacactggctagaaaaatcattaaaaagatggaggatatggtggtcgacggatacggacaagtagttataggtaatacgctcatcaagtacgccgccaattataccaaaattctaggctcagtatgtaaacctgtagatcttatctatccagatgagtccatgacttggtatttggaaattagtgctctgtggaataaaataaaacagggattcgtttactctcagaaacagaaacttgcaaagaagacattggcgccgtttaatttcctagtattcgtcaaacccaccactgaggataatgctattaaggttaaggatctgtacgatatgattcataacgtcattgatgatgtgagagagaaatacttctttacggtatctaatatagattttatggagtatatattcttgacgcatcttaatccttctagaattagaattacaaaagaaacggctatcactatctttgaaaagttctatgaaaaactcaattatactctaggtggtggaactcctattggaattatttctgcacaggtattgtctgagaagtttacacaacaagccctgtccagttttcacactactgaaaaaagtggtgccgtcaaacaaaaacttggtttcaacgagtttaataacttgactaatttgagtaagaataagaccgaaattatcactctggtatccgatgatatctctaaacttcaatctgttaagattaatttcgaatttgtatgtttgggagaattaaatccagacatcactcttcgaaaagaaacagataaatatgtagtagatataatagttaatagattatacatcaagagagcagaaataaccgaattagttgtcgaatatatgattgaacgatttatctcctttagcgtcattgtaaaggaatggggtatggagacattcattgaggacgaggataatattagatttactgtctacctaaatttcgttgaaccggaagaattgaatcttagtaagtttatgatggttcttccgggtgccgccaacaagggcaagattagtaaattcaagattcctatctctgattatacgggttatgacgacttcaatcaaacaaaaaagctcaataagatgactgtagaactcatgaatctaaaagaattgggttctttcgatttggaaaacgtcaacgtgtatcctggagtatggaatacatacgatatcttcggtatcgaggccgctcgtgaatacttgtgcgaagccatgttaaacacctatggagaagggttcgattatctgtatcagccttgtgatcttctcgctagtttactatgtgctagttacgaaccagaatcagttaataaattcaagttcggtgcagctagtactcttaagagagctacgttcggagacaataaagcattgttaaacgcggctcttcataaaaagtcagaacctattaacgataatagtagctgccacttttttagcaaggtccctaatataggaactggatattacaaatactttatcgacttgggtcttctcatgagaatggaaaggaaactatctgataagatatcttctcaaaagatcaaggaaatggaagaaacagaagacttttaattcttatcaataacatatttttctatgatctgtcttttaaacgatggattttccacaaatgcgcctctcaagtccctcatagaatgatacacgtataaaaaatatagcataggcaatgactccttatttttagacattagatatgccaaaatcatagccccgcttctatttactcccgcagcacaatgaaccaacacgggctcgtttcgttgatcacatttagataaaaaggcggttacgtcgtcaaaatatttactaatatcggtagttgtatcatctaccaacggtatatgaataatattaatattagagttaggtaatgtatatttatccatcgtcaaatttaaaacatatttgaacttaacttcagatgatggtgcatccatagcatttttataatttcccaaatacacattattggttacccttgtcattatagtgggagatttggctttgtgcatatctccagttgaacgtagtagtaagtatttatacaaacttttcttatccatttataacgtacaaatggataaaactactttatcggtaaacgcgtgtaatttagaatacgttagagaaaaggctatagtaggcgtacaagcagccaaaacatcaacacttatattctttgttattatattggcaattagtgcgctattactctggtttcagacgtctgataatccagtctttaatgaattaacgagatatatgcgaattaaaaatacggttaacgattggaaatcattaacggatagcaaaacaaaattagaaagtgatagaggtagacttctagccgctggtaaggatgatatattcgacttcaaatgtgtggatttcggcgcctattttatagctatgcgattggataagaaaacatatctgccgcaagctattaggcgaggtactggagacgcgtggatggttaaaaaggcggcaaaggtcgatccatctgctcaacaattttgtcagtatttgataaaacacaagtctaataatgttattacttgtggtaatgagatgttaaatgaattaggttatagcggttattttatgtcaccgcattggtgttccgattttagtaatatggaatagtgttagataaatgcggtaacgaatgttcctgtaaggaaccataacagtttagatttaacgttaaagatgagcataaacataataaacaaaattacaatcaaacctataacattaatatcaaacaatccaaaaaatgaaatcagtggagtagtaaacgcgtacataactcctggataacgtttagcagctgccgttcctattctagaccaaaaattcggtttcatgttttcgaagcggtgttctgcaacaagtcggggatcgtgttctacatatttggcggcgttatccagtatctgcctattgatcttcatttcgttttcgattctggctatttcaaaataaaatcccgatgatagacctccagactttataatttcatctacgatgttcagcgccgtagtaactctaataatataggctgataagctaacatcataccctcctgtatatgtgaatatggcatgatttttgtccattacaagctcggttttaactttattgcctgtaataatttctctcatctgtaggatatctatttttttgtcatgcattgccttcaagacgggacgaagaaacgtaatatcctcaataacgttatcgttttctacaataactacatattctacctttttattttctaactcggtaaaaaaattagaatcccatagggctaaatgtctagcgatatttcttttcgtttcctctgtacacatagtgttacaaaaccctgaaaagaagtgagtatacttgtcatcatttctaatgtttcctccagtccactgtataaacgcataatccttgtaatgatctggatcatccttgactaccacaacatttcttttttctggcataacttcgttgtcctttacatcatcgaacttctgatcattaatatgctcatgaacattaggaaatgtttctgatggaggtctatcaataactggcacaacaataacaggagttttcaccgccgccatttagttattgaaattaatcatatacaactctttaatacgagttatattttcgtctatccattgtttcacatttacatatttcgacaaaaagatataaaatgcgtattccaatgcttctctgtttaatgaattactaaaatatacaaacacgtcactgtctggcaataaatgatatcttagaatattgtaacaatttattttgtattgcacatgttcgtgatctatgagttcttcttcgaatggcataggatctccgaatctgaaaacgtataaataggagttagaataataatatttgagagtattggtaatatataaactctttagcggtataattagtttttttctctcaatttctatttttagatgtgatggaaaaatgactaattttgtagcattagtatcatgaactctaatcaaaatcttaatatcttcgtcacacgttagctctttgaagtttttaagagatgcatcagttggttctacagatggagtaggtgcaacaattttttgttctacacatgtatgtactggagccattgttttaactataatggtgcttgtatcgaaaaactttaatgcagatagcggaagctcttcgccgcgactttctacatcgtaattgggttctaacgccgatctctgaatggatactagttttctaagttctaatgtgattctctgaaaatgtaaatccaattcctccggcattatagatgtgtatacatcggtaaataaaactatagtatccaacgatcccttctcgcaaattctagtcttaaccaaaaaatcgtatataaccacggagatggcgtatttaagagtggattcttctaccgttttgttcttggatgtcatataggaaactataaagtccgcactactgttaagaatgattactaacgcaactatatagttcaaattaagcattttggaaacataaaataactctgtagacgatacttgactttcgaataagtttgcagacaaacgaagaaagaacagacctctcttaatttcagaagaaaactttttttcgtattcctgacgtctagagtttatatcaataagaaagttaagaattagtcggttaatgttgtatttcattacccaagtttgagatttcataatattatcaaaagacatgataatattaaagataaagcgctgactatgaacgaaatagctatatggttcgctcaagaatatagtcttgttaaacgtggaaacgataactgtatttttaatcacgtcagcggcatctaaattaaatataggtatatttattccacacactctacaatatgccacaccatcttcataataaataaattcgttagcaaaattattaattttagtgaaatagttagcgtcaactttcatagcttccttcaatctaatttgatgctcacacggtgcgaattccactctaacatcccttttccatgcctcaggttcatcgatctctataatatctagtttcttgcgtttcacaaacacgggctcgtctctcgcgatgagatctgtatagtaactatgtaaatgataactagatagaaagatgtagctatatagatgacgatcctttaagagaggtataataactttaccccaatcagataaactattgttatggtcttcggaaaaagaatttttataaatttttccagtattttccaaatatacgtacttgacatctaaaaaatccttaatgataataggaatggataatccgtctattttataaagaaatacatatcgcacattatacttttttttggaaatgggaataccgatgtgtctacataaatatgcaaagtctaaatattttttagagaatcttagttggtccaaattcttttccaagtacggtaatagatttttcatattgaacggtatcttcttaatctctggttctagttccgcattaaatgatgaaactaagtcactatttttataactaacgattacatcacctctaacatcatcatttaccagaatactgatcttcttttgtcgtaaatacatgtctaatgtgttaaaaaaaagatcatacaagttatacgtcatttcatctgtggtattcttgtcattgaaggataaactcgtactaatctcttctttaacagcctgttcaaatttatatcctatatacgaaaaaatagcaaccagtgtttgatcatccgcgtcaatattctgttctatcgtagtgtataacaatcgtatatcttcttctgtgatagtcgatacgttataaaggttgataacgaaaatatttttatttcgtgaaataaagtcatcgtaggattttggacttatattcgcgtctagtagatatgcttttatttttggaatgatctcaattagaatagtctctttagagtccatttaaagttacaaacaactaggaaattggtttatgatgtataatttttttagtttttatagattctttattctatacttaaaaaatgaaaataaatacaaaggttcttgagggttgtgttaaattgaaagcgagaaataatcataaattatttcattatcgcgatatccgttaagtttgtatcgtaatggcgtggtcaattacaaataaagcggatactagtagcttcacaaagatggctgaaatcagagctcatctaaaaaatagcgctgaaaataaagataaaaacgaggatattttcccggaagatgtaataattccatctactaagcccaaaaccaaacgagccactactcctcgtaaaccagcggctactaaaagatcaaccaaaaaggaggaagtggaagaagaagtagttatagaggaatatcatcaaacaactgaaaaaaattctccatctcctggagtcagcgacattgtagaaagcgtggccgctgtagagctcgatgatagcgacggggatgatgaacctatggtacaagttgaagctggtaaagtaaatcatagtgctagaagcgatctttctgacctaaaggtggctaccgacaatatcgttaaagatcttaagaaaattattactagaatctctgcagtatcgacggttctagaggatgttcaagcagctggtatctctagacaatttacttctatgactaaagctattacaacactatctgatctagtcaccgagggaaaatctaaagttgttcgtaaaaaagttaaaacttgtaagaagtaaatgcgtgcacttttttataaagatggtaaactctttaccgataataattttttaaatcctgtatcagacgataatccagcgtatgaggttttgcaacatgttaaaattcctactcatttaacagatgtagtagtatatgaacaaacgtgggaggaggcgttaactagattaatttttgtgggaagcgattcaaaaggacgtagacaatacttttacggaaaaatgcatgtacagaatcgcaacgctaaaagagatcgtatttttgttagagtatataacgttatgaaacgaattaattgttttataaacaaaaatataaagaaatcgtccacagattccaattatcagttggcggtttttatgttaatggaaactatgttttttattagatttggtaaaatgaaatatcttaaggagaatgaaacagtagggttattaacactaaaaaataaacacatagaaataagtcccgatgaaatagttatcaagtttgtaggaaaggacaaagtttcacatgaatttgttgttcataagtctaatagactatataagccgctattgaaactgacggatgattctagtcccgaagaatttctgttcaacaaactaagtgaacgaaaggtatacgaatgtatcaaacagtttggtattagaatcaaggatctccgaacgtatggagtcaattatacgtttttatataatttttggacaaatgtaaagtccatatctcctcttccatcaccaaaaaagttaatagcgttaactatcaaacaaactgctgaagtggtaggtcatactccatcaatttcaaaaagagcttacatggcaacgactattttagaaatggtaaaggataaaaattttttagatgtagtatctaaaactacgttcgatgaattcctatctatagtcgtagatcacgttaaatcatctacggatggatgatatagatctttacacaaataattacaagaccgataaatggaaatggataagcgtatgaaatctctcgcaatgacagctttcttcggagagctaaacacattagatattatggcattgataatgtctatatttaaacgccatccaaacaataccattttttcagtggataaggatggtcagtttatgattgatttcgaatacgataattataaggcttctcaatatttggatctgaccctcactccgatatctggagatgaatgcaagactcacgcatcgagtatagccgaacaattggcgtgtgtggatattattaaagaggatattagcgaatatatcaaaactactccccgtcttaaacgatttataaaaaaataccgcaatagatcagatactcgtatcagtcgagatacagaaaagcttaaaatagctctagctaaaggcatagattacgaatatataaaagacgcttgttaataagtaaatgaaaaaaaactagtcgtttataataaaacacaatatggatgccaacatagtatcatcttctactattgcaacgtatatagacgctttagcaaagaatgcttcagaattagaacagaggtctaccgcatacgaaataaataatgaattggaactagtatttattaagccgccattaattactttgacaaatgtagtgaatatctctacgattcaggaatcgtttattcgatttaccgttactaataaggaaggtgtcaaaattagaactaagattccattatctaaggtacatggtctagatgtaaaaaatgtacagttagtagatgctatagataacatagtttgggaaaagaaatcattagtgacggaaaatcgtcttcacaaagaatgcttgttgagactatcgacagaggaacgtcatatatttttggattacaagaaatatggatcctctatccgactagaattagtcaatcttattcaagcaaaaacaaaaaactttacgatagactttaagctaaaatattttctaggatccggtgcccaatctaaaagttctttgttgcacgctattaatcatccaaagtcaaggcctaatacatctctggaaatagaattcacacctagagacaatgaaaaagttccatatgatgaactaataaaggaattgacgactctatcacgtcatatatttatggcttctccagagaatgtaattctttctccgcctattaacgcacctataaagacttttatgttgcctaaacaagatatagtaggtctggatctggaaaatctatatgccgtaactaagactgacggcattcctataactatcagagttacatcaaacgggttgtattgttattttacacatcttgggtatattattagatatccagttaagagaataatagattccgaagtagtagtctttggtgaggcagttaaggataagaactggaccgtatatctcattaagctaatagagcctgtgaatgcaatcaatgatagactagaagaaagtaagtatgttgaatctaaactagtggatatttgtgatcggatagtattcaagtcaaagaaatatgaaggtccgtttactacaactagtgaagtcgtcgatatgttatctacatatttaccaaagcaaccagaaggtgttattctgttctattcaaagggacctaaatctaacattgattttaaaattaaaaaggaaaatactatagaccaaactgcaaatgtagtatttaggtacatgtccagtgaaccaattatctttggagaatcgtctatctttgtagagtataagaaatttagcaacgataaaggctttcctaaagaatatggttctggtaagattgtgttatataacggcgttaattatctaaataatatctattgtttggaatatattaatacacataatgaagtgggtattaagtccgtggttgtacctattaagtttatagcagaattcttagttaatggagaaatacttaaacctagaatcgataaaaccatgaaatatattaactcagaagattattatggaaatcaacataatatcatagtcgaacatttaagagatcaaagcatcaaaataggagatatctttaacgaggataaactatcggatgtgggacatcaatacgccaataatgataaatttagattaaatccagaagttagttattttacgaataaacgaactagaggaccgttgggaattttatcaaactacgtcaagactcttcttatttctatgtattgttccaaaacatttttagacgattccaacaaacgaaaggtattggcgattgattttggaaacggtgctgacctggaaaaatacttttatggagagattgcgttattggtagcgacggatccggatgctgatgctatagctagaggaaatgaaagatacaacaaattaaactctggaattaaaaccaagtactacaaatttgactacattcaggaaactattcgatccgatacatttgtctctagtgtcagagaagtattctattttggaaagtttaatatcatcgactggcagtttgctatccattattcttttcatccgagacattatgctaccgtcatgaataacttatccgaactaactgcttctggaggcaaggtattaatcactaccatggacggagacaaattatcaaaattaacagataaaaagacttttataattcataagaatttacctagtagcgaaaactatatgtctgtagaaaaaatagctgatgatagaatagtggtatataatccatcaacaatgtctactccaatgactgaatacattatcaaaaagaacgatatagtcagagtgtttaacgaatacggatttgttcttgtagataacgttgatttcgctacaattatagaacgaagtaaaaagtttattaatggcgcatctacaatggaagatagaccgtctacaaaaaactttttcgaactaaatagaggagccattaaatgtgaaggtttagatgtcgaagacttacttagttactatgttgtttatgtcttttctaagcggtaaataataatatggtatgggttctgatatccccgttctaaatgcattaaataattccaatagagcgatttttgttcctataggaccttccaactgtggatactctgtattgttaatagatatattaatacttttgtcgggtaacagaggttctacgtcttctaaaaataaaagtttgataacatctggcctgttcataaataaaaacttggcgattctatatatactcttattatcaaatctagccattgtcttatagatgtgagctactgtaggtgtaccatttgattttctttctaatactatatatttctctcgaagaagttcttgcacatcatctgggaataaaatactactgttgagtaaatcagttattttttttatatcgatattgatggacatttttatagttaaggataataagtatcccaaagtcgataacgacgataacgaagtatttatacttttaggaaatcacaatgactttatcagatcaaaattaacaaaattaaaggagcatgtatttttttctgaatatattgtgactccagatacatatggatctttatgcgtcgaattaaatgggtctagttttcagcacggtggtagatatatagaggtggaggaatttatagatgctggaagacaagttagatggtgttctacatccaatcatatatctgaagatatacccgaagatatacacactgataaatttgtcatttatgatatatacacttttgacgctttcaagaataaacgattggtattcgtacaggtacctccgtcgttaggagatgatagctatttgactaatccgttattgtctccgtattatcgtaattcagtagccagacaaatggtcaatgatatgatttttaatcaagattcatttttaaaatatttattagaacatctgattagaagccactatagagtttctaaacatataacaatagttagatacaaggataccgaagaattaaatctaacgagaatatgttataatagagataagtttaaggcgtttgtattcgcttggtttaacggcgtttcggaaaatgaaaaggtactagatacgtataaaaaggtatctaatttgatataatgaattcagtgactgtatcacacgcgccatatactattacttatcacgatgattgggaaccagtaatgagtcaattggtagagttttataacgaagtagccagttggctgctacgagacgagacgtcgcctattcctgataagttctttatacagttgaaacaaccgcttagaaataaacgagtatgtgtgtgcggtatagatccgtatccgaaagatggaactggtgtaccgttcgaatcaccaaattttacaaaaaaatcaattaaggagatagcttcatctatatctagattaaccggagtaattgattataaaggttataaccttaatataatagacggggttataccctggaattattacttaagttgtaaattaggagaaacaaaaagtcacgcgatctactgggataagatttccaagttactgctgcagcatataactaaacacgttagtgttctttattgtttgggtaaaacagatttctcgaatatacgggcaaagttagaatccccggtaactaccatagtgggatatcatccagcggctagagaccgtcaattcgagaaagatcgatcatttgaaattatcaacgttttactggaattagacaacaaggtacctataaattgggctcaagggtttatttattaatgctttagtgaaattttaacttgtgttctaaatggatgcggctattagaggtaatgatgttatctttgttcttaagactataggtgtcccgtcagcgtgcagacaaaatgaagatccaagatttgtagaagcatttaaatgcgacgagttagaaagatatattgagaataatccagaatgtacactattcgaaagtcttagggatgaggaagcatactctatagtcagaattttcatggatgtagatttagacgcgtgtctagacgaaatagattatttaacggctattcaagattttattatcgaggtgtcaaactgtgtagctagattcgcgtttacagaatgcggcgccattcatgaaaatgtaataaaatccatgagatctaatttttcattgactaagtctacaaatagagataaaacaagttttcatattatctttttagacacgtataccactatggatacattgatagctatgaaacgaacactattagaattaagtagatcatctgaaaatccactaacaagatcgatagacactgccgtatataggagaaaaacaactcttcgggttgtaggtactaggaaaaatccaaattgcgacactattcatgtaatgcaaccacctcatgataatatagaagattacctattcacttacgtggatatgaacaacaatagttattacttttctctacaacgacgattggaggatttagttcctgataagttatgggaaccagggtttatttcattcgaagacgctataaaaagagtttcaaaaatattcattaattctataataaactttaatgatctcgatgaaaataattttacaacggtaccactggtcatagattacgtaacaccttgtgcattatgtaaaaaacgatcgcataaacatccgcatcaactatcgttggaaaatggtgctattagaatttacaaaactggtaatccacatagttgtaaagttaaaattgttccgttggatggtaataaactgtttaatattgcacaaagaattttagacactaactctgttttattaaccgaacgaggagaccatatagtttggattaataattcatggaaatttaacagcgaagaacccttgataacaaaactaattttgtcaataagacatcaactacctaaggaatattcaagcgaattactctgtccaagaaaacgaaagactgtagaagctaacatacgagacatgttagtagattcagtggagaccgatacctatccggataaacttccgtttaaaaatggtgtattggacctggtagacggaatgttttactctggagatgatgctaaaaaatatatgtgtactgtatcaaccggatttaaatttgacgatacaaagttcgtcgaagacagtccagaaatggaagagttaatgaatatcattaacgatatccaaccattaacggatgaaaataagaaaaatagagagctatatgaaaaaacattatctagttgtttatgcggtgctaccaaaggatgtttaacattcttttttggagaaactgcaactggaaagtcgacaaccaaacgtttgttaaagtctgctatcggtgacctgtttgttgagacgggtcaaacaattttaacagatgtattggataaaggacctaatccatttatcgctaacatgcatttgaaaagatctgtattctgtagcgaactacctgattttgcatgtagtgggtcaaagaaaatcagatctgataatattaaaaagttgacagaaccttgtgtcattggaagaccgtgtttctccaataaaattaataatagaaaccatgcgacaatcattatcgatactaattacaaacctgtttttgataggatagataacgcattaatgagaagaattgccgtcgtgcgattcagaacacacttttctcaaccttctggtagagaggctgctgaaaataatgacgcgtacgataaagtcaaactattagacgaggggttagatggtaaaatacaaaataatagatatagattcgcatttctatacttgttggtgaaatggtacagaaaatatcatgttcctattatgaaactatatcctacacccgaagagattcctgactttgcattctatctcaaaataggtactctgttggtatctagctctgtaaagcatattccattaatgacggacctctccaaaaagggatatatattgtacgataatgtggtcactcttccgttgactactttccaacagaaaatatccaagtattttaattctagactatttggacacgatatagagagcttcatcaatagacataagaaatttgccaatgttagtgatgaatatctgcaatatatattcatagaggatatttcatctccgtaaatatatgctcatatatttatagaagatatcacatatctaaatgaataccggaattatagatttatttgataatcatgttgatagtataccaactatattacctcatcagttagctactctagattatctagttagaactatcatagatgagaacagaagcgtgttattgttccatattatgggatcaggtaaaacaataatcgctttgttgttcgccttggtagcttccagatttaaaaaggtttacattctagtgccgaacatcaacatcttaaaaattttcaattataatatgggtgtagctatgaacttgtttaatgacgaattcatagctgagaatatctttattcattccacaacaagtttttattctcttaattataacgataacgtcattaattataacggattatctcgctacaataactctatttttatcgttgatgaggcacataatatctttgggaataatactggagaacttatgaccgtgataaaaaataaaaacaagattccttttctactattgtctggatctcccattactaacacacctaatactctgggtcatattatagatttaatgtccgaagagacgatagattttggtgaaattattagtcgtggtaagaaagtaattcagacacttcttaacgaacgcggtgtgaatgtacttaaggatttgcttaaaggaagaatatcatattacgaaatgcctgataaagatctaccaacgataagatatcacggacgtaagtttctagatactagagtagtatattgtcacatgtctaaacttcaagagagagattatatgattactagacgacagctatgttatcatgaaatgtttgataaaaatatgtataacgtgtcaatggcagtattgggacaacttaatctgatgaataatttagatactttatttcaggaacaggataaggaattgtacccaaatctgaaaataaataatggcgtgttatacggagaagaattggtaacgttaaacattagttccaaatttaaatactttattaatcggatacagacactcaacggaaaacattttatatacttttctaattctacatatggcggattggtaattaaatatatcatgctcagtaatggatattctgaatataatggttctcagggaactaatccacatatgataaacggcaaaccaaaaacatttgctatcgttactagtaaaatgaaatcgtctttagaggatctattagatgtgtataattctcctgaaaacgatgatggtagtcaattgatgtttttgttttcatcaaacattatgtccgaatcctatactctaaaagaggtaaggcatatttggtttatgactatcccagatactttttctcaatacaaccaaattcttggacgatctattagaaaattctcttacgccgatatttctgaaccagttaatgtatatcttttagccgccgtatattccgatttcaatgacgaagtgacgtcattaaacgattacacacaggatgaattaattaatgttttaccatttgacatcaaaaagctgttatatctaaaatttaagacgaaagaaacgaatagaatatactctattcttcaagagatgtctgaaacgtattctcttccaccacatccatcaattgtaaaagttttattgggagaattggtcagacaatttttttataataattctcgtattaagtataacgataccaagttacttaaaatggttacatcagttataaaaaataaagaagacgctaggaattacatagatgatattgtaaacggtcacttctttgtatcgaataaagtatttgataaatctcttttatacaaatacgaaaacgatattattacagtaccgtttagactttcctacgaaccatttgtttggggagttaactttcgtaaagaatataacgtggtatcttctccataaaactgatgagatatataaagaaataaatgtcgagctttgttaccaatggataccttccagttacattggagccacacgagctgacgttagacataaaaactaatattaggaatgccgtatataagacgtatctccatagagaaattagtggtaaaatggccaagaaaatagaaattcgtgaagacgtggaattacctctcggcgaaatagttaataattctgtagttataaacgttccgtgtgtaataacctacgcgtattatcacgttggggatatagttagaggaacattaaacatcgaagatgaatcaaatgtaactattcaatgtggagatttaatctgtaaactaagtagagattcgggtactgtatcatttagcgattcaaagtactgcttttttcgaaatggtaatgcgtatgacaatggcagcgaagtcactgccgttctaatggaggctcaacaaggtatcgaatctagttttgtttttctcgcgaatatcgtcgactcataagaaagagaatagcggtaagtataaacacgaatactatggcaataattgcgaatgttttattcccttcgatatatttttgataatatgaaaaacatgtctctctcaaatcggacaaccatctcataaaatagttatctcgcgctggcgaggtggttgccgctcgtataatctccccagaataatatacttgcgtgtcgtcgttcaatttatacggatttctatagttctctgttatataatgcggttttccatcatgattagacgacgacaatagtgttctaaatttagatagttgatcagaatgaatgtttattggcgttggaaaaattatccatgctgcgtctgcagagtggttgatagttgttcctagatatgtaaaataatccaacgtactaggtagcaaattgtctagataaaatactgaatcaaacggcgcagacgtattagcggatctaatggaatccaattgattgactatcttttgaaaatatacatttttatgatccgatacttgtaagaatatagaaataatgataagtccatcatcgtgtttttttgcctcttcataagaactatattttttcttattccaatgaacaagattaatctctccagagtatttgtacacatctatcaagtgattggatccataatcgtcttcctttccccaatatatatgtagtgatgataacacatattcattggggagaaaccctccacttatatatcctcctttaaaattaatccttactagttttccagtgttctggatagtggttggtttcgactcattataatgtatgtctaacggcttcaatcgcgcgttagaaattgcttttttagtttctatattaataggagatagttgttgcggcatagtaaaaatgaaatgataactgtttaaaaatagctcttagtatgggaattacaatggatgaggaagtgatatttgaaactcctagagaattaatatctattaaacgaataaaagatattccaagatcaaaagacacgcatgtgtttgctgcgtgtataacaagtgacggatatccgttaataggagctagaagaacttcattcgcgttccaggcgatattatctcaacaaaattcagattctatctttagagtatccactaaactattacggtttatgtactacaatgaactaagagaaatctttagacggttgagaaaaggttctatcaacaatatcgatcctcactttgaagagttaatattattgggtggtaaactagataaaaaggaatctattaaagattgtttaagaagagaattaaaagaggaaagtgatgaacgtataacagtaaaagaatttggaaatgtaattctaaaacttacaacacgggataaattatttaataaagtatatataggttattgcatggcgtgttttattaatcaatcgttggaggatttatcgcatactagtatttacaatgtagaaattagaaagattaaatcattaaatgattgtattaacgacgataaatacgaatatctgtcttatatttataatatgctagttaatagtaaatgaacttttacagatctagtataattagtcagattattaagtataatagacgactagctaagtctattatttgcaaggatgactctcaaattattacactcacggcattcgttaaccaatgcctatggtgtcataaacgagtatccgtgtccgctattttattaactactgataacaaaatattagtatgtaacagacgagatagttttctctattctgaaataattagaactagaaacatgtttagaaagaaacgattatttctgaattattccaattatttgtccaaacaggaaagaagtatactatcgtcatttttttctctatatccagctactgctgataatgatagaatagacgctatttatccgggtggcatacccaaaaggggtgagaatgttccagagtgtctatccagggaaatcaaagaagaagttaatatagacaattcttttgtattcatagacactcggttttttattcatggtatcatagaagataccattatcaacaaattttttgaggtaattttctttgtcggaagaatatctctaacgagtgatcaaattattgatacctttaaaagtaatcatgaaatcaaggatctaatatttttagatccgaattcaggtaatggactccaatacgaaattgcaaaatatgctctagatactgcaaaacttaaatgttacggccatagaggatgttattatgaatcattaaaaaaattaactgaggatgattgattagaaaatataaattaatttaccatcgtgtatttttataacgggattgtccggcatatcatgtagatagttaccgtctacatcgtatactcgaccatctacgcctttaaatcctctatttattgacattaatctattagaattggaataccaaatattagtaccctcaattagtttattggtaatattttttttagacgatagatcgatggctcttgaaaccaaggttttccaaccggactcattgtcgatcggtgagaagtctttttcattagcatgaatccattctaatgatgtatgtttaaacactctaaacaattggacaaattcttttgatttgctttgaatgatttcaaataggtcttcgtctacagtaggcataccattagataatctagccattataaagtgcacgtttacatatctacgttctggaggagtaagaacgtgactattgagacgaatggctcttcctactatctgacgaagagacgcctcgttccatgtcatatctaaaatgaagatatcattaattgagaaaaaactaataccctcgcctccactagaagagaatacgcatgttttaatgcattctccgttagtgtttgattcttggttaaactcagccaccgccttgattctagtatcttttgttctagatgagaactctatattagagataccaaagactttgaaatatagtaataagatttctattcctgactgattaacaaatggttcaaagactagacatttaccatgggatgctaatattcccaaacatacatctataaatttgacgcttttctcttttaattcagtaaatagagagatatcagccgcactagcatcccctttcaatagttctccctttttaaaggtatttaatgcggatttagaaaactctctatctcttaatgaatttttaaaatcattatatagtgttgctatctcttgcgcgtattcgccgggatcacgattttgtctttcaggaaagctatcgaacgtaaacgtagtagccatacgtctcagaattctaaatgatgatataccagtttttatttctgcgagtttagccttttgataaatctcttcttgcttttttgacatattaacgtatcgcattaatactgttttcttagcgaatgatgcagacccttctacgttatcaaaaatagaaaactcgttattaactatgtacgaacataggcctcctagtttggagactaattctttttcatcgactagacgtttattctcaaatagtgattggtgttgtaaggatcctggtcgtagtaagttaaccaacatggtgaattcttgcacactattgacgataggtgtagccgataaacaaatcatcttatggttttttaatgcgatggtcttggataaaaaattatatactgaacgagtaggacggatcttaccatcttctttgattaatgatttagaaatgaagttatgacattcatcaataatgacgcatattctactcttggaattaatagttttgatattagtaaaaaatttatttctaaaattttgatcatcgtaattaataaaaatacaatccttcgttatctctggagcgtatctgagtatagtgttcatccaaggatcttctatcaaagcctttttcaccaataagataatagcccaattcgtataaatatccttaagatgtttgagaatatatacagtagtcattgttttaccgacacccgtttcatggaacaataaaagagaatgcatactgtctaatcctaagaaaactcttgctacaaaatgttgataatccttgaggcgtactacgtccgaccccatcatttcaacgggcatattagtagttctgcgtaaggcataatcgatataggccgcgtgtgatttactcatttatgagtgataagtaataactatgttttaaaaatcacagcagtagtttaactagtcttctctgatgtttgttttcgatactttttgaatcagaagtcatactagaataaagcaacgagtgaacgtaatagagagcttcgtatactctattcgaaaactctaagaacttattaatgaattccgtatccactggattgtttaaaatactaaattgaacactgttcacatccttccaagaagaagacttagtgacggacttaacatgagacataaataaatccaaattttttttacaaacatcactagccaccataatggcgctatctttcaaccagctatcgcttacgcattttagcagtctaacatttttaaagagactacaatatattctcatagtatcgattacacctctaccgaataaagttggaagtttaataatacaatatttttcgtttacaaaatcaaataatggtcgaaacacgtcgaaggttaacatcttataatcgctaatgtatagattgttttcagtgagatgattattagatttaatagcatctcgttcacgtttgaacagtttattgcgtgcgctgaggtcggcaactacggcgtccgctttagtactcctcccataatactttacgctattaatctttaaaatttcatagactttatctagatcgctttctggtaacatgatatcatgtgtaaaaagttttaacatgtcggtcggcattctatttagatcattaactctagaaatctgaagaaagtaattagctccgtattccagactaggtaatgggcttttacctagagacagattaagttctggcaatgtttcataaaatggaagaaggacatgcgttccctcccggatattttttacaatttcatccatttacaactctatagtttgttttcattattattagttattatctcccataatcttggtaatacttaccccttgatcgtaagataccttatacaggtcattacatacaactaccaattgtttttgtacataatagattggatggttgacatccatggtggaataaactactcgaacagatagtttatctttccccctagatacattggccgtaatagttgtcggcctaaagaatatctttggtgtaaagttaaaagttagggttcttgttccattattgctttttgtcagtagttcattataaattctcgagatgggtccgttctctgaatatagaacatcatttccaaatctaacttctagtctagaaataatatcggtcttattcttaaaatctattcccttgatgaagggatcgttaatgaacaaatccttggcctttgattcggctgatctattatctccgttatagacgttacgttgactagtccaaagacttacaggaatagatgtatcgatgatgttgatactatgtgatatgtgagcaaagattgttctcttagtggcatcactatatgttccagtaatggcggaaaactttttagaaatgttatatataaaagaattttttcgtgttccaaacattagcagattagtatgaagataaacactcatattatcaggaacattatcaatttttacatacacatcagcatcttgaatagaaacgataccatcttctggaacctcaacaatctcggcagactccggataaccagtcggtggaccatcgctaacaataactagatcatccaacaatctactcacatatgcatctatataatctttttcatcttgtgagtaccctggatacgaaataaatttattatccgtatttccataataaggtttagtataaacagagagcgatgttgccgcatgaacttcagttacagtcgccgttggttggtttatttgacctattactctcctaggtttctctataaacgatggtttaatttgtacattcttaaccatatatccaataaagctcaattcaggaacataaacaaattctttgttgaacgtttcaaagtcgaacgaagagtcacgaataacgatatcggatactggattgaaggttaccgttacggtaatttttgaatcggatagtttaagactgctgaatgtatcttccacatcaaacggagttttaatataaacgtatactgtagatggttctttaatagtgtcattaggagttaggccaatagaaatatcattaagttcactagaatatccagagtgtttcaaagcaattgtattattgatacaattattatataattcttcgccctcaatttcccaaataacaccgttacacgaagagatagatacgtgattaatacatttatatccaacatatggtacgtaaccgaatcttcccatacctttaacttctggaagttccaaactcagaaccaaatgattaagcgcagtaatatactgatccctaatttcgaagctagcgatagcctgattgtctggaccatcgtttgtcataactccggatagagaaatatattgcggcatatataaagttggaatttgactatcgactgcgaagacattagaccgtttaatagagtcatccccaccgatcaaagaattaatgatagtattattcattttctatttaaaatggaaaaagcttacaataaactccgtagagaaatatctataatttgtgagttttccttaaagtaacagcttccgtaaacgccgtctttatctcttagtaagtttattgtatttataaccttttccttatcttcatagaatactaaaggcaacaaagaaatttttggttcttctctaagagctacgtgagacttaaccatagaagccaacgaatccctacatattttagaacagaaataccctacttcaccacccttgtatgtctcaatactaataggtctaaaaaccaaatcttgattacaaaaccaacacttatcaattacactatttgtcttaatagacacatctgccatagatttataatactttggtagtatacaagcgagtgcttcttctttagcgggcttaaagactgctttaggtgctgaaataaccacatctggaaggcttactcgcttagccatttaattacggaactatttttttatacttctaatgagcaagtagaaaacctctcatctacaaaaacatactcgtgtccataatcctctaccatagttacacgttttttagatctcatatgtgctaaaaagttttcccatactaattggttactattatttttcgtataatttttaacagtttgaggttttagatttttagttacagaagtgatatcgaatattttatccaaaaagaatgaataattaattgtcttagaaggagtgttttcttggcaaaagaataccaagtgcttaaatatttctactacttcattaatcttttctgtactcagattcagtttctcatcttttacttgattgattatttcaaagactaacttataatcctttttatttattctctcgttagccttaagaaaactagatacaaaatttgcatctacatcatccgtggatatttgatttttttccatgatatccaagagttccgagataatttctccagaacattgatgagacaataatctccgcaatacatttctcaaatgaataagtttattagacacgtggaagtttgactttttttgtacctttgtacatttttgaaataccgactcgcaaaaaatacaatattcatatccttgttcagatactataccgttgtgtctacaaccgctacataatcgtagattcatgttaacactctacgtatctcgtcgtccaatattttatataaaaacattttatttctagacgttgccagaaaatcctgtaatacttttagttttttgggctgtgaataaagtatcgccctaatatggttaccgtcctccgccaatatagtagttaaattatccgcacatgcaaaagaacaccgcttaggcggattcagtacaatgttatatttttcgtaccaactcatttaaatatcataatctaaaatagttctgtaatatgtctagcgctaatatattgatcataatcctgtgcataaattaagatacaacaatgtctcgaaatcatcgacatggcttcttccatagttagaagatcgtcgtcaaagttagcaacgtgattcatcaacatttgctgttttgaggcagcaaatactgaaccgtcgccattcaaccattcataaaaaccatcgtctgaatccattgataatttcttgtactggtttttgagagctcgcatcaatctagcatttctagctcccggattgaaaacagaaagaggatcgtacatccagggtccattttctgtaaatagaatcgtataatgtcccttcaagaagatatcagacgatccacaatcaaagaattggtctccgagtttgtaacaaactgcggactttaacctatacatgataccgtttagcataatttctggtgatacgtcaatcggagtatcatctattagagatctaaagccggtgtaacattctccaccaaacatattcttattctgacgtcgttctacataaaacatcattgctccattaacgataacaggggaatgaacagcactacccatcacattagttcccaatggatcaatgtgtgtaactccagaacatcttccatagcctatgttaggaggagcgaacaccactcttccactattgccatcgaatgccatagaataaatatccttggaattgatagaaatcggactgtcggatgttgtgatcatcttcataggattaacaacgatgtatggtgccgcctgaagtttcatatcgtaactgatgccgttcataggtctagccacagaaaccaacgtaggtctaaatccaactatagacaaaatagaagccaatatctgttcctcatctgtcataacttgagagcatccagtatgaataatcttcattagatggggatctaccgcatcatcatcgttacaataaaaaattcccattctaatgttcataattgcttttctaatcatggtatgcatgtttgctctctgaatctctgtggaaattagatctgatacacctgtaatcactatcggattatcctccgtaagacgattaaccaacaacatataattataagactttacttttctaaattcataaagttgctggattaggctataggtgtctccatgtacatacgcgttctcgagcgcaggaagtttaataccgaatagtgccatcagaataggatgaatatagtaattagtttctggttttctataaataaaagacaaatcttgtgaactagacatatcggtaaaatgcatggattggaatcgtgtagtcgacagaagaatatgatgattagatggagagtatattttatctaactctttgagttggtcaccgattctaggactagctcgagaatgaataagtactaaaggatgagtacatttcacagaaacactagcattgttcaatgtgctctttacatgggtaaggagttgaaatagctcgtttctatttgttctgacaatatttagtttattcataatgttaagcatatcctgaatagtaaagttagatgtgtcatacttgttagtagttagatatttagcaattgcattcccatcatttctcaatctcgtactccaatcatgcgtggatgctacttcgtcgatggaaaccatacaatcctttttgataggctgttgagattgattatttcctgcacgtttaggtttggtacgttgatttctagcccctgcggatataaagtcatcgtctacaatttgggacaatgaattgcatacactacaagacaaagatttatcagaagtgtgaatatgatcttcatctaccaaagaaagagtttgattagtataactagattttagtcctgcgttagatgttaaaaaaacatcgctattgaccacggcttccattatttatattcgtagtttttactcgaaagcgtgattttaatatccaatcttattacttttggaatcgttcaaaacctttgactagttgtagaatttgatctattgccctacgcgtatactcccttgcatcatatacgttcgtcaccagatcgtttgtttcggcctgaagttggtgcatatctttttcaacactcgacatgagatccttaagggccatatcgtctagattttgttgagatgctgctcctggatttggattttgttgtgctgttgtacatactgtaccaccagtaggtgtaggagtacatacagtggccacaataggaggttgaggaggtgtaaccgttggagtagtacaagaaatatttccatccgattgttgtgtacatgtagttgttggtaacgtctgagaaggttgggtagatggcggtgtcgtcgtcttttgatctttattaaatttagagataatatcctgaacagcattgctcggcgtcaacgctggaaggagtgaactcgccggcgcatcagtatctgcagacagccaatcaaaaagattagacatatcagatgatgtattagtttgttgtcgtggttttggtgtaggagcagtactactaggtagaagaataggagccgatgtaggtgtcggaaccggctgtggagttatatgaatagttggttgtagcggttggataggctgtctgctggcggccatcatattatctctagctagttgttctcgcaactgtctttgataatacgactcttgagactttagtcctatttcaatcgcttcatcctttttcgtatccggatccttttcttcagaataatagattgacgactttggtgtagaggattctgccagcccctgtgagaacttgttaaagaagtccatttaaggctttaaaattgaattgcgattataagattaaatggcagacacagacgatattatcgactatgaatccgatgatctcactgaatacgaggatgatgaagaagaggaagaagatggagagtcactagaaactagtgatatagatcccaaatcttcttataagattgtagaatcagcatccactcatatagaagatgcgcattccaatcttaaacatatagggaatcatatatctgctcttaaacgacgctatactagacgtataagtctatttgaaatagcgggtataatagcagaaagctataacttgcttcaacgaggaagattacctctagtttcagaattttctgacgaaacgatgaagcaaaatatgctacatgtaattatacaagagatagaggagggttcttgtcctatagtcatcgaaaagaacggagaattgttgtcggtaaacgattttgacaaagatggtctaaaattccatctagactatattatcaaaatttggaaacttcaaaaacgatattagaatttatacgaatatcgttctctaaatgtcacaatcaagtctcgcatgttcagcaatttattgtcgtactttatatcgtgttcattaacgatatcttgcaaaatagtaatgattctatcttccttcgatagatattcttcagagattattgtcttatattctttcttgttatcagatatgaatttgataagactttgaacattattgatacccgtctgtttaattttttctacagatattttagttttggcagattctatcgtatctgtcaatagacatccaacatcgacattcgacgtcaattgtctataaatcaacgtataaattttagaaataacattagcgaattgttgtgcattgatgtcgttattctgaaacagtatgattttaggtagcattttcttaacaaagagaacgtatttattgttactcagttgaacagatgatatatccagattactaacgcatctgattccgtataccaaactttcagaagaaatggtatacaattgtttgtattcattcaatgtctctttttcagaaattagtttagagtcgaatactgcaataattttcaagagatagttttcatcagataagattttatttagtgtagatatgataaaactattgttttgttggagaacttgatacgccgcgttctctgtagtcgacgctctcaaatgggaaacgatctccattatttttttggaatcggatactatatcttcggtatcttgacgcagtctagtatacatagagttaagagagattagagtttgtacattaagcaacatgtctctaaatgtggctacaaacttttccttttccacatcatctagtttattatataccgatttcacaacggcaccagatttaaggaaccagaatgaaaaactctgataactacaatatttcatcatagttacgattttatcatcttctatagttggtgtaatagcgcatacctttttctccaagactggaaccaacgtcataaaaatgtttaaatcaaaatccatatcaacatctgatgcgctaagaccagtctcgcgttcaagattatctttactaatggtgacgaactcatcgtatagaactctaagtttgtccattatttatttacagatttagttgtttaatttatttgtgctcttccagagttgggatagtatttttctaacgtcggtattatattattaggatctacgttcatatgtatcataatattaatcatccacgttttgataaatctatctttagcttctgaaataacgtatttaaacaaaggagaaaaatatttagctacggcatcagacgcaataacattttttgtaaatgtaacgtatttagacgacagatcttcgttaaaaagttttccatctatgtagaatccatcagttgttaacaccattcccgcgtcagattgaataggagtttgaatagtttgttttggaaatagatccttcaataacttatagttgggtgggaaaaaatcgattttatcactagactctttcttttttactatcattacctcatgaactatttcttgaatgagtatatgtattttctttcctatatcggacgcgttcattggaaaatataccatgtcgttaactataagaatatttttatcctcgtttacaaactgaataatatcagatgtagttcgtaaacgaactatatcatcaccagcacaacatctaactatatgatatccactagtttcctttagtcgtttattatcttgttccatattagcagtcattccatcatttaagaaggcgtcaaagataatagggagaaatgacattttggattctgttacaactttaccaaaattaaggatatacggacttactatctttttctcaacgtcaatttgatgaacacacgatgaaaatgtacttcgatgagattgatcatgtagaaaacaacaagggatacaatatttccgcatatcatgaaatatattaagaaatcccaccttattatatttccccaaaggatccatgcacgtaaacattatgccgttatcattaataaagacttctttctcatcggatctgtaaaagttgttactgatttttttcattccaggatctagataattaataatgatgggttttctattcttattctttgtattttggcatatcctagaccagtaaacagtttccactttggtaaaatcagcagacttttgaacgctattaaacatggcattaatggcaataactaaaaatgtaaaatatttttctatgttaggaatatggtttttcactttaatagatatatggtttttggccaaaatgatagatatttttttatccgaggatagtaaaatattattagtcgccgtctctataaaaatgaagctagtctcgatatccaattttattctagaattgataggagtcgccaaatgtaccttatacgttatatctcccttgatgcgttccatttgtgtatctatatcggacacaagatctgtaaatagttttacgttattaatcatcacggtatcgccgtcgctagataatgctaatgtaccatccaagtcccaaatggagagatttaactgttcatcgtttagaataaaatgattaccggtcatattaataaagtgttcatcgtatctagataacaacgacttataattaatgtccaagtcttgaactcgctgaatgatcttttttaacccagttagttttagattggtacgaaatatattgttaaactttgattctacagtaatgtccaaatctagttgtggaaatacttccatcaacattgtttcaaacttgataatattattatctacatcttcatacgatccaaattccggaatagatgtatcacatgctcttgccacccagataaccaaaaagtcacacgctccaggatatacattgtataaaaagctatcgtttttaagtagggtttttttctgcgtgtatacgaagggattaaaaatagtattatcaacgtaactatattccaaattattcttatgagaatagataataatatcgtccttaatatctaacaaatttcctaaatatccctttaattgagtcattcgaagcgtcaatagaatatgtctcttaactatttccggctgttgtatatttaaatgacttcgtaaaaaataatatatgggcgacttctcatctatgtaatcatatggagtgagatatagggctcgttctacctcctgccccttacccacctgtaataccaattgcggacttactatatatcgcatatttatatcgtggggtaaagtgaaaatctactaccgatgatgtaagtcttacaatgttcgaaccagtaccagatcttaatttggaggcctccgtagaactaggggaggtaaatatagatcaaacaacacctatgataaaggaaaatagcggttttatatcccgtagtagacgtctattcgcccatagatctaaggatgatgagagaaaactagcactacgattctttttacaaagactttattttttagatcatagagagattcattatttgttcagatgcgttgacgctgtaaaagacgtcactattaccaaaaaaaataacattatcgtggcgccttatatagcacttttaactatcgcatcaaaaggatgcaaacttacagaaacaatgattgaagcattctttccagaactatataatgaacatagtaagaaatttaaattcaactctcaagtatccatcatccaagaaaaactcggataccagtttggaaactatcacgtttatgattttgaaccgtattactctacagtagctctggctattcgagatgaacattcatctggcatttttaatatccgtcaagagagttatctggtaagttcattatctgaaataacatatagattttatctaattaatctaaaatctgatcttgttcaatggagtgctagtacgggcgctgtaattaatcaaatggtaaatactgtattgattacagtgtatgaaaagttacaactggtcatagaaaatgattcacaatttacatgttcattggctgtggaatcagaacttccaataaaattacttaaagatagaaatgaattatttacaaaattcatcaacgagttaaaaaagaccagttcattcaagataagcaaacgcgataaggatacgctactaaaatattttacttaggactggagttagaatttatagacgactcatttcgtttatcattattactaccatcattattagtattcttcttgttatcttgttcagaaatatacagcaatgctatgcctaatactaaatacattatcatgcttgcaatggctctaacaacgacgaaccaaaatgaatttggtcgtagcttttgttcacaaaaatacataaagaaatgtctacataaatctatggcgccattggctacttgaaatagcgccagtcctcctacagattttaatatagctgtataacatgacatttattcatcatcaaaagagacagagtcaccatctgtcatatttagattttttttcatgtgttcaaagtatcctctactcatttcattataatagtttatcatacttagaattttaggacggatcaatgagtaagacttgactagatcgtcagtagtaatttgtgcatcgtctattctgcatccgcttcgtcgaataatgtatagcatcgctttgagattctccatagctatcaagtctttatacaatgacatggaaatatctgtgaatactttatacttctccaacatcgatgccttaacatcatcgcctactttagcattgaaaatacgttctattgtgtagatggatgtagcaagatttttaaacaacaatgccatcttacacgatgattgcctcaagtctccaatcgtttgtttagaacgattagctacagagttcaacgcttggctgactagcatattattatctttagaaattgtattcttcaatgaagcgtttatcatatctgtgatttcgttagtcatattacagtctgactgggttgtaatgttatccaacatatcacctatggatacggtacacgtaccagcatttgtaataatcctatctaagatgttgtatggcattgcgcagaaaatatcttctcctgtaatatctccactctcgataaatctactcagattattcttaaatgccttattctctggagaaaagatatcagtgtccatcatttcattaatagtatacgcagaaaagataccacgagtatcaattctatccaagatacttatcggttccgagtcacagataatggtttcctctccttcgggagatcctgcatagaaatatctaggacaatagtttctatactgtctgtaactctgataatctctaaagtcactaactgataccatgaaattgagaagatcaaacgctgaagtaatcaatttttctgcctcgtttttactacaactagttttcatcaatgtagtgacgatgtattgtttagttactcttggtctaatactgatgatagagatattattacttcccataatggatcttctagtagtcaccttaaagcccattgatgcaaatagcagatagataaagtcttggtatgactcctttctaatatagtacggactacctttgtcacccaactttatacccacataagccataacaacctctttaatagccgtttcatgaggtttatcagccatgagcctgagtagttggaagaatctcatgaatcccgtctcagaaagtcctatatgcatgatagatttatctttcctgggaaactctcgtatagtcatagatgaaatactcttcaaagtttctgaaataagattagtaacagtcttacctccgactactctgggtaacaaacatactctaataggtgttttctctgcggagataatatcagaaaggatagagcaataagtagtattattgtgattataaagaccgaatacataacaggtagaatttataaacatcatgtcctgaaggtttttagacttgtattcctcgtaatccataccgtcccaaaacatggatttggtaactttgatagccgtagatctttgttccttcgccaacaggttaaagaaattaataaagaatttgttgtttctatttatgtccacaaattgcacgtttggaagcgtaactgttacgttcactgcagcattttgaggatcgcgagtatgaagtacgatgttattgtttactggtatatctggaaagaaatctaccagtctaggaataagagattgatatcgcatagaaatagtaaagtttataatctcatcatcgaagagcattttgttaccattgtaataaatatccactctgtcatatgtataaatgaagtactgttcaaacatgatgagatgtttatatgttggcatagtagtgagatcgacgtttggtaatggcaatgtattaagattaactccataatgtctagcagcatctgcgatgttataagtgtcgtcaaagcggggtcgatcttgtgctgttatatattgtctaacacctataagattatcaaaatcttgtctgcttaatacaccgttaacaatttttgccttgaattcttttattggtgcattaataacatccttatagaggatgttaaacaaataagtgttatcaaagttaagatctggatatttcttttctgctagaacatccattgagtcggagccatctggtttaatataaccaccgataaatctagctctgtattctgtatccgtcaatctaatattaagaaggtgttgagtgaaaggtggaagatcgtaaaagctgtgagtattaatgataggattagtttccgaactaatgttaattggggtattaataatatctatatttccagcgttaagtgtaacattaaacagttttaattcacgtgacgtggtatcaattaaataattaatgcccaatttggatatagcagcctgaagctcatcttgtttagttacggatcctaatgagttattaagcaatatatcgaacggatgaacgaaggttgttttaagttggtcacatactttgtaatctagacatagatgcggaagaacggtagaaactatacgaaataaatattcagagtcctctaattgatcaagagtaactattgacttaataggcatcatttatttagtattaaatgacgaccgtaccagtgacggatatacaaaacgatttaattacagagttttcagaagataattatccatctaacaaaaattatgaaataactcttcgtcaaatgtctattctaactcacgttaacaacgtggtagatagagaacataatgccgccgtagtgtcatctccagaggaaatatcctcacaacttaatgaagatctatttccagatgatgattcaccggccactattatcgaacgagtacaacctcatactactattattgacgatactccacctcctacttttcgtagagagttattaatatcggaacaacgtcaacaacgagaaaaaagatttaatattacagtatcgaaaaatgctgaagcaataatggaatctagatctatgataacttctatgccaacacaaacaccatccttgggagtagtttatgataaagataaaagaattcagatgttagaggatgaagtggttaatcttagaaatcaacgatctaatacaaaatcatctgataatttagataattttaccaaaatactatttggtaagactccgtataaatcaacagaagttaataagcgtatagccatcgttaattatgcaaatttgaacgggtcccccttatcagttgaggacttggatgtttgttcggaggatgaaatagatagaatctataaaacgattaaacaatatcacgaaagtagaaaacgaaaaattatcgtcactaacgtgattattattgtcataaacattatcgagcaggcattgctaaaactcggatttgaagaaatcaaaggactgagtaccgatatcacttcagaaattatcgatgtggagatcggagatgactgcgatgctgtagcatctaaactaggaatcggtaacagtccggttcttaatattgtattgtttatactcaagatattcgttaaacgaattaaaattatttaatttaatacattcccatatccagacaacaatcgtctggattaatctgttcctgtcgtctcataccggacgacatattaatctttttattagtaggcatctttttagatggtttctttttcccagcattaactgagtcgatacctagaagatcgtgattgatctctccgaccattccacgaacttctaattggccgtctctgacggtaccataaactattttaccagcattagtaacagcttggacaatctgaccatccattgcgttgaatgatgtagttgctgttgttctacgtttaggagcaccagaagtatttttggagcccttggaggctgatgtagaagaagacgaggattttgatttacatgtaatacattttgtactctttgattttgtatcacatgcgccggcagtcacatttgtttgagaattaagattattgttgcctcctttgacggctgcatctccaccgatttgcgctagtagatttttaagctgtggtgtaatcttattaactgtttcgatataatcatcgtaactgcttctaacggctaaattttttttatccgccatttagaagctaaaaatatttttatttatgcagaagatttaactagattatacaatgaactaatatgatccttttccagattatttacaaacttggtattttttggttctggaggaggcgaatttaaattcggacttggattcggattttgtgagttcttgatcttattatacatcgagtataggatggcgacggtaactgctacgcaaataccgatcaacaaaagaataccaatcatttattgacaataacttcactattgatcaagtatgcaatatatcatcttttcactaaataagtagtaataatgattcaacaatgtcgagatatatggacgataataatttagttcatggaaatatcgctatgattggtatgaatgactccgctaactctgtggggtgcgcagtgctttccccacatagaataaattagcattccgactgtgataataataccaagtataaacgccataatactcaatactttccatgtacgagtgggactggtagacttactaaagtcaataaaggcgaagatacacgaaagaatcaaaagaatgattccagcgattagcacgccggaaaaataatttccaatcataagcatcatgtccatttaactaataaaaattttaaatcgccgaatgaacaaagtggaatataaaccatataaaaacaatagtttgtactgcaaaaataatatctatttttgttttcgaagatatggtaaaattaaatagtagtacacagcatgttataactaacagcagcaacggctcgtaattacttatcatttactagacgaaaaggtggtgggatattttcttgctcaaataatacgaatatatcacccatccattttatgcgatgtttatatactctaatctttaatagatctatagacgacgggtttaccaacaatatagattttatcgattcatctaatttaaacccttccttaaacgtgaatgatctattatctggcataacgatgactctacctgatgaatcggacaatgtactgggccatgtagaataaattatcaacgaattatcgtctacgaacatttatatcatttgttttaattttaggacgcgaataaatggatataaaatagaaaataacagatattacaaccaatgttatggccgcgcccaaccaggtaggcagttttattttatcttttactacaggttctcctggatgtacgtcaccaacggcggacgtagttctagtacaattagacgtaagttctgcttgggaattttttaacgctaaagagttaacgttaatcgtgcacccaacgtatttacatctagttctttgaacatcttgattataatataaccattttctatctctagattcgtcggtgcactcatgtaaccaacataccctaggtcctaaatatttatctccggaattagattttggataattcgcgcaccaacaatttctatttcctttatgatcgttacaaaagacgtataatgccgtatccccaaaagtaaaataatcaggacgaataattctaataaactcagaacaatatctcgcatccatatgtttggagcaaatatcggaataagtagacatagccggtttccgttttgcacgtaaccattctaaacaattggggtttccaggatcgtttctacaaaatccagtcatgaaatcatcacaatgttctgtcttgtaattattattaaatatttttggacagtgtttggtatttgtcttagaacaacattttgccacgctatcactatcgcccaggagataatccttttttataaaatgacatcgttgcccggatgctatataatcagtggcgtgttttaaatccttaatatattcaggagttacctcgttctgataatagattaatgatccaggacgaaatttgaaagaactacatggttctccatgaattaatacatattgtttagcaaattcaggaactataaaactactacaatgatctatcgacataccatctatcaaacaaaacttgggtttaatttctcccggagatgtttcataatagtacgtataactttcttctgcaaacttaacagctctattatattcaggataattaaaacctaattccatatatttgtctcgtatatctgctattcctggtgctattttaattctattaagagtaacggctgcccccattcttaataatcgtcagtatttaaactgttaaatgttggtatatcaacatctaccttatttcccgcagtataaggtttgttgcaggtatactgttcaggaatggttacatttatacttcttctatagtcctgtctttcgatgttcatcacatatgcaaagaacagaataaacaaaataatgtaagaaataatattaaatatctgtgaattcgtaaatacattgattgccataataattacagcagctacaatacatacaatagacattcccacagtgttgccattacctccacgatacatttgagttactaagcaataggtaataactaagctagtaagaggcaatagaaaagatgagataaatatcatcaatatagagattagaggagggctatatagagccaagacgaacaaaatcaaaccgagtaacgttctaacatcattatttttgaagattcccaaataatcattcattcctccataatcgttttgcattatacctccatctttaggcataaacgattgctgctgttcctctgtaaataaatctttatcaagcactccagcacccgcagagaagtcgtcaagcatattgtaatatcttaaataactcatttatatattaaaaaatgtcactattaaagatggagtataatctttatgccgaactaaaaaaaatgacttgtggtcaacccctaagtctttttaacgaagacggggatttcgtagaagttgaaccgggatcatcctttaagtttctgatacctaagggattttacgcctctccttccgtaaagacgagtctagtattcgagacattaacaacgaccgataataaaatcactagtatcaatccaacaaatgcgccaaagttatatcctcttcaacgcaaagtcgtatctgaagtagtttctaatatgaggaaaatgatcgaatcaaaacgtcctctatacattactcttcacttggcgtgtggatttggtaagactattaccacgtgttatcttatggctacacacggtagaaaaaccgtcatttgcgtacccaataaaatgttaatacatcaatggaagacacaggtagaggcagtcggattggaacataagatatctatagatggagtaagtagtctattaaaggaactaaagactcaaagtccggatgtattaatagtagtcagtagacatctgacaaacgatgccttttgtaaatatatcaataagcattatgatttgttcatcttggatgaatcacatacgtataatctgatgaacaatacagcagttacaagatttttagcgtattatcctccgatgatgtgttattttttaactgctacacctagaccagctaaccgaatttattgtaacagtattattaatattgccaagttatccgatctaaaaaaaactatctatgcggtagatagtttttttgagccatattccacagacaatattagacatatggtaaaacgactagatggaccatctaataaatatcatatatatactgagaagttattatctgtagacgagcctagaaatcaacttattcttgataccctggtagaagaattcaagtcaggaactattaatcgaattttagttattactaaactacgtgaacatatggtattcttctacaaacgattattagattttttcggatcagaggttgtatttataggagacgcccaaaatagacgtactccagatatggtcaaatcaatcaaggaactaaatagatttatattcgtatccaccttattttattccggtactggtttagatattcctagtttggattcgttgttcatttgctcggcagtaatcaacaatatgcaaatagagcaattactagggagggtatgtcgagaaacagaactattagataggacggtatatgtatttcctaacacatccatcaaagaaataaagtacatgataggaaatttcatgcaacgaattattagtctgtctgtagataaactaggatttaaacaaaaaagttatcggaaacatcaagaatccgatcccacttctgtatgtacaacatcctccagagaagaacgtgtattaaatagaatatttaactcgcaaaatcgttaagaagtttaagcgacgatccgcatgctgcgcaggccagtgtattacccctcatagtattaatataatccaatgatacttttgtgatgtcggaaatcttaaccaatttagactgacaggcagaacacgtcatgcaatcatcatcgtcatcgataactgtagtcttgggcttctttttgcggctcttcattccggaacgcacattggtgctatccatttaggtagtaaaaaataagtcagaatatgccctatagcacgatcgtgcaaaacctggtatatcgtctctatctttatcacaatatagtgtatcgacatttttattattattgacctcgtttatcttggaacatggaatgggaacatttttgttatcaacggccatctttgccttaattccagatgttgtaaaattataactaaacagtctatcatcgacacaaatgaaattcttgtttagacgtttgtagtttacgtatgcggctcgttcgcgtctcattttttcagatattgcaggtactataatattaaaaataagaatgaaataacataggattaaaaataaagttatcatgacttctagcgctgatttaactaacttaaaagaattacttagtctgtacaaaagtttgaaattttcagattctgcggctatagaaaagtataattctttggtagaatggggaacatctacttactggaaaataggcgtgcaaaaggtagctaatgtcgagacgtcaatatctgattattatgatgaggtaaaaaataaaccgtttaatattgatccgggatattacattttcttaccggtatattttggaagcgtctttatttattcgaagggtaaaaatatggtagaacttggatctggaaactcttttcaaataccagatgatatgcgaagtgcgtgtaacaaagtattagacagcgataacggaatagactttctgagatttgttttgttaaacaatagatggataatggaagatgctatatcaaaatatcagtctccagttaatatatttaaactagctagtgagtacggattaaacatacccaaatatttagaaattgaaatagaggaagacacattatttgacgacgagttatactctattatagaacgctctttcgatgataaatttccaaaaatatccatatcgtatattaagttgggagaacttagacggcaagttgtagactttttcaaattctcgttcatgtatattgagtccatcaaggtagatcgtataggagataatatttttattcctagcgttataacaaaatcaggaaaaaagatattagtaaaagatgtagaccatttaatacgatccaaggttagagaacatacatttgtaaaagtaaaaaagaaaaacacattttccattttatacgactatgatggaaacggaacagaaactagaggagaagtaataaaacgaattatagacactataggacgagactattatgttaacggaaagtatttctctaaggttggtagtgcaggcttaaagcaattgactaataaattagatattaatgagtgcgcaactgtcgatgagttagttgatgagattaataaatccggaactgtaaaacgaaaaataaaaaaccaatcagcatttgatttaagcagagaatgtttgggatatccagaagcggattttataacgttagttaataacatgcggttcaaaatagaaaattgtaaggttgtaaatttcaatattgaaaatactaattgtttaaataacccgagtattgaaactatatatggaaactttaaccagttcgtctcaatctttaatatcgtcaccgatgtcaaaaaaagattattcgagtgaaataatatgcgcctttgatataggtgcaaaaaatcctgccagaactgttttagaagtcaaggataactccgttagggtattggatatatcaaaattagactggagttctgattgggaaaggcgcatagctaaagatttgtcacaatatgaatacactacagttcttctagaacgtcagcctagaaggtcgccgtacgtcaaatttatctattttattaaaggctttttatatcatacatcggctgccaaagttatttgcgtctcgcctgtcatgtctggtaattcatatagagatcgaaaaaagagatcggtcgaagcatttcttgattggatggacacattcggattgcgagactccgttccggatagacgcaaattagacgatgtagcggatagtttcaatttggctatgagatacgtattagataaatggaatactaattatacaccttataataggtgtaaatctagaaattacataaaaaaaatgtaataacgttagtaacgccattatggataatctatttacctttctacatgaaatagaagatagatatgccagaactatttttaactttcatctaataagttgcgatgaaataggagatatatatggtcttatgaaagaacgcatttcctcagaggatatgtttgataatatagtgtataataaagatatacatcatgccattaagaaactagtgtattgcgacatccaacttactaaacacattattaatcagaatacgtatccggtatttaacgattcttcacaagtgaaatgttgtcattatttcgacataaactcagataatagcaatattagctctcgtacagtagagatatttgagagggaaaagtcatctcttgtatcatatattaaaactaccaataagaagagaaaggtcaattacggcgaaataaagaaaactgttcatggaggcactaatgcaaattacttttccggtaaaaagtctgacgagtatctgagtactacagttagatccaacattaatcaaccttggatcaaaaccatctctaagaggatgagagttgatatcattaatcactctatagtaacgcgtggaaaaagctctatattacaaactatagaaattatttttactaatagaacatgtgtgaaaatattcaaggattctactatgcacattattctatccaaggacaaggatgaaaaggggtgtatacacatgattgacaaattattctatgtctattataatttatttctgttgttcgaggatatcatccaaaacgagtactttaaagaagtagctaatgttgtaaaccacgtacttacggctacggcattagatgagaaattattcctaattaagaaaatggctgaacacgatgtttatggagttagcaatttcaaaatagggatgtttaacctgacatttattaagtcgttggatcataccgttttcccctctctgttagatgaggatagcaaaataaagttttttaaggggaaaaagctcaatattgtagcattacgatctctggaggattgtataaattacgtgactaaatccgagaatatgatagaaatgatgaaggaaagatcgactattttaaatagcatagatatagaaacggaatcggtagatcgtctaaaagaattgcttctaaaatgaaaaaaaacactgattcagaaatggatcaacgactcggatataagtttttggtgcctgatcctaaagccggagttttttatagaccgttacatttccaatatgtatcgtattctaattttatattgcatcgattgcatgaaatcttgaccgtcaagcggccactcttatcgtttaagaataatacagaacgaattatgatagaaattagcaatgttaaagtgactcctccagattactcacctataatcgcgagtattaaaggtaagagttatgacgcattagccacgttcactgtaaatatctttaaagaggtaatgaccaaagagggtatatccatcactaaaataagtagttatgagggaaaagattctcatttgataaaaattccgctactaataggatacgggaataaaaatccacttgatacagccaagtatcttgttcctaatgtcataggtggagtctttatcaataaacaatctgtcgaaaaagtaggaattaatctagtagaaaagattacaacatggccaaaatttagggttgttaagccaaactcattcactttctcgttttcctccgtatcccctcctaatgtattaccgacaagatatcgccattacaagatatctctggatatatcacaattggaagcgtcgaatatatcatcgacaaagacatttataacggtcaatattgttttgctgtctcaatatttatctagagtgagtctagaattcattagacgtagcttatcatacgatatgcctccagaagttgtctatctagtaaacgcgataatagatagtgctaaacgaattactgaatctattactgactttaatattgatacatacattaatgacctggtggaagctgaacacattaaacaaaaatctcagttaacgatcaacgagttcaaatatgaaatgctgcataactttttacctcatatgaactatacacccgatcaactaaagggattttatatgatatctttactaagaaagtttctctactgtatctaccacacttctagatatccagatagagattcgatggtttgtcatcgtatactaacatacggcaaatattttgagacgttggcacatgatgaattagagaattacataggcaacatccgaaacgatatcatgaacaatcacaagaacagaggcacttacgcggtaaacattcatgtactaacaactcctggacttaatcatgcattttctagtctattgagtggaaagttcaaaaagtcagacggtagttatcgaacacatcctcactattcatggatgcagaatatttctattcctaggagtgttggattttatccggatcaagtaaagatttcaaagatgttttctgtcagaaaataccatccaagtcaatatctttacttttgttcatcagacgttccggaaagaggtcctcaggtaggtttagtatctcaattgtctgtcttgagttccattacaaatatactaacgtctgagtatttggatttggaaaagaaaatttgtgagtatatcagatcatattataaagatgatataagttactttgaaacaggatttccaatcactatagaaaatgctctagtcgcatctcttaatccaaatatgatatgtgattttgtaactgactttagacgtagaaaacggatgggattcttcggtaacttggaggtaggtattactttagttagggatcacatgaatgaaattcgcattaatattggagcgggaagattagtcagaccattcttggttgtggataacggagagctcatgatggatgtgtgtccggagttagaaagcagattagacgacatgacattctctgacattcagaaagagtttccgcatgtcatcgaaatggtagatatagaacaatttacttttagtaacgtatgtgaatcggttcaaaaatttagaatgatgtcaaaggatgaaagaaagcaatacgatttatgtgactttcctgccgaatttagagatggatatgtggcatcttcattagtgggaatcaatcacaattctggacccagagctattcttggatgtgctcaagctaaacaagctatctcttgtctgagctcggatatacgaaataaaatagacaatggaattcatttgatgtatccagagaggccaatcgtgattagtaaggctttagaaacttcaaagattgcggctaattgcttcggccaacatgttactatagcattaatgtcgtacaaaggtatcaatcaagaggatggaattatcatcaaaaaacaatttattcagagaggcggtctcgatattgttacagccaagaaacatcaagtagaaattccattggaaaactttaataacaaagaaagagataggtctaacgcctattcaaaattagaaagtaatggattagttagactgaatgctttcttggaatccggagacgctatggcacgaaatatctcatcaagaactcttgaagatgattttgctagagataatcagattagcttcgatgtttccgagaaatataccgatatgtacaaatctcgcgttgaacgagtacaagtagaacttactgacaaagttaaggtacgagtattaaccatgaaagaaagaagacccattctaggagacaaatttaccactagaacgagtcaaaagggaacagtcgcgtatgtcgcggatgaaacggaacttccatacgacgaaaatggtatcacaccagatgtcattattaattctacatccatcttctctagaaaaactatatctatgttgatagaggttattttaacagccgcatattctgctaagccgtacaacaataagggagaaaaccgacctgtctgttttcctagtagtaacgaaacatccatcgatacatatatgcaattcgctaaacaatgttatgagcattcaaatccgaaattgtctgatgaagaattatcggataaaatcttttgtgaaaagattctctatgatcctgaaacggataagccttatgcatccaaagtattttttggaccaatttattacttgcgtctgagacatttaactcaggacaaggcaaccgttagatgtagaggtaaaaagacgaagctcattagacaggcgaatgagggacgaaaacgtggaggaggtatcaagttcggagaaatggagagagactgtttaatagcgcatggtgcagccaatactattacagaagttttgaaagattcggaagaagattatcaagatgtgtatgtttgtgaaaattgtggagacatagcagcacaaatcaagggtattaatacatgtcttagatgttcaaaacttaatctctctcctctcttaacaaaaattgataccacacacgtatctaaagtatttcttactcaaatgaacgccagaggcgtaaaagtcaaattagatttcgaacgaagacctccttcgttttataaaccattagataaagttgatctcaaaccgtcttttctggtctaatattgtttagtagatacttatcaacatcatcaagattatcaagattatcaagattatcaagataagctaattcactaaacacattatcgatttcggtatcgttactcgcagaataaagttcgttatgatcctgatattcggaaatctgtggagtttcaggttttggtggatgtgtaacagctacttgagataccgaagtctgatattcagaaagctgtggatgttctggttcggcatccaccgatggtgttacaccactactaattggttcagtaacgtctgtggacgatggaggcaccacttctacaggttctggttctttatcctcagtcatcaacggagctacttcaatgcgaggaaatgtataatttggtaatggtttctcatgtggatctgaagaagaggtaagatatctactagaaagataccgatcacgttctagttctcttttgtagaacttaactttttctttctcagcatctagttgatattccaacctcttcacgttactacgttcagatttcaattcacgttcgcatgggttacctccgcagtttttacgagcgatttcacgttcagccttcatgcgtctctccctctctctatcgagtttatcagagcagtctttctgaaggcgatcgaactccataaatttctccaacgctttgattgtttccatagatttccgaagttcagcttttaggactgtgattctttttctttcgaattcacagctggatgtacaaccgtttccattaccgccatctctaagtttcttttctagatcggcaacatttcatccccatgccttttacattcctcgagtctactgtcgtcgaaatatcgttccagctccttttcgacatcaataactttagcacgttgtctctcaagctctcttttgtagttatctgattccctggcacgtttaagatcttcatgcaattgagtcagctcttaacacaatctcttgcttcttcgtcatagtacgcgcaatcactgtgagatccattgttaccacgtctacactcggcgagctcgcgtttaagagattcaatttcccgtttgtattggtccatgtttccattgctaccaccattagatttacaggctgctagttgtcgttcgagatcagaaatacgggttttcttggaattgatttcgtcgatgtacttggcatcgaaacacttattaagttctttttccaattctacgattttatttctttcgcgagtcaattccctcctgtagtaactatctgttttgtcagattcacgctctctacgtagactttcttgcaagttactaatttgttccctagcacgtccgagtttagttttatatgctgaatagagttctgattcatcctttgagcagatctctagcgatcgtttaagattcctgattctagtctttagcctatttacctcctcagaagatgttccgttaccgttgcgtttacactcgttaagctgtctatcaagatccatgattctatctctaagacgttgcatctctctttccatatcagcattgctttcattattacgtctgcagtcactcaactgtctttcaatatctgagattctatctctaagacgtcgcatctctctctgtttcggcattggtttcattattacgtctacagtcgttcaactgtctttcaagatctgatattctagattggagtctgctaatctctgtagcattttcacggcattcactcagttgtctttcaagatctgaaattttagattggagtctgctaatctctgtaagatttcctcctccgctctcgatgcagtcggtcaacttattctctagttctctaatacgcgaacgcagtgcatcaacttcttgcgtgtcttcctggttgcgtgtacattcatcgagtctagattcgagatctctaacgcgtcgtcgttcttcctcaagttctctgcgtactacagaaagcgtgtccctatcttgttgatatttagcaatttctgattctagagtactgattttgcttacgtagttactaatatttgtcttggccttatcaagatcctccttgtatttgtcgcattccttgatatccctacgaagtctggacagttcccattcgacattacgacgtttatcgatttcagctcggagatcgtcatcgcgttgttttagccacatacgactgagttcaagttctcgttgacaagatccatctacttttccattcctaatagtatccagttccttttctagttctgaacgcatttctcgttccctatcaagcgattctctcaattctcggatagtcttcttatcaatttctaataaatctgaaccatcatctgtcccattttgaatatccctgtgttctttgatctcttttgtaagtcggtcgattctttcggttttataaacagaatccctttccaaagtcctaatcttactgagtttatcactaagttctgcattcaattcggtgagttttctcttggcttcttccaactctgttttaaactctccactatttccgcattcttcctcgcatttatctaaccattcaattagtttattaataactagttggtaatcagcgattcctatagccgttcttgtaattgtgggaacataattaggatcttctaatggattgtatggcttgatagcatcatctttatcattattagggggatggacaaccttaattggttggtcctcatctcctccagtagcgtgtggttcttcaatagccgtgttagtaataggcttaggcaaatgcttgtcgtacgcgggcacttcctcatccatcaagtatttataatcgggttctacgtctgaatattcttttctaagagacgcaacttctggagttagtagaagaactctgtttctatatctatcaacgctggaatcaatactcaagttaaggatagcgaatacctcatcgtcatcatccgtatcctctgaaacgccatcatatgacatttcatgaagtctaacgtattgataaacagaatcagatttagtattaaacagatccttaacctttttagtaaatgcatatgtatattttagatctccagatttcataatatggtcgcatgccttaaatgtcagtgcttccataatatagtctggaacactaattggtgatgaaaaagataccggaccatatgctacgttgataaataactctgagccactaactagataatgattaatgttaaggaagaggaaatattcagtgtataggtatgtcttggcgtcatatcttgtactaaacacgctaaacagtttgttaatgtgatcaatttccaatagattaattagagcagcaggaataccaacaaacatattaccacatccgtattttctatgaatatcacatatcatgttaaaaaatcttgatagaagagcgaatatctcgtctgacttaatgagtcgtagttcagcagcaacataagtcataactgtaaatagaacatactttcctgtagtgttgattctagactccacatcaacaccattattaaaaatagttttatatacatctttaatctgctctccgttaatcgtcgaacgttctagtatacggaaacactttgatttcttatctgtagttaatgacttagtgatatcacgaagaatattacgaattacatttcttgtttttcttgagagacctgattcagaactcaactcatcgttccatagtttttttacctcagtggcgaaatctttggagtgcttggtacatttttcaataaggttcgtgacctccatttattataaaaaaattttattcaaaacttaactacaatcgggtaattataaaatcgtagatctcccatgtggtggaatactaccatctatcgcatgtggatggacagtaggtaatggccatgggaacagtaatgtttgcatatttatctttcttgccagtattactgcatattgtcccaatgtttcgatgtgatgttctaacctatcaactgccgctgtatcacaacaatagtgtccgatgaaattaagattatgatccaatgtgtttaatatatgattatcaagtcttatacgatccgcgtcttttttgacaggatcaggttcttctacaggaagaagtttcggcctcttatgatattcatgtctgggaaacggtggtctagggtgaggctccggtatcggagtgggttttggattataatcatcatcgtctatgacatcatcttcgacttcgatatttattttgctatcttgatgatgtcctgtatcagttgcattttcagcactcgactgaatattagcgcattcattgtttattattaccatatttctaaacccaaaatgtatatgttgaacatcagtactatcgttgatgagtcttatagcatgaattcgcttatcgttatcgggtttagcttctgtcaccttagcaattccttttttattaaactctacataatcatatccatttctattgtttgttctaatataaacgagtatagcatcattgctaaatttttcaatagtatcgaaaacagaatatcctaaaccatataatatatattcaggaacactcaaactaaatgtccaggattctcctaaatacgtaaactttaatagtgcgaaatcattcaaaaatctaccacttatagatagatagtacataaatgcgtatagtagtctacctatctctttattatgaaaaccggcattacgatcatatatgtcgtgatatacctgtgatccgtttacgttaaaccataaatacatgggtgatcctataaacatgaatttatttctaattctcagagctatagttaattgaccgtgtaatatttgcttacatgcatacttgatacgctcattaataagatttttatcattgctcgttatctcagaatcgtatatataaggagtaccatcgtgattcttaccagatattatacaaaatactatatataaaatatattgaccaacgttagtaatcatataaatgtttaacgttttaaattttgtattcaatgatccattatcatacgctagcatggtcttatgatattcattctttaaaatataatattgtgttagccattgcattggggctcctaatggagattttttattctcatccattttaggataggctttcataaagtccctaataacttcgtgaataatgtttctatgttttctactgatgcatgtatttgcttcgatttttttatcccatgtttcatctatcatagatttaaacgcagtaatgctcgcaacattaacatcttgaaccgttggtacaattccgttccataaatttataatgttcgccatttatataactcattttttgaatatacttttaattaacaaaagagttaagttactcatatggacgccgtccagtctgaacatcaatctttttagccagagatatcatagccgctcttagagtttcagcgtgattttccaacctaaatagaacttcatcgttgcgtttacaacacttttctatttgttcaaactttgttgttacattagtaatctttttttccaaattagttagccgttgtttgagagtttcctcattgtcgtcttcatcggctttaacaattgcttcgcgtttagcctctggctttttagcagcctttgtagaaaaaaattcagttgctggaattgcaagatcgtcatctccggggaaaagagttccgtccatttaaagtacagattttagaaactgacactctgcgttatttatatttggtacaacacatggattataaatattgatgttaataacatcagaaaatgtaaagtctatacattgttgcatcgtgttaaattttctaatggatctagtattattgggtccaacttctgcctgaaatccaaatatggaagcggatacaaaaccgtttcctggataaaccacacatctccacttttgctttacatcagaaattgtgtcattgacatcttgaactctcctatctaatgccggtgttccacctatagattttgaatattcgaatgctgcatgagtagcattaaattccttaatattgccataattttcatatattgagtaaccctggataaaaagtaaacacaccgcagccgtcgctaccacaataaaaaaaattgatagagagttcatttataatctattagaagctgacaaaatttttttacacgcatcagacaatgctttaataaatagttcaacatctacttttgtcatatcgaaccgatggtatgattctaacctagaattacatccgaaaaagttgactatgttcatagtcattaagtcattaacaaacaacattccagactctggattataagacgatactgtttcgtcacaattacctaccttaatcatgtgattatgaatattggctattagagcaccttctaagaaatctataatatctttgaaacacgatttaaaatcaaaccacgaatatacttctacgaagaaagttagtttacccataggagaaataactataaatggagatctaaatacaaaatccggatctatgatagttttaacattattatattctctattaaatacctccacatctaaaaatgttaattttgaaactatgtcttcgtttattaccgtacctgaactaaacgctataagctctattgtttgagaactctttaaacgatattcttgaaatacatgtaacaaagtttcctttaactcggtcggtttatctaccatagttacagaatttgtatccttatctataatataataatcaaaatcgtataaagttatataattatcgcgttcagattgtgatcttttcaaatagactaaaaaccccatttctctagtaagtatcttatgtatatgtttgtaaaatatcttcatggtgggaatatgctctaccgcagttagccattcctcattgacagcggtagatgtattagacaaaactattccaatgtttaacaagggccattttacgagattattaaatccttgtttgataaatgtagccaatgagggttcgagttcaacgacgattgaattctcttcccgcggatgctgcatgatgaacgacgggatgttgttcgattgatttggaattctttttcgactttttgtttatattaaatattttaaaatttatagctgatagcaattcatgtactacggataatgtagacgcgtattgcgcatcgatatctttattattagataaatttatcaataaatgtgagaagtttgcctcgttaaggtcttccatttaaatattatataaacatttgtgtttgtatcttattcgtcttttatggaatagttttttactagtaaagctgcaattacacactttgtccgtaaaacataaatataaacaccagcttttatcaatcgttccaaaaagtcgacggcggacatttttaacatggcatctattttaaatacacttaggtttttggaaaaaacatcattttataattgtaacgattcaataactaaagaaaagattaagattaaacataagggaatgtcatttgtattttataagccaaagcattctaccgttgttaaatacttgtctggaggaggtatatatcatgatgatttggttgtattggggaaggtaacaattaatgatctaaagatgatgctattttacatggatttatcatatcatggagtgacaagtagtggagcaatttacaaattgggatcgtctatcgatagactttctctaaataggactattgttacaaaagttaataattatgatgatacattttttgacgacgatgattgatcgctattgcacaattttgtttttttactttctaatatagcgtttagattctttttcatgtgcgaatattgatttactaaaatatcgatgtttaacttttgttctatgacgtccttatcagcggtatcggtacatatacgtaattcaccttcacaaaatacggagtcttcgataataatagccaatcgattattggatctagcggtctgtatcatattcaacatgtttaatatatcctttcgtttcccctttacaggcatcgatcgtagcatattttccgcgtctgagatggaaatgttaaaactacaaaaatgcgtaatgttagcccgtcctaatattggtacgtgtctataagtttggcatagtagaataatagacgtgtttaaatgccttccaaagtttaagaattctattagagtattgcattttgatagtttatcgcctacatcatcaaaaataagtaaaaagtgtgctgattttttatgattttgtgcgacagcaatacatttttctatgttacttttagttcgtatcagattatattctagagattcctgactactaacgaaattaatatgatttggccaaatgtatccatcataatctggattataaacgggtgtaaacaagaatatatgtttatattttttaactagtgtagaaaacagagatagtaaatagatagtttttccagatccagatcctcccgttaaaaccattctaaacggcatttttaataaattttctcttgaaaattgtttttcttggaaacaattcataattatatttacagttactaaattaatttgataataaatcaaaatatggaaaactaaggtcgttagtagggaggagaacaaagaaggcatatcgtgatataaataacatttattatcatgatgacaccagaaaacgacgaagagcagacatctgtgttctccgctactgtttacggagacaaaattcagggaaagaataaacgcaaacgcgtgattggtctatgtattagaatatctatggttatttcactactatctatgattaccatgtccgcgtttctcatagtgcgcctaaatcaatgcatgtctgctaacgaggctgctattactgacgccgctgttgccgttgctgctgcatcatctactcatagaaaggttgcgtctagcactacgcaatatgatcacaaagaaagctgtaatggtttatattaccagggttcttgttatatattacattcagactaccagttattctcggatgctaaagcaaattgcactgcggaatcatcaacactacccaataaatccgatgtcttgattacctggctcattgattatgttgaggatacatggggatctgatggtaatccaattacaaaaactacatccgattatcaagattctgatatatcacaagaagttagaaagtatttttgtgttaaaacaatgaactaatatttatttttgtacattaataaatgaaatcgcttaatagacaaactgtaagtaggtttaagaagttgtcggtgccggccgctataatgatgatactctcaaccattattagtggcataggaacatttctgcattacaaagaagaactgatgcctagtgcttgcgccaatggatggatacaatacgataaacattgttatctagataccaacattaaaatgtctacagataatgcggtttatcagtgtcgtaaattacgagctagattgcctagacctgatactagacatctgagagtattgtttagtattttttataaagattattgggtaagtttaaaaaagaccaataataaatggttagatattaataatgataaagatatagatattagtaaattaacaaattttaaacaactaaacagtacgacggatgctgaagcgtgttatatatacaagtctggaaaactggttgaaacagtatgtaaaagtactcaatctgtactatgtgttaaaaaattctacaagtgacaacaaaaaatgaattaataataagtcgttaacgtacgccgccatggacgccgcgtttgttattactccaatgggtgttgactataacagatacattgtatgatgatctcgatatctcaatcatggactttataggaccatacattataggtaacataaaaactgtccaaatagatgtacgggatataaaatattccgacatgcaaaaatgctactttagctataagggtaaaatagttcctcaggattctaatgatttggctagattcaacatttatagcatttgtgccgcatacagatcaaaaaataccatcatcatagcatgcgactatgatatcatgttagatatagaagataaacatcagccattttatctattcccatctattgatgtttttaacgctacaatcatagaagcgtataacctgtatacagctggagattatcatctaatcatcaatccttcagataatctgaaaatgaaattgtcgtttaattcttcattctgcatatcagacggcaatggatggatcataattgatgggaaatgcaatagtaattttttatcataaaagttgtaaagtaaataataaaacaataaatattgaactagtagtacgtatattgagcaatcagaaatgatgctggtacctcttatcacggtgaccgtagttgcgggaacaatattagtatgttatatattatatatttgtaggaaaaagatacgtactgtctataatgacaataaaattatcatgacaaaattaaaaaagataaagagttctaattccagcaaatctagtaaatcaactgatagcgaatcagactgggaggatcactgtagtgctatggaacaaaacaatgacgtagataatatttctaggaatgagatattggacgatgatagcttcgctggtagtttaatatgggataacgaatccaatgttatggcgcctagcacagaacacatttacgatagtgttgctggaagcacgctgctaataaataatgatcgtaatgaacagactatttatcagaacactacagtagtaattaatgaaacggagactgttaaagtacttaatgaagataccaaacagaatcctaactattcatccaatcctttcgtaaattataataaaaccagtatttgtagcaagtcaaatccgtttattacagaacttaacaataaatttagtgagaataatccgtttagacgagcacatagcgatgattatcttaataagcaagaacaagatcatgaacacgatgatatagaatcatcggtcgtatcattggtgtgattagtttcctttttataaaattgaagtaatatttagtattattgctgccgtcacgttgtacaaatggagatattccctgtattcggcatttctaaaattagcaattttattgctaataatgactgtagatattatatagatacagaacatcaaaaaattatatctgatgagatcaatagacagatggatgaaacggtacttcttaccaacatcttaagcgtagaagttgtaaatgacaatgagatgtaccatcttattcctcatagattatcgacgattatactctgtattagttctgtcggaggatgtgttatctctatagataatgacgtcaatggcaaaaatattctaacctttcccattgatcatgctgtaatcatatccccactgagtaaatgtgtcgtagttagcaagggccctacaaccatactggttgctaaagcggatatacccagcaaacgattggtaacatcgtttacaaacgacatactgtatgtaaacaatctatcactgattaattatttgccgttgtctgtattcattattagacgagtcaccgactatttggatagacacatatgcgatcagatatttgctaataataagtggtattcccttataaccatcgacgataagcaatatcctattccatcaaattgtataggtatgtcttctgccaagtacataaattctagcatcgagcaagatactttaatacatgtttgtaacctcgagcatccattcgacttagtatacaaaaaaatgcagtcgtacaattctgtacctatcaaggaacaaatattgtacggtagaattgataatataaatatgagcattagtatttctgtggattaatagatttctagtatggggatcattaatcatctctaatctctaaatacctcataaaacgaaaaaaaagctattatcaaatactgtacggaatagattcattctcttctctttttatgaaactctgttgtatatctactgataaaactggaagcaaaaaatctgataaaaagaataagatcaagatcaaggattatatggaacacgattattataaaataacaatagttcctggttcctcttccacgtctactagctcgtggtattatacacatgcctagtaatagtctctttgcgttgatggaaagcagactagaaataacaggctaaaatgttcagacaccataatagttcccaacccagataataacagagtaccatcaacacattcctttaaactcaatcccaaacccaaaaccgttaaaatgtatccggccaattgatagtagataatgaggtgtacagcgcatgataatttacacagtaaccaaaatgaaaatactttagtaattataagaaatatagatggtaacgtcatcatcaacaatccaataatatgccggagagtaaacattgacggataaaacaaaaatgctccgcataactctatcatggcaataacacaaccaaatacttgtaagattcctaaattagtagaaaatacaacggatatcgatgtataagtgatctcgagaaataataagaataaagtaatgcccgtaaagataaacatcaacattgtttggtaatcattaaaccaattagtatgacgttgaactaatttcacagtaaattttattccagtattatccccgcatgtataagtacctggtaagatatctttatattccataatcaatgagacatcactatctgataacgaatgaagtctagcactagtatgccatttacttaatattgtcgtcttggaagttttattataagttaaaatatcatggttatccaatttccatctaatatactttgtcggattatctatagtacacggaataatgatggtatcattacatgctgtatactctatggtctttgtagttgttataacaaccaacgtatagaggtatatcaacgatattctaactcttgacattttttatttatttaaaatgatacctttgttatttattttattctattttgctaacggtattgaatggcataagtttgaaacgagtgaagaaataatttctacttacttattagacgacgtattatacacgggtgttaatggggcggtatacacattttcaaataataaactaaacaaaactggtttaactaataataattatataacaacatctataaaagtagaggatgcggataaggatacattagtatgcggaaccaataacggaaatcccaaatgttggaaaatagacggttcagacgacccaaaacatagaggtagaggatacgctccttatcaaaatagcaaagtaacgataatcagtcacaacggatgtgtactatctgacataaacatatcaaaagaaggaattaaacgatggagaagatttgacggaccatgtggttatgatttattcacggcggataacgtaattccaaaagatggtttacgaggagcattcgtcgataaagacggtacttatgacaaagtttacattcttttcactgatactatcggctcaaagagaattgttaaaattccgtatatagcacaaatgtgcctaaacgacgaaggtggtccatcatcgttgtctagtcatagatggtcgacgtttctcaaagtcgaattagaatgtgatatcgacggaagaagttatagataaattattcattctaaaactataaaaacagataatgatacgatactatatgtattcttcgatagtccgcattatgtacctattctatgaataccattaaacaatctttttctacgtcaaaattggaaggatatacaaagcaattgccgtctccagctcctggtatatgtctaccagctggaaaagttgttccacataccacgtttgaagtcatagaaaaatataatgtactagatgatattataaagcctttatctaaccaacctatcttcgaaggaccgtctggtgttaaatggttcgatataaaggagaaggaaaatgaacatcgggaatatagaatatacttcataaaagaaaattctatatattcgttcgatacaaaatctaaacaaactcgtagctcgcaagtcgatgcgcgactattttcagtaatggtaacttcgaaaccgttatttatagcagatatagggataggagtaggaatgccacaaatgaaaaaaatacttaaaatgtaatcttaatcgagtacaccacacgacaatgaacaaacataagacagattatgctggttatgcttgctgcgtaatatgcggtctaattgttggaattatttttacagcgacactattaaaagttgtagaacgtaaattagttcatacaccatcaatagataaaacgataaaagatgcatatattagagaagattgtcctactgactggataagctataataataaatgtatccatttatctactgatcgaaaaaacctgggaggaaggacgtaatgcatgcaaagctctaaatccaaattcggatctaattaagatagagactccaaacgagttaagttttttaagaagccttagacgaggctattgggtaggagaatccgaaatattaaaccagacaaccccatataattttatagctaaaaatgccacgaagaatggaactaaaaaacggaaatatatttgtagtacaacgaatactcccaaactgcattcgtgttacactatataacaattacactacatttttatcataacactacttcggttagatgttttagaaaaaaataaatatcgccgtaccgttcttgtttttataaaaataacaattaacaattatcaaattttttctttaatattttacgtggttgaccattcttggtggtaaaataatctcttagtgttggaatggaatgctgtttaatgtttccgcactcatcgtatattttgacgtatgcagtcacatcgtttacgcaatagtcagactgtagttctatcatgcttcctacatcagaaggaggaacagttttaaagtctcttggttttaatctattgccattagttttcatgaaatcctttgttttatccacttcacattttaaataaatgtccactatacattcttctgttaattttactagatcgtcatgggtcatagaatttataggttccgtagtccatggatccaaactagcaaacttcgcgtatacggtatcgcgattagtgtatacaccaactgtatgaaaattaagaaaacagtttaataaatcaacagaaatatttaatcctccgtttgatacagatgcgccatatttatggatttcggattcacacgttgtttgtctgaggtgttcgtctagtgttgcttctacgtaaacttcgattcccatatattctttattgtcagaatcgcataccgatttatcatcatacactgtttgaaaactaaatggtatacacatcaaaataataaataataacgagtacattctgcaatattgttatcgtaattggaaaattagtgttcgagtgagtcggattatgtgagtactggattgtatattttattttatattttgtaataagaataaaatgctaatgtcaagtttattccaatagatgtcttattaaaaaacatatataataaataacaatggctgaatggcataaaattatcgaggatatctcaaaaaataataagttcgaggatgccgccatcgttgattacaagactacaaagaatgttctagctgctattcctaacagaacatttgccaagattaatccgggtgaaattattcctctcatcactaatcgtaatattctaaaacctcttattggtcagaaatattgtattgtatatactaactctctaatggatgagaacacgtatgctatggagttgcttactgggtacgcccctgtatctccgatcgttatagcgagaactcataccgcacttatatttttgatgggtaagccaacaacatccagacgtgatgtgtatagaacgtgtagagatcacgctacccgtgtacgcgcaactggtaattaaaataaaaagtaatattcatatgtagtgtcaattttaaatgatgatgatgaaatggataatatccatattgacgatgtcaataatgccggtattggcatacagctcatcgatttttagatttcattcagaggatgtggaattatgttatgggcatttgtattttgataggatctataatgtagtaaatataaaatataatccgcatattccatatagatataattttattaatcgcacgttaaccgtagatgaactagacgataatgtcttttttacacatggttattttttaaaacacaaatatggttcacttaatcctagtttgattgtctcattatcaggaaacttaaaatataatgatatacaatgctcagtaaatgtatcgtgtctcattaaaaatttggcaacgagtacatctactatattaacatctaaacataagacttattctctacatcggtccacgtgtattactataataggatacgattctattatatggtataaagatataaatgacaagtataatgacatctatgattttactgcaatatgtatgctaatagcgtctacattgatagtgaccatatacgtgtttaaaaaaataaaaatgaactcttaattatgctatgctattagaaatggataaaatcaaaattacggttgattcaaaaattggtaatgttgttaccatatcgtataacttggaaaagataactattgatgttacacctaaaaagaaaaaagaaaaggatgtattattagcgcaatcagttgctgtcgaagaggcaaaagatgtcaaggtagaagaaaaaaatattatcgatattgaagatgacgatgatatggatgtagaaagcgcataatacgatctataaaaataagtatataataaatactttttatttacggtactcttgtagtggtgataccctactcaattatttttttaaaaaaatacttattctgattcttctagccatttccgtgttcgttcgaatgccacatcgacgttaaagataggggagtagttgaaatctagttctgcattgttggtacgcacctcaaatgtagtgttggatatcttcaacgtatagttgttgagtagtgatggttttctaaatagaattctcttcatatcattcttgcacgcgtacatttttagcatccatcttggaattctagatccttgttctattcccaatggtttcatcaatagaagattaaacatatcgtacgaacacgatggagagtaatcgtagcaaaagtaagcatttcctttaatcttagatcccggatactggatatattttgcagccaacacgtgcatccatgcagcatttcctacatatacccggctatgcaccgcgtcatcatcgactgtacgatacataatgttaccgtgttgcttacattgctcgtaaaagactttcgtcaatttgtctccttctccgtaaattccagtgggtcttaggcaacaagtatacaattttgctccattcatgattacggaattattggctttcataaccagttgctcggccatacgtttactttttgcgtatacatgtcctggtgatatatcataaagggtatgctcatggccgatgaatggatcaccgtgtttattgggtcctattgcttccatgctactagtatagatcaaatacttgattcctaggtccacacaagctgccaatatagtctgtgttccataatagtttactttcatgatttcattatcggtgtattttccaaatacatccactagagcagccgtatgaataatcagatttaccccatctagcgcttctctcaccttatcaaagtcgtttatatcacattgtatatagtttataaccttaactttcgaggttattggttgtggatcttctacaatatctatgactctgatttcttgaacatcatctgcactaattaacagttttactatatacctgcctagaaatccggcaccaccagtaaccgcgtacacggccattgctgccactcataatatcagactacttattctattttactaaataatggctgtttgtataatagaccacgataatatcagaggagttatttactttgaaccagtccatggaaaagataaagttttaggatcagttattggattaaaatccggaacgtatagtttgataattcatcgttacggagatattagtcaaggatgtgattccataggcagtccagaaatatttatcggtaacatctttgtaaacagatatggtgtagcatatgtttatttagatacagatgtaaatatatttacaattattggaaaggcgttatctatttcaaaaaatgatcagagattagcgtgtggagttattggtatttcttacataaatgaaaagataatacattttcttacaattaacgagaatggcgtttgatatatcagttaatgcgtctaaaacaataaatgcattagtttacttttctactcagcaaaataaattagtcatacgtaatgaagttaatgatacacactacactgtcgaatttgatagggacaaagtagttgacacgtttatttcatataatagacataatgacaccatagagataagaggggtgcttccagaggaaactaatattggttgcgcggttaatacgccggttagtatgacttacttgtataataagtatagttttaaactgattttagcagaatatataagacacagaaatactatatccggcaatatttattcggcattgatgacactagatgatttggctattaaacagtatggagacattgatctattatttaatgagaaacttaaagtagactccgattcgggactatttgactttgtcaactttgtaaaggatatgatatgttgtgattctagaatagtagtagctctatctagtctagtatctaaacattgggaattgacaaataaaaagtataggtgtatggcattagccgaacatatatctgatagtattccaatatctgagctatctagactacgatacaatctatgtaagtatctacgcggacacactgagagcatagaggatgaatttgattattttgaagacgatgattcgtctacatgttctgccgtaaccgacagggaaacggatgtataattttttttatagcgtgaaggatatgataaaaaatataattgttgtatttatcccattccaatcaccttatatgattctgtaaaaaaattatactgtaacacaataaaggagtcttatagatgtatagaggtcagatactggtttgataaactgtttattccacataagtatgtttgactttatggttagacccgcatactttaacaaatcactgaaaattggagttaggtattgacctctcagaatcagttgccgttctggaacattaaatgtattttttatgatatactccaacgcatttatgtgggcatacaacaagtcattactaatggagtattccaagagttttagttgtctagtatttaacaagagaagagatttcaacagactgtttatgaactcgaacgccgcctcattgtcgcttatattgatgatgtcgaattctcccaatatcatcactgatgagtagctcatcttgttatcgggatccaagttttctaaagatgtcattaaaccctcgatcatgaatggatttatcatcatcgtttttatgttggacatgagcttagtccgtttgtccacatctatagacgacgatttctgaattatttcatatatccctctctttaactccaggaacttgtcaggatggtctactttaatatgttctcgtctaagagatgaaaatctttggatggttgcacgcgacttttctttaaaggatgacgttgcccaagatcctctcttaaatgaatccatcttatccttggacaagatggacagtctattttccttagatggtttaatatttttgttacccatgatctataaaggtagacctaatcgtctcggatgaccatatatttattttcagttttattatacgcataaattgtaaaaaatatgttaggtttacaaaaatgtctcgtggggcattaatcgtttttgaaggattggacaaatctggaaaaacaacacaatgtatgaacatcatggaatctataccggcaaacacgataaaatatcttaactttcctcagagatccactgtcactggaaagatgatagatgactatctaactcgtaaaaaaacctataatgatcatatagttaatctattattttgtgcaaatagatgggagtttgcatcttttatacaagaacaactagaacagggaattactttaatagttgatagatacgcattttctggagtagcgtatgccgccgctaaaggcgcgtcaatgactctcagtaagagttatgaatctggattgcctaaacccgacttagttatattcttggaatctggtagcaaagaaattaatagaaacgtcggcgaggaaatttatgaagatgttacattccaacaaaaggtattacaagaatataaaaaaatgattgaagaaggagatattcattggcaaattatttcttctgaattcgaggaagatgtaaagaaggagttgattaagaatatagttatagaggctatacacacggttactggaccagtggggcaactgtggatgtaatagtgaaattacattttttataaatagatgttagtacagtgttataaatggatgaagcatattactctggcaacttggaatcagtactcggatacgtgtccgatatgcataccgaactcgcatcaatatctcaattagttattgccaagatagaaactatagataatgatatattaaacaaggacattgtaaattttatcatgtgtagatcaaacttggataatccatttatctctttcctagatactgtatatactattatagatcaagagatctatcagaccgaattgattaattcattagacgacaatgaaattatcgattgtatagttaacaagtttatgagcttttataaggataacctagaaaatatagtagatgctatcattactctaaaatatataatgaataatccagattttaaaactacgtatgccgaagtactcggttccagaatagccgatatagatattaaacaagtgatacgtaagaatatactacaattgtctaatgatatccgcgaacgatatttgtgaaaaatattaaaaaaaaatactttttttattaaatgacgtcgcttcgcgaatttagaaaattatgctgtgatatatatcacgcatcaggatataaagaaaaatctaaattaattagagactttataacagatagggatgataaatatttgatcattaagctattgcttcccggattagacgatagaatttataacatgaacgataaacaaattataaaattatatagtataatatttaaacaatctcaggaagatatgctacaagatttaggatacggatatataggagacactattaggactttcttcaaagagaacacagaaatccgtccacgagataaaagcattttaactttagaagaagtggatagttttttaactacgttatcatccgtaactaaagaatcgcatcaaataaaattattgactgatgtagcatctgtttgtacatgtaatgatttaaaatgtgtagtcatgcttattgataaagatctaaaaattaaagcgggccctcggtacgtacttaacgctattagtcctcatgcctatgatgtgtttagaaaatctaataacttgaaagagataatagaaaatgcatctaaacaaaatctagactctatatctatttctgttatgactccaattaatcccatgttagcggaatcgtgtgattctgtcaataaggcgtttaaaaaatttccatcaggaatgtttgcggaagtcaaatacgatggtgaaagagtacaagttcataaaaataataacgagtttgccttctttagtagaaacatgaaaccagtactctctcataaagtggattatctcaaagaatacataccgaaagcatttaaaaaagctacgtctatcgtattggattctgaaattgttcttgtagacgaacataatgtaccgctaccgtttggaagtttaggaatacacaaaaagaaagaatataaaaactctaacatgtgtttgttcgtgtttgactgtttgtactttgatggattcgatatgacggacattccattgtacgaacgaagatcttttctcaaagatgttatggttgaaatacccaatagaatagtattctcagagttgacgaatattagtaacgagtctcagttaactgacgtattggatgatgcactaacgagaaaattagaaggattggtcttaaaagatattaatggagtatacgaaccgggaaagagaagatggttaaaaataaagcgagactatttgaacgagggttccatggcagattctgccgatttagtagtactaggtgcctactatggtaaaggagcaaagggtggtatcatggcagtctttctaatgggttgttacgacgatgaatccggtaaatggaagacggttaccaagtgttcaggacacgatgataatacgttaagggagttgcaagaccaattaaagatgattaaaattaacaaggatcccaaaaaaattccagagtggttagtagttaataaaatctatattcccgattttgtagtagaggatccgaaacaatctcagatatgggaaatttcaggagcagagtttacatcttccaagtcccataccgcaaatggaatatccattagatttcctagatttactaggataagagaggataaaacgtggaaagaatctactcatctaaacgatttagtaaacttgactaaatcttaatagttacatacaaactgaaaattaaaataacaccatttagttggtggtcgccatggatggtgttattgtatactgtctaaacgcgttagtaaaacatggcgaggaaataaatcatataaaaaatgatttcatgattaaaccatgttgtgaaagagtttgtgaaaaagtcaagaacgttcacattggcggacaatctaaaaacaatacagtgattgcagatttgccatatatggataatgcggtatccgatgtatgcaattcactgtataaaaagaatgtatcaagaatatccagatttgctaatttgataaagatagatgacgatgacaagactcctactggtgtatataattattttaaacctaaagatgttattcctgttatcatatctataggaaaggataaagatgtctgtgaactattaatctcatcagacatatcgtgtgcatgcgtggagttaaattcatatcacgtagccattcttcccatgaatgtttccttttttaccaaaggaaatgcctcgttgattattctcctgtttgatttctctatcgatgcagcacctctcttaagaagtgtaaccgataataatgttattatatctagacaccagcgtctacatgacgagcttccgagttccaattggttcaagttttacataagtataaagtccgactattgttctatattatatatggttgttgatggatctgtgatgcatgcgatagctgataatagaactcacgcaattattagcaaaaatatattagacaatactacaattaacgatgagtgtagatgctgttattttgaaccacagattaggattcttgatagagatgagatgctcaatggatcatcgtgtgatatgaacagacattgtattatgatgaatttacctgatgtaggcgaatttggatctagtatgttggggaaatatgaacctgacatgattaagattgctctttcggtggctggtaatttaataagaaatcgagactacattcccgggagacgaggctatagctactacgtttacggtatagcctctagataatttttttaagcacgaaataaaaaacataattttaaaccaatctatttcatactattttgtgtgatcaccatggacataaagatagatattagtatttctggtgataaatttacggtgactactaggagggaaaatgaagaaagaaaaaaatatctacctctccaaaaagaaaaaactactgatgttatcaaacctgattatcttgagtacgatgacttgttagatagagatgagatgtttactattctagaggaatattttatgtacagaggtctattaggcctcagaataaaatatggacgactctttaacgaaattaaaaaattcgacaatgatgcggaagaacaattcggtactatagaagaactcaagcagaaacttagattaaattctgaagagggagcagataactttatagattatataaaggtacaaaaacaggatatcgtcaaacttactgtatacgattgcatatctatgataggattgtgtgcatgcgtggtagatgtttggagaaatgagaaactgttttctagatggaaatattgtttacgagcgattaaactgtttattaatgatcacatgcttgataagataaaatctatactgcagaatagactagtatatgtggaaatgtcatagaaagttaatgagagcaaaaatatataaggttgtattccatatttgttattttttctgtaatagttaaaaaaatacattcgatggtctatctatcagattattatgtgttataaggtactttttctcataataaactagagtatgagtaagatagtgtttttcaaaacatataaatctaaaattgatggatgagatatacagctattaatttcgaaaatatataaatctaaaattgatggataagatatacagctattaatttcgaaaatatattttaatctgataactttaaacatggatttttgatggtggtttaacgttttaaaaaaagattttgttattgtagtatatgataatattaaaagatggatataaagaatttgctgactgcatgtactattttttacattactacattggctacggcagatatacctactccgccaccaacgggtcatgtgacaagggagaatatcttgataagaggcataatcaatgttgtaatcggtgtccacctggagaatttgccaaggttagatgtaatggtaacgataacacaaaatgtgaacgctgcccacctcatacatataccacaatccccaattattctaatggatgtcatcaatgtagaaaatgcccaaccggatcatttgataaggtaaagtgtaccggaacacagaacagtaaatgttcgtgtcttcctggttggtattgcgctactgattcttcacagactgaagattgttgaaattgtgtaccaaaaaggagatgtccatgcggatactttggtggaatagatgaacaaggaaatcctatttgtaaatcgtgctgtattggtgaatattgcaactacctacgtaattatagacttgatccattttctccatgcaaactatctaaatgtaattaattatgattttgatgataatgttaccatacattatatcgctacttggttagtgtattattcagtatgaagacctattaataattacttatcttttgacgatcttgttataattataatataaaaacttatggcatagtaactcataattgctgacgcgataaattcgtaataatctgttttgttcaaatttttataaggaatctacaggcataaaaataaaaatataatttataatatactcttacagcgcgccatcatgaatagcagcagtaaattaattgctgttattaatggatttagaaatagtggacgattttgtgatattaatatagttattaatgatgaaaggataaacgctcacagactcatcctatctggagcctccgaatatttttccattctgttttccaataattttatcgattctaatgaatacgaagttaatctaagtcatttagattatcaaagtgttaacgatttgatcgattacatttatgggatacctttgagcctaactaacgataacgtgaaatatattctttcaaccgctgattttttacaaattggatctgccattactgagtgcgaaaaatacatacttaaaaatctttgttctagaaactgtatcgatttctacatatacgctgataaatataataacaagaaaatagaatcagcgtcgtttaacacaatattacgaaatattttgagactcatcaacgatgaaaactttaaatacttaacagaggaatcaatgataaaaattttaagcgatgatatgttaaatataaaaaatgaggattttgcaccactaattctcattaaatggttagagagtactcaacaatcatgcaccgtcgagttacttagatgcctcagaatatcattgctttccccacaagttataaaatcactttatagtcatcaactggttagttcaatctacgaatgtataacattcttaaacaatatagcattcttggatgaatcatttcctagataccatagcatcgagttgatatctatcggtataagtaattcgcatgataagatttccataaactgctacaatcataaaaaaaatacatgggaaatgatatcttcacgtagatataggtgtagtttcgcagtggccgtcctggataatattatctatatgatgggtggatatgatcagtccccgtatagaagttcaaaggttatagcgtacaatacatgtacaaattcttggatatatgatataccagagctaaaatatcctcgttctaattgtgggggactggctgatgacgaatacatttattgtataggcggcatacgcgatcaggattcatcgttgacatctagtattgatagatggaagccatcaaaaccatattggcagaagtatgctaaaatgcgcgaaccaaaatgtgatatgggggttgcgatgttaaacggattaatatatgtcatgggtggaatcgttaaaggtgacacgtgtaccgacgcactagagagtttatcagaagatggatggatgaagcatcaacgtcttccaataaaaatgtccaatatgtcgacgattgttcatgatggcaagatttatatatctggaggttacaacaatagtagtgtagttaatgtaatatcgaatctagtccttagctataatccgatatatgatgaatggaccaaattatcatcattaaacattcctagaattaatcccgctctatggtcagcgcataataaattatatgtaggaggaggaatatctgatgatgttcgaactaatacatctgaaacatacgataaagaaaaagattgttggacattggataatggtcacgtgttaccacgcaattatataatgtataaatgcgaaccgattaaacataaatatccattggaaaaaacacagtacacgaatgattttctaaagtatttggaaagttttataggtagttgatagaacaaaatacataattttgtaaaaataaatcactttttatactaatatgacacgattaccaatacttttgttactaatatcattagtatacgctacaccttttcctcagacatctaaaaaaataggtgatgatgcaactctatcatgtaatcgaaataatacaaatgactacgttgttatgagtgcttggtataaggagcccaattccattattcttttagctgctaaaagcgacgtcttgtattttgataattataccaaggataaaatatcttacgactctccatacgatgatctagttacaactatcacaattaaatcattgactgctagagatgccggtacttatgtatgtgcattctttatgacatcaactacaaatgacactgataaagtagattatgaagaatactccacagagttgattgtaaatacagatagtgaatcgactatagacataatactatctggatctacacattcaccagaaactagttctgagaaaccagaggatatagataattttaattgctcgtcggtattcgaaatcgcgactccggaaccaattactgataatgtagaagatcatacagacaccgtcacatacactagtgatagcattaatacagtaagtgcatcatctggagaatccacaacagacgagactccggaaccaattactgataaagaagaagatcatacagtcacagacactgtctcatacactacagtaagtacatcatctggaattgtcactactaaatcaaccaccgatgatgcggatctttatgatacgtacaatgataatgatacagtaccaccaactactgtaggcggtagtacaacctctattagcaattataaaaccaaggactttgtagaaatatttggtattaccgcattaattatattgtcggccgtggcaatattctgtattacatattatatatataataaacgttcacgtaaatacaaaacagagaacaaagtctagatttttgacttacataaatgtctgggatagtaaaatctatcatattgagcggaccatctggttcaggaaagacagccatagccaaaagactatgggaatatatttggatttgtggtgtcccataccactagatttcctcgtcctatggaacgagaaggtgtcgattaccattacgttaacagagaggccatctggaagggaatagccgccggaaactttctagaacatactgagtttttaggaaatatttacggaacttctaaaactgctgtgaatacagcggctattaataatcgtatttgtgtgatggatctaaacatcgatggcgttagaagtcttaaaaatacgtacctaatgccttactcggtgtatataagacctacctctcttaaaatggttgagaccaagcttcgttgtagaaacactgaagcggatgatgagattcatcgtcgtgtgatgttggcaaaaactgacatggatgaggcaggtgaagccggtctattcgacactattatcattgaagatgatgtgaatttagcatatagtaagttaattcagatactacaggaccgtattagaatgtattttaacactaattagagacttaagacttaaaacttgataattaataatataactcgtttttatatgtggctatttcaacgtctaatgtattagttaaatattaaaacttaccacgtaaaacttaaaatttaaaatgatatttcattgacagatagatcacacattatgaactttcaaggacttgtgttaactgacaattgcaaaaatcaatgggtcgttggaccattaataggaaaaggtggattcggtagtatttatactactaatgacaataattatgtagtaaaaatagagcccaaagctaacggatcattatttaccgaacaggcattttatactagagtacttaaaccatccgttatcgaagaatggaaaaaatctcacaatataaagcacgtaggtcttatcacgtgcaaggcatttggtctatacaaatccattaatgtggaatatcgattcttggtaattaatagattaggtgcagatctagatgcggtgatcagagccaataataatagattaccaaaaaggtcggtgatgttgatcggaatcgaaatcttaaataccatacaatttatgcacgagcaaggatattctcacggagatattaaagcgagtaatatagtcttggatcaaatagataagaataaattatatctagtggattacggattggtttctaaattcatgtctaatggcgaacatgttccatttataagaaatccaaataaaatggataacggtactctagaatttacacctatagattcgcataaaggatacgttgtatctagacgtggagatctagaaacacttggatattgtatgattagatggttgggaggtatcttgccatggactaagatatctgaaacaaagaattgtgcattagtaagtgccacaaaacagaaatatgttaacaatactgcgactttgttaatgaccagtttgcaatatgcacctagagaattgctgcaatatattaccatggtaaactctttgacatattttgaggaacccaattacgacgagtttcggcacatattaatgcagggtgtatattattaagtgtggtgtttggtcgatgtaaaatttttgtcgataaaaattaaaaaataacttaatttattattgatctcgtgtgtacaaccgaaatcatggcgatgttttacgcacacgctctcggtgggtacgacgagaatcttcatgcctttcctggaatatcatcgactgttgccaatgatgtcaggaaatattctgttgtgtcagtttataataacaagtatgacattgtaaaagacaaatatatgtggtgttacagtcaggtgaacaagagatatattggagcactgctgcctatgtttgagtgcaatgaatatctacaaattggagatccgatccatgatcaagaaggaaatcaaatctctatcatcacatatcgccacaaaaactactatgctctaagcggaatcgggtacgagagtctagacttgtgtttggaaggagtagggattcatcatcacgtacttgaaacaggaaacgctgtatatggaaaagttcaacatgattattctactatcaaagagaaggccaaagaaatgaatgcactcagttcaggacctatcatcgattaccacgtctggataggagattgtatctgtcaagttactgctgtggacgtacatggaaaggaaattatgagaatgagattcaaaaagggtgcggtgctacagatcccaaatctggtaaaagttaaacttggggagaatgatacagaaaatctttcttctactatatcggcggcaccatcgaggtaaccacctctcaagaagaccgcgtgaataatgtactcatgaaacgtttggaaactatacgccatatgtggtctgttgtatatgatcattttgatattgtgaatggtaaagaatgctgttatgtgcatacgcattcatctaatcaaaatcctataccgagtactgtaaaaacaaatttgtacatgaagactatgggatcatgcattcaaatggattccatggaagctctagagtatcttagcgaactgaaggaatcaggtggatggagtcccagaccagaaatgcaggaatttgaatatccagatggagtggaagacactgaatcaattgagagattggtagaggagttcttcaatagatcagaacttcaggctggtaaattagtcaaatttggtaattctattaattgttaaacatacatctgtttcagctaagcaactaagaacacgtatacggcagcagcttccttttatactctcatcttttaccaacacaaagggtggatatttgttcattggagttgataataatacacacaaagtatttggattcacggtgggttacgactacctcagactgatagagaatgatatagaaaagcatatcaaaagactttgtgttgtgcatttctgtgagaagaaagaggacatcaagtacacgtgtcgattcatcaaggtatataaacctggggatgaggctacctcgacatacgtgtgcgctatcaaagtggaaagatgctgttgtgctgtgtttgcagattggccagaatcatggtatatggatactaatggtatcaagaagtattctccagatgaatgggtgtcacatataaaattttaattaatgtaactatagagaacaaataataggttgtaatatcatatagacaataactaacaattaattagtaactgttatctcttttttaactaaccaactaactatatacctattaatacatcgtaattatagttcttaacatctattaatcattgattcgcttctttaattttttataaactaacattgttaattgaaaagggataacatgttacagaatataaattatatatggatttttttaaaaaggaaatacttgactggagtgtatatttatctcttcattatatagcacgcgtgtgttccaattcttccacatcccatataatacaggattataatctcgttcgaacatacgagaaagtggataaaacaatagttgattttttatctaggttgccaaatttattccatattttagaatatggggaaaatattctacatatttattctatggatgatgctaatacgaatattataattttttttctagatagagtattaaatattaataagaacgggtcatttatacacaatctcaggttatcatcatccattaatataaaagaatatgtatatcaattagttaataatgatcatccagataataggataagactaatgcttgaaaatggacgtagaacaagacattttttgtcctatatatcagatacagttaatatctatatatgtattttaataaatcatggattttatatagatgcagaagacagttacggttgtacattattacatagatgtatatatcactataagaaatcagaatcagaatcatacaatgaattaattaagatattgttaaataatggatccgatgtagataaaaaagatacgtacggaaacacaccttttatcctattatgtaaacacgatatcaacaacgtggaattgtttgagatatgtttagagaatgctaatatagactctgtagactttaatagatatacacctcttcattatgtctcatgtcgtaataaatatgattttgtaaagttattaatttctaaaggagcaaatgttaatgcgcgtaataaattcggaactactccattttattgtggaattatacacggtatctcgcttataaaactatatttggaatcagacacagagttagaaatagataatgaacatatagttcgtcatttaataatttttgatgctgttgaatctttagattatctattatccagaggagttattgatattaactatcgtactatatacaacgaaacatctatttacgacgctgtcagttataatgcgtataatacgttggtctatctattaaacagaaatggtgattttgagacgattactactagtggatgtacatgtatttcggaagcagtcgcaaacaacaacaaaataataatggaagtactattgtctaaacgaccatctttgaaaattatgatacagtctatgatagcaattactaaaaataaacaacataatgcagatttattgaaaatgtgtataaaatatactgcgtgtatgaccgattatgatactcttatagatgtacagtcgctacagcaatataaatggtatattttaaaatgtttcgatgaaatagatatcatgaagagatgttatataaaaaataaaactgtattccaattagttttttgtatcaaagacattaatactttaatgagatatggtaaacatccttctttcgtgaagtgcactagtctcgacgtatacggaagtcgtgtacgtaatatcatagcatctattagatatcgtcagagattaattagtctattatccaagaagctggatgcgggagataaatggtcgtgttttcctaacgaaataaaatataaaatattggaaaactttaacgataacgaactatccacatatctaaaaatcttataaacactattaaaatataaaatctaagtaggataaaatcacactacatcattgtttccttttagtgctcgacagtgtatactatttttaacactcataaataaaaatgaaaacgatttccgttgttacgttgttatgcgtactacctgctgttgtttattcaacatgtactgtacccactatgaataacgctaaattaacgtctaccgaaacatcgtttaatgataaacagaaagttacatttacatgtgatcagggatatcattctttggatccaaatgctgtctgcgaaacagataaatggaaatacgaaaatccatgcaagaaaatgtgcacagtttctgattatgtctctgaattatatgataagccattatacgaagtgaattccaccatgacactaagttgcaacggcgaaacaaaatattttcgttgcgaagaaaaaaatggaaatacttcttggaatgatactgttacgtgtcctaatgcggaatgtcaacctcttcaattagaacacggatcgtgtcaaccagttaaagaaaaatactcatttggggaatatatgactatcaactgtgatgttggatatgaggttattggtgcttcgtacataagttgtacagctaattcttggaatgttattccatcatgtcaacaaaaatgtgatataccgtctctatctaatggattaatttccggatctacattttctatcggtggcgttatacatcttagttgtaaaagtggttttatactaacgggatctccatcatccacatgtatcgacggtaaatggaatcccatactcccaacatgtgtacgatctaacgaaaaatttgatccagtggatgatggtcccgacgatgagacagatttgagcaaactctcgaaagacgttgtacaatatgaacaagaaatagaatcgttagaagcaacttatcatataatcatagtggcgttaacaattatgggcgtcatatttttaatctccgttatagtattagtttgttcctgtgacaaaaataatgaccaatataagttccataaattgctaccgtaaatataaatccgttaaaataattaataatttaataacaaacaagtatcaaaagattaaagacttatagctagaatcaattgagatgtcttcttcagtggatgttgatatctacgatgccgttagagcatttttactcaggcactattataacaagagatttattgtgtatggaagaagtaacgccatattacataatatatacaggctatttacaagatgcgccgttataccgttcgatgatatagtacgtactatgccaaatgaatcacgtgttaaacaatgggtgatggatacacttaatggtataatgatgaatgaacgcgatgtttctgtaagcgttggcaccggaatactattcatggaaatgtttttcgattacaataaaaatagtatcaacaatcaactaatgtatgatataattaatagcgtatctataattctagctaatgagagatatagaagcgcttttaacgacgatggtatatacatccgtagaaatatgattaacaagttgtacggatacgcatctctaactactattggcacgatcgctggaggtgtttgttattatctgttgatgcatctagttagtttgtataaataattatttcaatatactagttaaaattttaagattttaaatgtataaaaaactaataacgtttttatttgtaataggtgcattagcatcctattcgaataatgagtacactccgtttaataaactgagtgtaaaactctatatagatggagtagataatatagaaaattcatatactgatgataataatgaattggtgttaaattttaaagagtacacaatttctattattacagagtcatgcgacgtcggatttgattccatagatatagatgttataaacgactataaaattattgatatgtataccattgactcgtctactattcaacgcagaggtcacacgtgtagaatatctaccaaattatcatgccattatgataagtacccttatattcacaaatatgatggtgatgagcaacaatattctattactgcagagggaaaatgctataaaggaataaaatatgaaataagtatgatcaacgatgatactctattgagaaaacatactcttaaaattggatctacttatatatttgatcgtcatggacatagtaatacatattattcaaaatatgatttttaaaaatttaaaatatattatcacttcagtgacagtagtcaaataacaaacaacaccatgagatatattataattctcgcagttttgttcattaatagtatacacgctaaaataactagttataagtttgaatccgtcaattttgattccaaaattgaatggactggggatggtctatacaatatatcccttaaaaattatggcatcaagacgtggcaaacaatgtatacaaatgtaccagaaggaacatacgacatatccgcatttccaaagaatgatttcgtatctttctgggttaaatttgaacaaggcgattataaagtggaagagtattgtacgggactatgcgtcgaagtaaaaattggaccaccgactgtaacattgactgaatacgacgaccatatcaatttgtacatcgagcatccgtatgctactagaggtagcaaaaagattcctatttacaaacgcggtgacatgtgtgatatctacttgttgtatacggctaacttcacattcggagattctaaagaaccagtaccatatgatatcgatgactacgattgcacgtctacaggttgcagcatagactttgtcacaacagaaaaagtgtgcgtgacagcacagggagccacagaagggtttctcgaaaaaattactccatggagttcgaaagtatgtctgacacctaaaaagagtgtatatacatgcgcaattagatccaaagaagatgttcccaatttcaaggacaaaatggccagagttatcaagagaaaatttaataaacagtctcaatcttatttaactaaatttctcggtagcacatcaaatgatgttaccacttttcttagcatgcttaacttgactaaatattcataactaatttttattaatgatacaaaaacgaaataaaactgcatattatacactggttaacgcccttataggctctaaccattttcaagatgaggtccctgattatagtccttctgttcccctctatcatctactccatgtctattagacgatgtgagaagactgaagaggaaacatggggattgaaaatagggttgtgtataattgccaaagatttctatcccgaaagaactgattgcagtgttcatctcccaactgcaagtgaaggattgataactgaaggcaatggattcagggatatacgaaacaccgataaattataaaaaaagcaatgtgtccgctgtttccgttaataatactattttcgtaactggcggattattcataaataactctaatagcacgatcgtggttaacaatatggaaaaacttgacatttataaagacaaacaatggtcgattatagaaatgcctatggctagggtatatcacggcatcgactcgacatttggaatgttatattttgccggaggtctatccgttaccgaacaatatggtaatttagagaaaaacaacgagatatcttgttacaatcctagaacgaataagtggtttgatatttcatatactatttataagatatccatatcatcattgtgtaaactaaataacgtcttctatgtatttagtaaggacattggatatgtggaaaagtatgatggtgcatggaagttagtacatgatcgtctccccgctataaaggcattatcaacttctccttattgattgaaaatgaaaatataaatagtttttatgtatagcagtattaccctatagttttattgcttactactaacatggatacagatgttacaaatgtagaagatatcataaatgaaatagatagagagaaagaagaaatactaaaaaatgtagaaattgaaaataataaaaacattaacaagaatcatccaagtggatatattagagaagcactcgttattaatacaagtagtaatagtgattccattgataaagaagttatagaatgtatcagtcacgatgtaggaatatagatcatatctactaatttttataatcgatacaaaacataaaaaacaactcgttattacatagcaggcatggaatccttcaagtattgttttgataacgatggcaagaaatggattatcggaaatactttatattctggtaattcaatactatataaggtcagaaaaaatttcactagttcgttctacaattacgtaatgaaaatagatcacaaatcacacaagccattgttgtctgaaatacgattctatatatctgtattggatcctttgactatcgacaactggacacgggaacgtggtataaagtatttggctattccagatctgtatggaattggagaaaccgatgattatatgttcttcgttataaagaattcgggaagagtattcgccccaaaggatactgaatcagtcttcgaagcatgcgtcactatgataaacacgttagagtttatacactctcgaggatttacccatggaaaaatagaaccgaggaatatactgattagaaataaacgtctttcactaattgactattctagaactaacaaactatacaagagtggaaactcacatatagattacaacgaggacatgataacttcaggaaatatcaattatatgtgtgtagacaatcatcttggagcaacagtttcaaaacgaggagatttagaaatgttgggatattgcatgatagaatggttcggtggcaaacttccatggaaaaacgaaagtagtataaaagtaataaaacaaaaaaaagaatataaaaaatttatagctactttctttgaggactgttttcctgaaggaaatgaacctctggaattagttagatatatagaattagtatacacgttagattattctcaaactcctaattatgacagactacgtaaactgtttatacaagattgaaattatattctttttttatagagtgtggtagtgttacggatatctaatattaatattagactatctctatcgcgctacacgaccaatatcgattactatggatatcttcagggaaatcgcatcttctatgaaaggagagaatgtattcatttctccagcgtcaatctcgtcagtattgacaatactgtattatggagctaatggatccactgctgaacagctatcaaaatatgtagaaacggaggagaacacggataaggttagcgctcagaatatctcattcaaatccatgaataaagtatatgggcgatattctgccgtgtttaaagattcctttttgagaaaaattggcgataagtttcaaactgttgacttcactgattgtcgcactatagatgcaatcaacaagtgtgtagatatctttactgaggggaaaatcaatccactattggatgaaccattgtctcctgatacctgtctcctagcaattagtgccgtatactttaaagcaaaatggttgatgccattcgaaaaggaatttaccagtgattatcccttttacgtatctccgacggaaatggtagatgtaagtatgatgtctatgtacggcaaggcatttaatcacgcatctgtaaaggaatcattcggcaacttttcaatcatagaactgccatatgttggagatactagtatgatggtcattcttccagacaagattgatggattagaatccatagaacaaaatctaacagatacaaattttaagaaatggtgtaactctctggaagctacgtttatcgatgttcacattcccaagtttaaggtaacaggttcgtataatcttgtggatactctagtaaagtcaggactgacagaggtgttcggttcaactggagattatagcaatatgtgtaattcagatgtgagtgtcgacgctatgattcacaaaacgtatatagatgtcaatgaagagtatacagaagcagctgcagcaacttgtgcactggtgtcagactgtgcatcaacaattacaaatgagttctgtgtagatcatccgttcatctatgtgattaggcatgttgatggaaaaattcttttcgttggtagatattgctctccgacaactaattgttaaccattttttttaaaaaaatagaaaaaacatgtggtattagtgcaggtcgttgttcttccaattgcaattggtaagatgacggccaactttagtacccacgtcttttcaccacagcactgtggatgtgacagactgaccagtattgatgacgtcagacaatgtttgactgaatatatttattggtcgtcctatgcataccgcaacaggcaatgcgctggacagttgtattccacactcctctcttttagagatgatgcggaatcagtgttcatcgacattcgcgagctggtaaaaaatatgccgtgggatgatgtcaaagattgtacagaaatcatccgttgttatataccggatgagcaaaaaaccatcagagagatttcggccatcatcggactttgtgcatatgctgctacttactggggaggtgaagaccatcccactagtaacagtctgaacgcattgtttgtgatgcttgagatgctcaattacgtggattataacatcatattccggcgtatgaattgatgagttgtacatcttgacattttctttcttctcttctccctttcttctcttctcccttcctccctcttctccctttcccagaaacaaacttttttacccactataaaataaaatgagtatactacctattatatttcttcctatatttttttattcttcattcgttcagacttttaacgcgcctgaatgtatcgacaaagggcaatattttgcatcattcatggagttagaaaacgagccagtaatcttaccatgtcctcaaataaatacgctatcatccggatataatatattagatattttatgggaaaaacgaggagcggataatgatagaattataccgatagataatggtagcaatatgctaattctgaacccgacacaatcagactctggtatttatatatgcattaccacgaacgaaacctactgtgacatgatgtcgttaaatttgacaatcgtgtctgtctcagaatcaaatatagatcttatctcgtatccacaaatagtaaatgagagatctactggcgaaatggtatgtcccaatattaatgcatttattgctagtaacgtaaacgcagatattatatggagcggacatcgacgccttagaaataagagacttaaacaacggacacctggaattattaccatagaagatgttagaaaaaatgatgctggttattatacatgtgttttagaatatatatacagaggtaaaacatataacgtaaccagaattgtaaaattagaggtacgggataaaataataccttctactatgcaattaccagatggcattgtaacttcaataggtagtaatttgactattgcgtgtagagtatcgttgagacctcccacaacggatgcagacgtcttttggataagtaatggtatgtattacgaagaagatgatggggacggagacggtagaataagtgtagcaaataaaatctatatgaccgataagagacgtgttattacatcccggttaaacattaatcctgtcaaggaagaagatgctacaacgtttacgtgtatggcgtttactattcctagcatcagcaaaacagttactgttagtataacgtgaatgtatgttgttacatttccatgtcaattgagtttataagaatttttatacattatcttccaacaaacaattgacgaacgtattgctatgattaactcccacgatactatgcatattattaatcattaacttgcagactatacctagtgctattttgacatactcatgttcttgtgtaattgcggtatctatattattaaagtacgtaaatctagctatagttttattatttaattttagataatataccgtctccttatttttaaaaattgccacatcctttattaaatcatgaatgggaatttctatgtcatcgttagtatattgtgaacaacaagagcagatatctataggaaagggtggaatgcgatacattgatctatgtagttttaaaacacacgcgaactttgaagaatttatataaatcattccatcgatacatccttctatgttgacatgtatatatccaggaattcttttattaatgtcaggaaatgtataaactaaaacattgcccgaaagcggtgcctctatctgcgttatatccgttcttaacttacaaaatgtaaccaatacctttgcatgacttgttttgttcggcaacgttagtttaaacttgacgaatggattaattacaatagcatgatccgcgcatctattaagtttttttactttaacgcccttgtatgtttttacagagactttatctaaatttctagtacttgtatgtgttataaatataacgggatatagaactgaatcacctaccttagatacccaattacattttatcagatccagataataaacaaattttgtcgccctaactaattctatattgttatatattttacaattggttatgatatcatgtaataacttggagtctaacgcgcatcgtcgtacgtttatacaattgtgatttagtgtagtatatctacacatgtatttttccgcactatagtattctggactagtgataaaactatcgttatatctgtcttcaatgaactcatcgagatattgctctctgtcatattcatacacctgcataaactttctagacatcttacaatccgtgttattttaggatcatatttacatatttacgggtatatcaaagatgttagattagttaatgggaatcgtctataataatgaatattaaacaattatatgaggacttttaccacaaagcatcataaaaatgagtcgtcgtctgatttatgttttaaatatcaaccgcaaatcaactcataaaatacaagagaatgaaatatatacatattttagtcattgcaatatagaccatacttctacagaacttgattttgtagttaaaaactatgatctaaacagacgacaacatgtaactgggtatactgcactacactgctatttgtataataattactttacaaacgatgtactgaagatattattaaatcatgacgtaaatgtaacgatgaaaaccagtagcggacgtatgcctgtttatatattgcttactagatgttgcaatatttcacatgatgtagtgatagatatgatagacaaagataaaaaccacttattacatagagactattccaacctattactagagtatataaaatctcgttacatgttattaaaggaagaggatatcgatgagaacatagtatccactttattagataagggaatcgatcctaactttaaacaagacggatatacagcgttacattattattatttgtgtctcgcacacgtttataaaccaggtgagtgtagaaaaccgataacgataaaaaaggccaagcgaattatttctttgtttatacaacatggagctaatctaaacgcgttagataattgtggtaatacaccattccatttgtatcttagtattgaaatgtgtaataatattcatatgactaaaatgctgttgacttttaatccgaatttcaaaatatgtaataatcatggattaacgcctatactatgttatataacttccgactacatacaacacgatattcttgttatgttaatacatcactatgaaacaaatgttggagaaatgccgatagatgagcgtcgtatgatcgtattcgagtttatcaaaacatattctacacgtccggcagattcgataacttatttgatgaataggtttaaaaatataaatatttatacccgctatgaaggaaagacattattacacgtagcatgtgaatataataatacacacgtaatagattatcttatacgtatcaacggagatataaatgcgttaaccgacaataacaaacacgctacacaactcattatagataacaaagaaaattccccgtataccatcgattgtttactgtatatacttagatatattgtagataagaatgtgataagatcgttggtggatcaacttccatctctacctatcttcgatataaaatcatttgagaaattcatatcctactgtatacttttagatgacacattttacgataggcacgttaagaatcgcgattctaaaacgtatcgatacgcattttcaaaatacatgtcgtttgataaatacgatggtataataactaaatgtcacgacgaaacaatgttactcaaactgtccactgttctagacactacactatatgcagttttaagatgccataattcgaaaaagttaagaagatacctcaacgagttaaaaaaatataataacgataagtcctttaaaatatattctaatattatgaatgagagataccttaatgtatattataaagatatgtacgtgtcaaaggtatatgataaactatttcctgttttcacagataaaaattgtctactaacattactaccttcagaaattatatacgaaatattatacatgctgacaattaacgatctttataatatatcgtatccacctaccaaagtatagttgtatttttctcatgcgatgtgtgtaaaaaaactgatattatataaatattttagtgccgtataataaagatgacgatgaaaatgatggtacatatatatttcgtatcattattgttattgctattccacagttacgccatagacatcgaaaatgaaatcacagaattcttcaataaaatgagagatactctaccagctaaagactctaaatggttgaatccagcatgtatgttcggaggcacaatgaatgatatagccgctctaggagagccattcagcgcaaagtgtcctcctattgaagacagtcttttatcgcacagatataaagactatgtggttaaatgggagaggctagaaaagaatagacggcgacaggtttctaataaacgtgttaaacatggtgatttatggatagccaactatacatctaaattcagtaaccgtaggtatttgtgtaccgtaactacaaagaatggtgactgtgttcagggtatagttagatctcatattaaaaaacctccttcatgcattccaaaaacatatgaactaggtactcatgataagtatggcatagacttatactgtggaattctttacgcaaaacattataataatataacttggtataaagataataaggaaattaatatcgacgacattaagtattcacaaacgggaaagaaattaattattcataatccagagttagaagatagtggaagatacaactgttacgttcattacgacgacgttagaatcaagaatgatatcgtagtatcaagatgtaaaatacttacggttataccgtcgcaagaccacaggtttaaactaatactagatccaaaaatcaacgtaacgataggagaacctgccaatataacatgcactgctgtgtcaacgtcattattgattgacgatgtactgattgaatgggaaaatccatccggatggcttataggattcgattttgatgtatactctgttttaactagtagaggcggtattaccgaggcgaccttgtactttgaaaatgttactgaagaatatataggtaatacatataaatgtcgtggacacaactattattttgaaaaaacccttacaactacagtagtattggagtaaatacacaatgcatttttatatacattactgaataattattattattatttatatcgtatttgtgctataacgcgactatctaggtatttgtatctcactgatagagaacatataaatatagactctattaaacagttgtgtaaaatatcaaatcctaatagatgtggatgtacggctttacatgagtacttttataattatagatcagtcaacggaaaatacaagtatagatacaacggttactatcaatattatttatctagcgattatgaaaattataatgaatattattatgatgattatgatagaactggtatgaacagtgagagtgataatatatcaatcaaaacagaatatgaattctatgatgaaacacaagatcaaagtacacaactagtaggttacgacattaaactcaaaaccaatgaggatgattttatggctatgatagatcagtgggtgtccatgattatatagatgaatcaattaataaagtagtatatggaagagagtctcacgtaagatggcgggatatatggcaagaacataatgatggcgtatacagtataggaaaggagtgcatagataatatatacgaagacaaccataccgtagacgaattctacaagatagacagcgtatcagatgtagatgacgcggaacacatatctccgataactaatgatgtatctacacaaacatgggaaaagaaatcagagttagatagatacatggaaatgtatcctcgtcatagatatagtaagcattctgtctttaagggattttctgacaaagttagaaaaaatgatttagacatgaatgtggtaaaagaattactttctaacggtgcatctctaacaattaaggatagcagtaataaggatccaataaccgtttattttcgaagaacgataatgaatttagaaatgattgatattattaacaaacatacaactattgatgaacgaaagtatatagtacactcctatctaaaaaattataaaaatttcgattatccatttttcaggaagttagttttgactaataaacattgtctcaacaattattataatataagcgacagcaaatatggaacaccgctacatatattggcgtctaataaaaaattaataactcctaattacatgaagttattagtgtataacggaaatgatataaacgcacgaggtgaagatacacaaatgcgaactccattacacaaatatttgtgtaaatttgtatatcataatattgaatatggtatccgatactataatgaaaagattatagacgcatttatagagttaggagccgatctaactattccaaataacgatggaatgataccagtagtttactgtatacactcaaatgcagaatatggttataacaatattactaacataaagataatacgtaaactacttaatcttagtagacgtgcgtcacataatctatttagagatcgagtcatgcacgattatataagtaatacatatattgatcttgagtgtttagatattattagatcgttggatggattcgatatcaatggttactttgaaggacgtacaccacttcattgcgctatacaacataacttcactcagattgctaagtacttattagatcgaggagctgatatagtcgtacccaacacattgattatacatcagtacatacagtaaatagcatagatatggaggaggatacaaatatttcaaataaagttataaggtacaacactgtcaataatatatggaagacattacctaacttctggactggaactataaatccaggcgtggtctcgcataaagatgatatatatgttgtatgcgacatcaaagatgaaaaaaatgttaagacttgtatatttagatataacacgaatacgtataacggatgggaattggttacgacgacagaaagcagattatcagctctgcatactattcttcatgacaataccataatgatgttacattgttatgaatcgtatatgttacaagatacatttaatgtgtacactcgcgaatggaatcatatgtgtcatcaacattcgaatagttatatcatgtacaatatactacccatctactaaatataatagaataaaataaatgagtatgatcattttagataacgattgattttatcattaccgcttcattcttatattctttgcttacggaacctatatttagaaacatctactaacgattttttatgcttgcattattaatggtatgtaatatgattgattgtgtacgcaataccaatttgttaagtatgaatacggggtacaaacataaactgaaatttaacattatttatttatgatatatatcgttatcgttattgtttggtctataccatggatatctttaaagaactaatcttaaaacaccctgatgaaaatgttttgatttctccagtttctattttatctactttatctattctaaatcatggagcagctggttctacagctgaacaactatcaaaatatatagagaatatgaatgagaatacacccgatgataagaaggatgacaataatgacatggacgtagatattccgtattgtgcgacactagctaccgcaaataaaatatacggtagcgatagtatcgagttccacgcctccttcctacaaaaaataaaagacgattttcaaactgtaaactttaataatgctaaccaaacaaaggaactaatcaacgaatgggttaagacgatgacaaatggtaaaattaattccttattgactagtccgctatccattaatactcgtatgacagttgttagcgccgtccattttaaagcaatgtggaaatatccattttctaaacatcttacatatacagacaagttttatatttctaagaatatagttaccagtgttgatatgatggtgggtaccgagaataacttgcaatatgtacatattaatgaattattcggaggattctctattatcgatattccatacgagggaaactctagtatggtaattatactaccggacgacatagaaggtatatataacatagaaaaaaatataacagatgaaaaatttaaaaaatggtgtggtatgttatctactaaaagtatagacttgtatatgccaaagtttaaagtggaaatgacagaaccgtataatctggtaccgattttagaaaatttaggacttactaatatattcggatattatgcagattttagcaagatgtgtaatgaaactatcactgtagaaaaatttctacatacgacgtttatagatgttaatgaggagtatacagaagcatcggccgttacaggagtatttatgactaacttttcgatggtatatcgtacgaaggtctacataaaccatccattcatgtacatgattaaagacaacacaggacgtatactttttatagggaaatactgctatccgcaataaatataaacaaatagacttttatcacgtttatctatgtctaaatattacaaatagtaatagtataaactaaagctgataatacttaaaaaaataataatatcatttacaattaatagtataaactaaaaattaaacaaatcgttattataagtaatatcaaaatgatgatatacggattaatagcgtgtcttatattcgtgacttcatccatcgctagtccactttatattcccgttattccacccattacggaagataaatcgttcaatagtgtagaggtattagtttccttgtttagagatgaccaaaaagactatacggtaacttctcagttcaataactacactatcgataccaaagactggactatcggcgtactatccacacctgatggtttggatataccattgactaatataacttattggtcacggtttactataggtcgtgcattgttcaaatcagagtctgaggatattttccaaaagaaaatgagtattctaggtgtttctatagaatgtaagaagtcgtcgacattacttacttttttgaccgtgcgtaaaatgactcgagtatttaataaatttccagatatggcttattatcgaggagactgtttaaaagccgtttatgtaacaatgacttataaaaatactaaaactggagagactgattacacgtacctctctaatggggggttgcctgcatactatcgtaatggggtcgatggttgattattgattagtatattccttattcacacaaaaagaacatttttataaacatgaaaccactgtctaaatgtaattatgatcttgatttatagatgaagatcagcctttagaggattttaaccagtatgtttaatatgaaaaaaataaacataacatattttgagattaagcgctattgtgcttaattattttgctctataaactgaatatatagccacaattattgacgggcttgtttatgaccggcaatcatgaatttacagaaattatctctggctatatatcttactgcgacatgttcgtggtgttatgaaacatgcataagaaaaactgcgttgtatcatgacattcaattggagcatgtagaagacaataaagatagtgtagcgtcgctaccgtacaagtagtcaatcaaagagaacgtagtagattgttggctacatttaattggacagatatagctgagggtgttagaaatgagttcattaaaatatgtgatatcaacggaacatatttatataattatactattgctgttagtataattattgattccacggaagaactaccaacagttactccaattacaacaacatatgaaccttctacatataattatactatcgatgatagcactgttattactactgaagaactacaagtgactcctcatatggatctccatcgatgatacatgtattaaaatactttccgaataagtcttttaaatattgtattaattatgaaaaactatgctatgcgagtatgatgcaaagatgtttaatgatacgatactagattttatctctagcgagagatgtcgttagaatcatttatcataactacgtttaataataattcatcaacgaatatcgataacatgtgtcatttatacgttaaagtctgtccgtcttctctattgtttagactgtttgtagaatgctgtgatataaacaaactagtagaaggtacgactccgttacactgttatctaatgaatgaaggatttgaatcatctgttttaaaaaacctattaaaggagtatgtcatgaatacgtttaatgttcatgacatccattacacaaatatttaactcatgatgaagttgagaatgatatgctttctgatagtatagatagctttagctaatataaaaatatattaatccactatatattctagacttgatttaaaaccgataaactactactacgtactgtataagttgttaaaaaaaggagcagaccctaattatgtagatgatagaggtaatacttttcttcattacttctgcatctatatgtccacttatgagaaaacgtcatttaataagatgcatcgtgaaaagaaatttattaaagagttggtaaaatatgaaaccgaaagtaaataatataggaaatacacctctacataactacgtatctcaatatgatatcactctcattcctcatccacaacccattaaaaaaatggaaattaaagccctctattagcataaacggctacaggtctacctttacaatggcctctccttgtgcccagttcagaccctgtcattgccacgctactaaggactccctgaataccgtggccgacgtcagacattgtctgactgaatacatcctgtgggtttctcatagatggacccatagagaaagcgcagggtctctctacaggcttctcatctctttcagaactgatgcaacggagctctttggtggtgagttgaaggattcacttccgtgggacaatatcgacaattgcgtggagatcattaaatgtttcatcagaaatgactccatgaaaaccgccgaagaacttcgtgcaatcattggactttgtactcaatcagctatcgtctctggaagagtcttcaacgataagtatatcgacatactacttatgctgcgaaagattctgaacgagaacgactatctcaccctcttggatcatatccgcactgctaaatactaaatctccttcatgctctctcactacactttttatcatcttatgaggaatgattgccttcatcatttttcgtgaaataggaataattagcaccagaatagctatggattgcacatgtattctatgtcgtctactggatgaagatgtgacgtacaaaaaaataaaactagaaattgaaacgtgtcacaacttatcaaaacatatagatagacgaggaaacaatgcgctacattgttacgtcttcaataaatgcgatacagacattaagattgttcgactgttactctctcgcggagtcgagagactttgtagaaacaacgaaggattaactccgctaggagcatacagtaagcatagatacgtaaaatctcaaattgtgcatctactgatatccagctattcgaattcctctaacgaactcaagtcgaatataaatgatttcgatctgtattcgtatatgtcttcggataatatcgacttacgtctgctaaaatacctaattgtggataaacggatacgtccgtccaagaatacgaattatgcaatcaatggtctcggattggtggatatatacgtaacgacgcctaatccgagaccagaagtattgctatggcttcttaaatcagaatgttacagcaccggttacgtatttcgtacctgtatgtacgacagtgatatgtgtaagaactctcttcattactatatatcgtctcatagagaatctcaatctctatccaaggatgtaattaaatgtttgatcaataacaatgtttccatccatggcagagacgaaggaggatctttacccatccaatactactggtcttgctcaaccatagatatagagattgttaaattattaataaaggatgtggacacgtgtagagtatacgacgtcagccctatattagaggcggattatctaaacaagcgatttagagtaaccccatataatgtagacatggaaatcgttaatcttcttattgagagacgtcatactcttgtcgacgtaatgcgtagtattacttcttacgattccagagactataaccactacatcatcgataacattctaaagagatttagacaacaggatgaatccatcgtacaagccatgttgataaactacttacattacggcgatatggtcgttcgatgcatgttagataacggacaacaactatcctctgcacgactactttgttaataataatctcgtcgatgtaaacgtcgtaaggtttatcgtggaaaataatggacacatggctgtaaatcacgtatcgaacaatggccgtctatgtatgtacggtctgatattatcgagatttaataattgcgggtatcactgttatgaaaccatactaatagatgtatttgatatactaagcaagtacatggataatatagatatgatcgataatgagaataaaactctactatattacgcggtcgatgtcaataatatacaatttgcaaagcggttattggaatatggagcgagtgttacaacatcacgctcgataatcaatacggccatccagaaaagtagttacagaagagaaaacaaaacgaggatagttgatttattacttagctaccatcccactctagagactatgattgacgcatttaatagagatatacgctatctatatcctgaaccattattcgcctgtatcagatacgccttaatcctagatgatgattttccttctaaagtaagtatgatatctccggtcgtcataaggaactaaagcgctatagagtagacattaatagaatgaagaatgcctacatatcaggcgtctccatgtttgatatattatttaaacgaagcaaacgccacagattgagatacgcaaagaatccgacatcaaatggtacaaaaaagaactaacgtccatcattacagaaactgtaaagaacaatgagaggatcgactccatagtggacaacattaatacagacgataacttgatttcgaaattacccatggagatactttattactccattaaataatttatcatggagcgataatgtcctgtttcatttgtttccatgacatattacaaaatcgattccgtccaagatgataaaaacatttaccggcatcataaacacggagtttattttatatgtctcgcataaacattactaaaaaaatatattgttcggttttctttcacatctttaattatgaaaaagtaaatcattatgagatggacgagattgtacgcatcgttcgcgacagtatgtggtacatacctaacgtatttatggacgacggtaagaatgaaggtcacgtttctgtcaacaatgtttgtcatatgtattttacgttctttgatgtggatacatcgtctcatctgtttaagctagttattaaacactgcgatctgaataaacgaggtaactctccattacattgctatacgatgaatacacgatttaatccatctgtattaaagatattgttacaccacggcatgcgtaactttgatagcaaggatgaaaaaggacatattcctctacaccactatctgattcattcactatcaatcgataacaagatctttgatatactaacggacaccattgatgactttagtaaatcatccgatctattgctgtgttatcttagatataaattcaatgggagcttaaactattacgttctgtacaaaggatccgaccctaattgcgtcgacgaggatggactcacttctcttcattactactgtaaacacatatccacgttctacaaaagcaattattacaagttaagtcacactaagatgcgagccgagaagcgattcatctacgcgataatagattatggagcaaacattaacgcggttacacacttaccttcaacagtataccaaacatagtcctcgtgtggtgtatgctcttttatctcgaggagccgatacgaggatacgtaataatcttgattgtacacccatcatggaacgattgtgcaacaggtcatattctcataatgttactcaattggcacgaacaaaaggaagaaggacaacatctactttatctattcataaaacataatcaaggatacactctcaatatactacggtatctactagataggttcgacattcagaaagacgaatactataataccgcctttcaaaattgtaacaacaatgttgcctcatacatcggatacgacatcaaccttccgactaaagacggtattcgacttggtgtttgaaaacagaaacatcatatacaaggcggatgttgtgaatgacatcatccaccacagactgaaagtatctctacctatgattaaatcgttgttctacaagatgtcagaattctctccctacgacgattactacgtaaaaaagatactagcctactgcctattaagggacgagtcattcgcggaactacatagtaaattctgtttaaacgaggactataaaagtgtatttatgaaaaatatatcattcgataagatagattccatcatcgtgacataagtcgccttaaagagattcgaatctccgacaccgacctgtatacggtatcacagctatcttaaagccatacattcggacagacacatttcatttcccatgtacgacgatctcatagaacagtgccatctatcgatggagcataaaagtaaactcgtcgacaaagcactcaataaattagagtctaccatcggtcaatctagactatcgtatttgcctccggaaattatgcgcaatatcatctaaacagtatgttgtacggaaagaaccattacaaatattatccatgatagaaagaaaatatctatatgattggagaagtaggaaacaggaacaagacgacgattactacattattaaatcatgaagtccgtattatactcgtatatattgtttctctcatgtataataataaacggaagagatatagcaccgcatgcaccatccgatggaaagtgtaaagacaacgaatacaaacgccataatttgtgtccgggaacatacgcttccagattatgcgatagcaagactaacacacgatgtacaccctgtggttcgggtaccttcacatctcgcaataatcatttacccgcttgtctaagttgtaacggaagacgcgatcgtgtaacacgactcacaatagaatctgtgaatgctctcccggatattattgtcttctcaaaggatcatccggatgcaaggcatgtgtttcccaaacaaaatgtggaataggatacggagtatccggagacgtcatctgttctccgtgtggtctcggaacatattctcacaccgtctcttccgcagataaatgcgaacccgtacccagtaatacctttaactatatcgatgtggaaattaatctgtatcccgtcaacgacacgtcgtgtactcggacgaccactaccggtctcagtgaatccatctcaacgtcggaactaactattactatgaatcataaagactgtaatcccgtatttcgtgaggaatacttctctgtccttaataaggtagcaacttcaggtttctttacaggagaaaggtgtgcactctgaatttcgagattaaatgcaataacaaagattcttcctccaaacagttaacgaaagcaaagaatgatgacggtatcatgccgcattcggagacagtaactctagtgggcgactgtatatctagcgtcgacatctatatactatatagtaataccaatactcaagactacgaaactgatacaatctcttatcatgtgggtaatgttctcgatgtcgatagccatatgcccggtagttgcgatatacataaactgatcactaattccaaacccacccgctttttatagtaagtttttcacccataaataataaatacaataattaatttctcgtaaaagtagaaaatatattctaatttattgcatggtaaggaagtagaatcataaagaacagtactcaatcaatagcaattatgaaacaatatatcgtcctggcatgcatgtgcctgccagtcttcagcaatcatcctcatcctcatcctcgtgtacggaagaagaaaacaaacatcatatgggaatcgatgttattatcaaagtcacaaagcaagaccaaacaccgaccaatgataagatttgccaatccgtaacggaaattacagagtccgagtcagatccaaatcccgaggtggaatcagaagatgattccacatcagtcgaggatgtagatcctcctaccacttattactccatcatcggtggaggtctgagaatgaactttggattcaccaaatgtcctcagattaaatccatctcagaatccgctgatggaaacacagtgaatgctagattgtccagcgtgtccccaggacaaggtaaggactctcccgcgatcactcatgaagaagctcttgctatgatcaaagactgtgaggtgtctatcgacatcagatgtagcgaagaagagaaagacagcgacatcaagacccatccagtactcgggtctaacatctctcataagaaagtgagttacgaagatatcatcggttcaacgatcgtcgatacaaaatgtgtcaagaatctagagtttagcgttcgtatcggagacatgtgcaaggaatcatctgaacttgaggtcaaggatggattcaagtatgtcgacggatcggcatctgaaggtgcaaccgatgatacttcactcatcgattcaacaaaactcaaagcgtgtgtctgaatcgataactctattcatctgaaattggatgagtagggttaatcgaacgattcaggcacaccacgaattaaaaaagtgtaccggacactatattccggtttgcaaaacaaaaatgttcttaactacattcacaaaaagttacctctcgcgacttcttctttttctgtctcaatagtgtgatacgattatgacactattcctattcctattcctatttcctttcagggtatcacaaaaatattaaacctctttctgatggtctcataaaaaaagttttacaaaaatatttttattctctttctctctttgatggtctcataaaaaaagttttacaaaaatatttttattctctttctctctttgat

SEQ ID NO: 2 - DNA, 195821 bp, Vaccinia virus
  source 1..195821: mol_type = genomic DNA
  misc_feature 1..195821: note = IHDW1
tttttatgagaccatcaaagagagaaagagaataaaaatatttttgtaaaactttttttatgagaccatcaaagagagaaagagaataaaaatatttttgtaaaactttttttatgagaccatcaaagagagaaagagaataaaaatatttttgtaaaactttttttatgagaccatcaaagagagaaagagaataaaaatatttttgtaaaactttttttatgagaccatcagaaagaggtttaatatttttgtgataccctgaaaggaaataggaataggaataggaatagtgtcataatcgtatcacactattgagacagaaaaagaagaagtcgcgagaggtaactttttgtgaatgtagttaagaacatttttgttttgcaaaccggaatatagtgtccggtacacttttttaattcgtggtgtgcctgaatcgttcgattaaccctactcatccaatttcagatgaatagagttatcgattcagacacacgctttgagttttgttgaatcgatgagtgaagtatcatcggttgcaccttcagatgccgatccgtcgacatacttgaatccatccttgacctcaagttcagatgattccttgcacatgtctccgatacgaacgctaaactctagattcttgacacattttgtatcgacgatcgttgaaccgatgatatcttcgtaactcactttcttatgagagatgttagacccgagtactggatgggtcttgatgtcgctgtctttctcttcttcgctacatctgatgtcgatagacacctcacagtctttgatcatagcaagagcttcttcatgagtgatcgcgggagagtccttaccttgtcctggggacacgctggacaatctagcattcactgtgtttccatcagcggattctgagatggatttaatctgaggacatttggtgaatccaaagttcattctcagacctccaccgatgatggagtaataagtggtaggaggatctacatcctcgactgatgtggaatcatcttctgattccacctcgggatttggatctgactcggactctgtaatttccgttacggattggcaaatcttatcattggtcggtgtttggtcttgctttgtgactttgataataacatcgattcccatatgatgtttgttttcttcttccgtacacgaggatgaggatgaggatgattgctgaagactggcaggcacatgcatgccaggacgatatattgtttcataattgctattgattgagtactgttctttatgattctacttccttaccatgcaataaattagaatatattttctacttttacgagaaattaattattgtatttattatttatgggtgaaaaacttactataaaaagcgggtgggtttggaattagtgatcagtttatgtatatcgcaactaccgggcatatggctatcgacatcgagaacattacccacatgataagagattgtatcagtttcgtagtcttgagtattggtattactatatagtatatagatgtcgacgctagatatacagtcgcccactagagttactgtctccgaatgcggcatgataccgtcatcattctttgctttcgttaactgtttggaggaagaatctttgttattgcatttaatctcgaaattcagagtgcacacctttctcctgtaaagaaacctgaagttgctaccttattaaggacagagaagtattcctcacgaaatacgggattacagtctttatgattcatagtaatagttagttccgacgttgagatggattcactgagaccggtagtggtcgtccgagtacacgacgtgtcgttgacgggatacagattaatttccacatcgatatagttaaaggtattactgggtacgggttcgcatttatctgcggaagagacggtgtgagaatatgttccgagaccacacggagaacagatgacgtctccggatactccgtatcctattccacattttgtttgggaaacacatgccttgcatccggatgatcctttgagaagacaataatatccgggagagcattcacagattctattgtgagtcgtgttacacgatcgcgtcttccgttacaacttagacaagcgggtaaatgattattgcgagatgtgaaggtacccgaaccacagggtgtacatcgtgtgttagtcttgctatcgcataatctggaagcgtatgttcccggacacaaattatggcgtttgtattcgttgtctttacactttccatcggatggtgcatgcggtgctatatctcttccgtttattattatacatgagagaaacaatatatacgagtataatacggacttcatgatttaataatgtagtaatcgtcgtcttgttcctgtttcctacttctccaatcatatagatattttctttctatcatggataatatttgtaatggttctttccgtacaacatactgtttagatgatattgcgcataatttccggaggcaaatacgatagtctagattgaccgatggtagactctaatttattgagtgctttgtcgacgagtttacttttatgctccatcgatagatggcactgttctatgagatcgtcgtacatgggaaatgaaatgtgtctgtccgaatgtatggctttaagatagctgtgataccgtatacaggtcggtgtcggagattcgaatctctttaaggcgacttatgtcacgatgatggaatctatcttatcgaatgatatatttttcataaatacacttttatagtcctcgtttaaacagaatttactatgtagttccgcgaatgactcgtcccttaataggcagtaggctagtatcttttttacgtagtaatcgtcgtagggagagaattctgacatcttgtagaacaacgatttaatcataggtagagatactttcagtctgtggtggatgatgtcattcacaacatccgccttgtatatgatgtttctgttttcaaacaccaagtcgaataccgtctttagtcggaaggttgatgtcgtatccgatgtatgaggcaacattgttgttacaattttgaaaggcggtattatagtattcgtctttctgaatgtcgaacctatctagtagataccgtagtatattgagagtgtatccttgattatgttttatgaatagataaagtagatgttgtccttcttccttttgttcgtgccaattgagtaacattatgagaatatgacctgttgcacaatcgttccatgatgggtgtacaatcaagattattacgtatcctcgtatcggctcctcgagataaaagagcatacaccacacgaggactatgtttggtatactgttgaaggtaagtgtgtaaccgcgttaatgtttgctccataatctattatcgcgtagatgaatcgcttctcggctcgcatcttagtgtgacttaacttgtaataattgcttttgtagaacgtggatatgtgtttacagtagtaatgaagagaagtgagtccatcctcgtcgacgcaattagggtcggatcctttgtacagaacgtaatagtttaagctcccattgaatttatatctaagataacacagcaatagatcggatgatttactaaagtcatcaatggtgtccgttagtatatcaaagatcttgttatcgattgatagtgaatgaatcagatagtggtgtagaggaatatgtcctttttcatccttgctatcaaagttacgcatgccgtggtgtaacaatatctttaatacagatggattaaatcgtgtattcatcgtatagcaatgtaatggagagttacctcgtttattcagatcgcagtgtttaataactagcttaaacagatgagacgatgtatccacatcaaagaacgtaaaatacatatgacaaacattgttgacagaaacgtgaccttcattcttaccgtcgtccataaatacgttaggtatgtaccacatactgtcgcgaacgatgcgtacaatctcgtccatctcataatgatttactttttcataattaaagatgtgaaagaaaaccgaacaatatatttttttagtaatgtttatgcgagacatataaaataaactccgtgtttatgatgccggtaaatgtttttatcatcttggacggaatcgattttgtaatatgtcatggaaacaaatgaaacaggacattatcgctccatgataaattatttaatggagtaataaagtatctccatgggtaatttcgaaatcaagttatcgtctgtattaatgttgtccactatggagtcgatcctctcattgttctttacagtttctgtaatgatggacgttagttcttttttgtaccatttgatgtcggattctttgcgtatctcaatctgtggcgtttgcttcgtttaaataatatatcaaacatggagacgcctgatatgtaggcattcttcattctattaatgtctactctatagcgctttagttccttatgacgaccggagatatcatacttactttagaaggaaaatcatcatctaggattaaggcgtatctgatacaggcgaataatggttcaggatatagatagcgtatatctctattaaatgcgtcaatcatagtctctagagtgggatggtagctaagtaataaatcaactatcctcgttttgttttctcttctgtaactacttttctggatggccgtattgattatcgagcgtgatgttgtaacactcgctccatattccaataaccgctttgcaaattgtatattattgacatcgaccgcgtaatatagtagagttttattctcattatcgatcatatctatattatccatgtacttgcttagtatatcaaatacatctattagtatggtttcataacagtgatacccgcaattattaaatctcgataatatcagaccgtacatacatagacggccattgttcgatacgtgatttacagccatgtgtccattattttccacgataaaccttacgacgtttacatcgacgagattattattaacaaagtagtcgtgcagaggatagttgttgtccgttatctaacatgcatcgaacgaccatatcgccgtaatgtaagtagtttatcaacatggcttgtacgatggattcatcctgttgtctaaatctctttagaatgttatcgatgatgtagtggttatagtctctggaatcgtaagaagtaatactacgcattacgtcgacaagagtatgacgtctctcaataagaagattaacgatttccatgtctacattatatggggttactctaaatcgcttgtttagataatccgcctctaatatagggctgacgtcgtatactctacacgtgtccacatcctttattaataatttaacaatctctatatctatggttgagcaagaccagtagtattggatgggtaaagatcctccttcgtctctgccatggatggaaacattgttattgatcaaacatttaattacatccttggatagagattgagattctctatgagacgatatatagtaatgaagagagttcttacacatatcactgtcgtacatacaggtacgaaatacgtaaccggtgctgtaacattctgatttaagaagccatagcaatacttctggtctcggattaggcgtcgttacgtatatatccaccaatccgagaccattgattgcataattcgtattcttggacggacgtatccgtttatccacaattaggtattttagcagacgtaagtcgatattatccgaagacatatacgaatacagatcgaaatcatttatattcgacttgagttcgttagaggaattcgaatagctggatatcagtagatgcacaatttgagattttacgtatctatgcttactgtatgctcctagcggagttaatccttcgttgtttctacaaagtctctcgactccgcgagagagtaacagtcgaacaatcttaatgtctgtatcgcatttattgaagacgtaacaatgtagcgcattgtttcctcgtctatctatatgttttgataagttgtgacacgtttcaatttctagttttatttttttgtacgtcacatcttcatccagtagacgacatagaatacatgtgcaatccatagctattctggtgctaattattcctatttcacgaaaaatgatgaaggcaatcattcctcataagatgataaaaagtgtagtgagagagcatgaaggagatttagtatttagcagtgcggatatgatccaagagggtgagatagtcgttctcgttcagaatctttcgcagcataagtagtatgtcgatatacttatcgttgaagactcttccagagacgatagctgattgagtacaaagtccaatgattgcacgaagttcttcggcggttttcatggagtcatttctgatgaaacatttaatgatctccacgcaattgtcgatattgtcccacggaagtgaatccttcaactcaccaccaaagagctccgttgcatcagttctgaaagagatgagaagcctgtagagagaccctgcgctttctctatgggtccatctatgagaaacccacaggatgtattcagtcagacaatgtctgacgtcggccacggtattcagggagtccttagtagcgtggcaatgacagggtctgaactgggcacaaggagaggccattgtaaaggtagacctgtagccgtttatgctaatagagggctttaatttccatttttttaatgggttgtggatgaggaatgagagtgatatcatattgagatacgtagttatgtagaggtgtatttcctatattatttactttcggtttcatattttaccaactctttaataaatttcttttcacgatgcatcttattaaatgacgttttctcataagtggacatatagatgcagaagtaatgaagaaaagtattacctctatcatctacataattagggtctgctcctttttttaacaacttatacagtacgtagtagtagtttatcggttttaaatcaagtctagaatatatagtggattaatatatttttatattagctaaagctatctatactatcagaaagcatatcattctcaacttcatcatgagttaaatatttgtgtaatggatgtcatgaacattaaacgtattcatgacatactcctttaataggttttttaaaacagatgattcaaatccttcattcattagataacagtgtaacggagtcgtaccttctactagtttgtttatatcacagcattctacaaacagtctaaacaatagagaagacggacagactttaacgtataaatgacacatgttatcgatattcgttgatgaattattattaaacgtagttatgataaatgattctaacgacatctctcgctagagataaaatctagtatcgtatcattaaacatctttgcatcatactcgcatagcatagtttttcataattaatacaatatttaaaagacttattcggaaagtattttaatacatgtatcatcgatggagatccatatgaggagtcacttgtagttcttcagtagtaataacagtgctatcatcgatagtataattatatgtagaaggttcatatgttgttgtaattggagtaactgttggtagttcttccgtggaatcaataattatactaacagcaatagtataattatataaatatgttccgttgatatcacatattttaatgaactcatttctaacaccctcagctatatctgtccaattaaatgtagccaacaatctactacgttctctttgattgactacttgtacggtagcgacgctacactatctttattgtcttctacatgctccaattgaatgtcatgatacaacgcagtttttcttatgcatgtttcataacaccactaacatgtcgcagtaagatatatagccagagataatttctgtaaattcatgattgccggtcataaacaagcccgtcaataattgtggctatatattcagtttatagagcaaaataattaagcacaatagcgcttaatctcaaaatatgttatgtttatttttttcatattaaacatactggttaaaatcctctaaaggctgatcttcatctataaatcaagatcataattacatttagacagtggtttcatgtttataaaaatgttctttttgtgtgaataaggaatatactaatcaataatcaaccatcgaccccattacgatagtatgcaggcaaccccccattagagaggtacgtgtaatcagtctctccagttttagtatttttataagtcattgttacataaacggcttttaaacagtctcctcgataataagccatatctggaaatttattaaatactcgagtcattttacgcacggtcaaaaaagtaagtaatgtcgacgacttcttacattctatagaaacacctagaatactcattttcttttggaaaatatcctcagactctgatttgaacaatgcacgacctatagtaaaccgtgaccaataagttatattagtcaatggtatatccaaaccatcaggtgtggatagtacgccgatagtccagtctttggtatcgatagtgtagttattgaactgagaagttaccgtatagtctttttggtcatctctaaacaaggaaactaatacctctacactattgaacgatttatcttccgtaatgggtggaataacgggaatataaagtggactagcgatggatgaagtcacgaatataagacacgctattaatccgtatatcatcattttgatattacttataataacgatttgtttaatttttagtttatactattaattgtaaatgatattattatttttttaagtattatcagctttagtttatactattactatttgtaatatttagacatagataaacgtgataaaagtctatttgtttatatttattgcggatagcagtatttccctataaaaagtatacgtcctgtgttgtctttaatcatgtacatgaatggatggtttatgtagaccttcgtacgatataccatcgaaaagttagtcataaatactcctgtaacggccgatgcttctgtatactcctcattaacatctataaacgtcgtatgtagaaatttttctacagtgatagtttcattacacatcttgctaaaatctgcataatatccgaatatattagtaagtcctaaattttctaaaatcggtaccagattatacggttctgtcatttccactttaaactttggcatatacaagtctatacttttagtagataacataccacaccattttttaaatttttcatctgttatatttttttctatgttatatataccttctatgtcgtccggtagtataattaccatactagagtttccctcgtatggaatatcgataatagagaatcctccgaataattcattaatatgtacatattgcaagttattctcggtacccaccatcatatcaacactggtaactatattcttagaaatataaaacttgtctgtatatgtaagatgtttagaaaatggatatttccacattgctttaaaatggacggcgctaacaactgtcatacgagtattaatggatagcggactagtcaataaggaattaattttaccatttgtcatcgtcttaacccattcgttgattagttcctttgtttggttagcattattaaagtttacagtttgaaaatcgtcttttattttttgtaggaaggaggcgtggaactcgatactatcgctaccgtatattttatttgcggtagctagtgtcgcacaatacggaatatctacgtccatgtcattattgtcatccttcttatcatcgggtgtattctcattcatattctctatatattttgatagttgttcagctgtagaaccagctgctccatgatttagaatagataaagtagataaaatagaaactggagaaatcaaaacattttcatcagggtgttttaagattagttctttaaagatatccatggtatagaccaaacaataacgataacgatatatatcataaataaataatgttaaatttcagtttatgtttgtaccccgtattcatacttaacaaattggtattgcgtacacaatcaatcatattacataccattaataatgcaagcataaaaaatcgttagtagatgtttctaaatataggttccgtaagcaaagaatataagaatgaagcggtaatgataaaatcaatcgttatctaaaatgatcatactcatttattttattctattatattaacacatacatttttaacagcaacacattcaatattgtattgttatttttatattatttacacaattaacaatatattattagtttatattactgaattaataatataaaattcccaatcttgtcataaacacacactgagaaacagcataaacacaaaatccatcaaaaatgtcgatgaaatatctgatgttgttgttcgctgctatgataatcagatcattcgccgatagtggtaacgctatcgaaacgacattgccagaaattacaaacgctacaacagatattccagctatcagattatgcggtccagagggagatggatattgtttacacggtgactgtatccacgctagagatatcgacggtatgtattgtagatgctctcatggttatacaggcattagatgtcagcatgtagtattagtagactatcaacgttcagaaaaaccaaacactacaacgtcatatatcccatctcccggtattgtgcttgtattagtaggcattattattatgtgttgtctattatctgtttataggttcactcgaagaactaataaactacctctacaagatatggttgtgccataatttttataaatttttttatgagtatttttacaaaaaaaatgtataaagtgtatgtcttatgtatatttataaaaatgctaagtatgcgatgtatctatgttatttgtatttatctaaacaatacctctacctctagatattatacaaaaattttttatttcggcatattaaagtaaaatctagttaccttgaaaatgaatacagtgggtggttccgtatcaccagtaagaacataatagtcgaatacagtatccgattgagattttgcatacaatactagtctagaaagaaatttgtaatcattttctgtgacgggagtccatatatctgtatcatcgtctagtttatcagtgtcccatgctatatttctgttatcatcattagttaatgaaaataactctcgtgcttcagaaaagtcaaatattgtatccatacatacatctccaaaactatcgcttatacgtttatctttaacgatacctatacctagatggttatttactaacagacattttccagatctattgactataactcctatagtttccacatcaaccaagtaatgatcatctattgttatataacaataacataactcttttccatttttatcagtatgtatatctatatcaacgtcgtcgttgtagtgaatagtagtcattgatctattatatgaaacggatatgtctagaacggcaattgtcttacgtccagttaacactttcgttgatttaaagtctagagtctttgcaaacataatatccttatccgactttatatttcctgtagggtggtataattttattttgcctccacatatcggtgtttccaaatatattactagacaatattccatatagttattagttaagggtacccaattagaacacgtacgcttattatcatcatttggatcgtatttcataaaagttattgtactatcgatgtcaacacattctacattttttaatcgtctatatagtatttttctgatattttctataatatcagaattgtcttccatcggaagttgtatactatcggaatcagttacatgtttaaataattctctgatgtcattccttatacaatcaaattcattattaaacagtttaatagtctgtagacctttatcgtcgtaaatatccattgtcttattagttacgcttatttttatgtgttttacgttgctttattatattttataagaatgattgtttgacgaatcacgagaactattaagacacattattaggtatatattataaaaaagtttttgattacgatgttataagaggaaagaggacacattaacatcatacatcaattaactacattcttataacatcgtaatcaaaagaattgcaattttgatgtataacaactgtcaatgggttatggaattgtatattacatattatacggtatgttggtaacgacaaataccgatcggtaatcgtttgccggtgtaatagaattatatatatctatctattacaccggctgagtatacataataataagttgtggtagtatgatctccatatttataatttaggactttgtattcagtatttttggaatcataaaaaataaaaaaaagttttactaatttaaaatttaaaaagtatttacatttttttcactgtttagtcgcggatatggaattcgatcctgccaaaatcaatacatcatctatagatcatgtaacaatattacaatacatagatgaaccaaatgatataagactaacagtatgcattatccgaaatattaataacattacatattatatcaatatcacaaaaataaatacacatttggctaatcaatttcgggcttggaaaaaacgtatcgccggaagggactatatgactaacttatctagagatacaggaatacaacaatcaaaacttactgaaactatacgtaactgtcaaaaaaatagaaacatatatggtctatatatacactacaatttagttattaatgtggttattgattggataaccgatgtgattgttcaatcaatattaagagggttggtaaattggtacatagctaataatacctatactccaaatacacccaataatacaacaaccatttctgagttggatatcatcaaaatactaaataaatacgaggacgtgtatagagtaagtaaagaaaaagaatgtggaatttgctatgaagttgtttactcaaaacgattagaaaacgatagatactttggtttattggattcgtgtactcatatattttgcataacatgcatcaatatatggcataaaacacgaagagaaaccggtgcgtcggataattgtcctatatgtcgtacccgttttagaaacataacaatgagcaagttctataagctagttaactaataaataaaaagtttaatttgttgacgacgtatgtcgttattttttctcgtataaaagattaatttgattctaatataatctttagtattggataaatatcaattcaaattaattccattagattatatcataaataaaaatagtagcacgcactacttcagccaaatattcttttttgaaacgccatctatcgtagtgaggacacaagtgaacctataatgagcaaatttattagtatcggttacatgaaggactttacgtagagtggtgattccactatctgtggtacgaacggtttcatcttctttgatgccatcacccagatgttctataaacttggtatcctcgtccgatttcatatcctttgccaaccaatacatatagctaaactcaggcatatgttccacacatcctgaacaatgaaattctccagaagatgttacaatgtctagatttggacatttggtttcaaccgcgttaacatatgagtgaacacacccatacatgaaagcgatgagaaataggattttcatcttgccaaaatatcactagaaaaaatttatttatcaattttaaaggtataaaaaatacttattgttgctcgaatattttgtatttgatggtatacggaagattagaaatgtaggtattatcatcaactgattctatggttttatgtattctatcatgtttcactattgcgttggaaataatatcatatgcttccacatatattttattttgttttaactcataatactcacgtaattctggattattggcatatctgtgaataattttagctccatgatcagtaaatattaatgagaacatagtattaccacctaccattatttttttcatttcgttcaattcttgattgcaaagatctatataatcattatagcgttgacttatggactctggaatcttagacgatgtacagtcatctataatcatggcatatttaatacattgttttatagcatagtagttatctacgatgttagatatttctctcaatgaatcaatcacacaatctaatgtaggtttatgacataatagcattttcagcagttcaatgtttctagattcgttgatggcaatggctatacatgtatatccgttatttgatctaatgttgacatctgaaccggattctagcagtaaagatactagagattgtttattatatctaacagccttgtgaagaagtgtttctcctcgtttgtcaatcatgttaatgtctttaagataaggtaggcaaatgtttatagtactaagaattgggcaagcataagacatgtcacaaagaccctttttgtatgtataagtgtagaaattataacatccatagttggatttacataggtgtccaatcgggatctctccatcatcgagatgattgacggcatctcccccttccttttttagtagatatttcatcgtgtaagaatcaatattaatatttctaaagtatccgtgtatagcctctttatttaccacagctccatattccaacatgcattccactaaagggatatcgatatcgccgaatgtcatatactcaattagtatatgttggaggacatccgagttcattgttttcaatatcaaagagatggtttccttatcatttctccatagtggtacaatactacacattattccgtgaggctttccattctccaaaaacaatttgaccaaatctacatctttattgtatctataatcactatttagataatcagccataattcctcgagtgcaacatgttagatcgtctatatatgaataagccgtgttatctattcctttcattaacaatttaacgatgtctatatctatatgagatgacttaatataatattgaagagctgtacaatagtttttatctatagaagacggcttgattccgtgattaattagacatttaacaacttccggacgcacatatgctctcgtatccgactctgaatacagatgagagatgatatacagatgcaatacggtaccgcaatttcgtagttgataatcatcatacgcgtatccgtactcgtcctcataaagaacactgcagccattttctatgaacaaatcaataattttaggaacaggatcattgccattacataattttctataactgaacgatggttttcacatttaacactcaagtcaaatccatgttctaccaacacctttatcaagtcaacgtctacatttttggatttcatatagctgaatatattaaagtcatttatgttgctaaatccagtggcttctagtagagccatcgctatatcctttaactttaacatgtctactatttgtgtattcttctaatggggtagctgtctccaatttttgcgtaatggattagtgccactgtctagtagtagtttgacgacctcgacattattacaatgctcattaaaaaggtatgcgtgtaaagcattattcttgaattggttcctggtatcattaggatctctgtctctcaacatctgtttaagttcatcgagagccacctcctcattttccaaatagtcaaacattttgactgaatagaagtgaatgagctactgtgaactctatacacccacacaactaatgtcattaaatattatttttttgaatgtatttataccatgtcaaaaacttgtacaattattaataaaaataatttagtgtttaaattttaccagttccagattttacacctccgttaaccccactttttacaccactggacgaccctcctccccacattccaccgccaccagatgtataagttttagatcctttattactaccatcatgtccatggataaagacactccacatgccgccactaccccctttagaagacatattaataagacttaagagttaaggacaagtttaacaataaaattaatcacgagtaccctactaccaacctacactattatatgattatagtttctatttttacagtaccttaactaaagtttctagtcacaagagcaatactaccaacctacactattatatgattatagtttctatttttataggaacgcgtacgagaaaatcaaatgtctaatttctaacggtagtgttgataaacgattatcgtcaatggatacctcctctatcatgtcgtctattttcttactttgttctattaacttattagcattatatattatttgattataaaacttatattgcttattagcccaatctgtaaatatcggattattaacatatcgtttctttgtaggtttatttaacttgtacatcactgtaagcatgtccgtaccatttattttaatttgacgcatatccgcaatttctttttcgcagtcggttataaattctatatatgatggatacatgctacatgtgtacttataatcgactaatatgaagtacttgatacatattttcagtaacgatttattattaccacctatgaataagtacctgtgatcgtctaggtaatcaactgttttcttaatacattcgatggttggtaatttactcagaataatttccaatatcttaatatataattctgctatttctggaatatatttatctgccagtataacacaaatagtaatacatgtaaacccatattttgttattatattaatgtctgcgccattatctattaaccattctactaggctgacactatgcgacttaatacaatgataaagtatactacatccatgtttatctattttgtttatatcatcaatatacggcttacaaagttttagtatcgataacacatccaactcacgcatagagaaggtagggaataatggcataatatttattaggttatcatcattgtcattatctacaactaagtttccattttttaaaatatactcgacaactttaggatctctattgccaaatttttgaaaatatttatttatatgcttaaatctatataatgtagctccttcatcaatcatacatttaataacattgatgtatactgtatgataagatacatattctaacaatagatcttgtatagaatctgtatatcttttaagaattgtggatattaggatattattacgtaaactattacacaattctaaaatataaaacgtatcacggtcgaataatagttgatcaactatataattatcgattttgtgatttttcttcctaaactgtttacgtaaatagttagatagaatattcattagttcatgaccactatagttactatcgaataacgcgtcaaatatttcccgtttaatatcgcatttgtcaagataataatagagtgtggtatgttcacgataagtataataacgcatctctttttcgtgtgaaattaaatagtttatcacgtccaaagatgtagcataaccatcttgtgacctagtaataatataataatagagaactgttttacccattctatcatcataatcagtggtgtagtcgtaatcgtaatcgtctaattcatcatcccaattataatattcaccagcacgtctaatctgttctattttgatcttgtatccatactgtatgttgctacatgtaggtattcctttatccaataatagtttaaacacatctacattgggatttgatgttgtagcgtatttctctacaatattaataccatttttgatactatttatttctatacctttcgaaattagtaatttcaataagtctatatcgatgttatcagaacatagatattcgaatatatcaaaatcattgatatttttatagtcgactgacgacaataacaaaatcacaacatcgtttttgatattattatttttcttggtaacgtatgcctttaatggagtttcaccatcatactcatataatggatttgcaccactttctatcaatgattgtgcactgctggcatcgatgttaaatgttttacaactatcatagagtatcttatcgttaaccatgattggttgttgatgctatcgcattttttggtttctttcatttcagttatgtatggatttagcacgtttgggaagcataagctcatatgatttcagtactgtagtgtcagtactattagtttcgatcagatcaatgtctagatctatagaatcaaaacacgataggtcagaagataatgaatatctgtaggcttcttgttgtactgtaacttctcgttttgttagatggttgcatcgtgctttaacatcaatggtacaaattttatcctcgctttgtgtatcatattcgtccctactataaaattgtatattcagattatcatgagatgtgtatacgctaacggtatcaataaacggagcacaccatttagtcataaccgtaatccaaaaatttttaaagtatatcttaacgaaagaagttgtgtcattgtctacggtgtatggtactagatcctcataagtgtatatatctagagtaatgtttaatttatcaaatggttgataatatggatcctcatggcaatttcctaagacgaaaataagacataaacacgcaataaatctaattgcggacatggttactccttaaaaaaatactaataatcaccttggctatttagtaagtgtcatttaacactatactcatattaatccatggactcataatctctatacgggattaacggatgttctatatacggggatgagtagttctcttctttaactttatactttttactaatcatatttagactgatgtatgggtaatagtgtttgaagagctcgttctcatcatcagaataaatcaatatctctgtttttttgttatacagatgtattacagcctcatatattacgtaatagaacgtgtcatctaccttattaactttcaccgcatagttgtttgcaaatacggttaatcctttgacctcgtcgatttccgaccaatctgggcgtataatgaatctaaactttaatttcttgtaatcattcgaaataatttttagtttgcatccgtagttatcccctttatgtaactgtaaatttctcaacgcgatatctccattaataatgatgtcgaattcgtgctgtatacccatactgaatggatgaacgaataccgacggcgttaatagtaatttactttttcatctttacatattgggtactagttttactatcataagtttataaattccacaagctactatggaataagccaaccatcttagtataacacacatgtcttaaagtttattaattaattacatgttgttttatatatcgctacgaatttaaacagagaaatcagtttaggaaaaaaaattatctatctacatcatcacgtctctgtattctacgatagagtgctactttaagatgagacatatccgtgtcatcaaaaatatactccattaaaatgattattccggcagcgaacttgatattggatatatcacaacctttgttaatatctacgacaatagacagcagtcccatggttccataaacagtgagtttatctttctttgaagagatattttgtagagatcttataaaactgtcgaatgacatcgcatttatatctttagctaaatcgtatatgttaccatcgtaatatctaaccgcgtctatcttaaacgtttccatcgctttaaagacgtttccgatagatggtctcatttcatcagtcatactgagccaacaaatataatcgtgtataacatctttgatagaatcagactctaaagaaaacgaatcggctttattatacgcattcatgataaacttaatgaaaaatgtttttcgttgtttaagttggatgaatagtatgtcttaataattgttattatttcattaattaatatttagtaacgagtacactctataaaaacgagaatgacataactaatcataactagttatcaaagtgtctaggacgcgtaattttcatatggtatagatcctgtaagcattgtctgtattctggagctattttctctatcgcattagtgagttcagaatatgttataaatttaaatcgaataacgaacataactttagtaaagtcgtctatattaactcttttattttctagccatcgtaataccatgtttaagatagtatattctctagttactacgatctcatcgttgtctagaatatcacatactgaatctacatccaattttagaaattggtctgtgttacatatctcttctatattattgttgatgtattgtcgtagaaaactattacgtagaccattttctttataaaacgaatatatagtactccaattatctttaccgatatatttgcacacataatccattctctcaatcactacatctttaagattttcgttgttaagatatttggctaaactatataattctattagatcatcaacagaatcagtatatatttttctagatccaaagacgaactctttggcgtcctctataatattcccagaaaagatattttcgtgttttagtttatcgagatctgatctgttcatatacgccatgattgtacggtacgttatgataaccgcataaaataaaaatccattttcatttttaaccaatactattcataattgagattgatgtaatactttgttactttgaacgtaaagacagtacacggatccgtatctccaacaagcacgtagtaatcaaatttggtgttgttaaacttcgcaatatttatcaatttagatagaaacttatactcatcatctgttttaggaatccatgtattattaccactttccaacttatcattatcccaggctatgtttcgtccatcatcgttgcgcagagtgaataattcttttgtattcggtagttcaaatatataatccatgcatagatcggtaaagctattgtagatgtgatttttcctaaatctaatataaaactcgtttactagcaaacactttcctgatttatcgaccaagacacatatggtttctaaatctatcaagtggtggggatccatagttatgacgcagtaacatagattattaccttcttaactgtcgctaatatctatatatttattgttatcgtattggattctgcatatagatggcttgtatgtcaaagatatagaacacataaccaatttatagtcgcgctttacattctcgaatctaaagttaagagatttagaaaacattatatcctcggatgatgttatcactgtttctggagtaggatatattaaagtctttacagatttcgtccgattcaaataaatcactaaataatatcccacattatcatctgttagagtagtatcattaaatctattatattttatgaaagatatatcactgctcacctctatatttcgtacatttttaaactgtttgtataatatctctctgatacaatcagatatatctattgtgtcggtagacgataccgttacatttgaattaatggtgttccattttacaacttttaacaagttgaccaattcatttctaatagtatcaaacgctccatgattaaatattttaatagtatccattttatatcactacggacacaaagtagctgacataaaccattgtataatttttatgttttatgtttattagcgtacacattttggaagttccggcttccatgtatttcctggagagcaagtagatgatgaggaaccagataggttatatccgtacttgcacttaaagtttacattgtcgttgtatgagtatgatcttttaaacccgctagacaagtatccgtttgatattgtaggatgtggacatttaacaatctgacacgtgggtggatcggaccattctcctcctgaacacaggacaccagagttaccaatcaacgaatatccactattgcaactataagttacaacgcttccatcggtataaaaatcctcgtatccgttatgtcttccgttggatatagatggaggggattggcatttaacagattcacaaataggtgcctcgggattccataccatagatccagtagatcctaattcacaatacgatttagattcaccgatcaaatgatatccgctattacaagagtacgttatactagagccaaagtctactccgccaatatcaagttggccattatcgatatctcgaggcgatgggcatctccgtttaatacattgattaaagagtgtccatccagtacctgtacatttagcatatataggtcccattttttgctttctgtatccaggtagacatagatattctatagtgtctcctatgttgtaattagcattagcatcagtctccacactattcttaaatttcatattaatgggtcgtgacggaatagtacagcatgatagaacgcatcctattcccaacaatgtcaggaacgtcacgctctccaccttcatatttatttatccgtaaaaatgttatcctggacatcgtacaaataataaaaagcccatatatgttcgctattgtagaaattgtttttcacagttgctcaaaaacgatggcagtgacttatgagttacgttacactttggagtctcatctttagtaaacatatcataatattcgatattacgagttgacatatcgaacaaattccaagtatttgattttggataatattcgtattttgcatctgctataattaagatataatcaccgcaagaacacacgaacatctttcctacatggttaaagtacatgtacaattctatccatttgtcttccttaactatatatttgtatagataattacgagtctcgtgagtaattccagtaattacatagatgtcgccgtcgtactctacagcataaactatactatgatgtctaggcatgggagacttttttatccaacgatttttagtgaaacattccacatcgtttaatactacatatttttcatacgtggtataaactccacccattacatatatatcatcgtttacgaataccgacgcgcctgaatatctaggagtaattaagtttggaagtcttatccatttcgaagtgccgtgtttcaaatattctgccacacccgttgaaatagaaaattctaatcctcctattacatataactttccattgttaacacaagtactaacttctgattttaacgacgacatattagtaaccgttttccattttttcgtttcaagatctacccgcgatacggaataaacatgtctattgttaatcatgccgccaataatgtatagacaattatgtaaaacatttgcattatagaattgtctatctgtattaccgactatcgtccaatattctgttctaggagagtaatgggttattgtggatatataatcagagtttttaatgactactatattatgttttataccatttcgtgtcactggctttgtagatttggatatagttaatcccaacaatgatatagcattgcgcatagtattagtcataaacttgggatgtaaaatgttgatgatatctacatcgtttggatttttatgtatccactttaataatatcatagctgtaacatcctcatgatttacgttaacgtcttcgtgggataagatagttgtcagttcatcctttgataattttccaaattctggatcggatgtcaccgcagtaatattgttgattatttctgacatcgacgcattatatagttttttaattccatatcttttagaaaagttaaacatccttatacaatttgtggaattaatattatgaatcatagtttttacacatagatctactacaggcggaacatcaattattatggcagcaactagtatcatttctacattgtttatggtgatgtttatcttcttccagcgcatatagtctaatagcgattcaaacgcgtgatagtttataccattcaatataatcgcttcatcctttagatggtgatcctgaatgcgtttaaaaaaattatacggagatgccgtaataatttccttattcacttgtataatttccccattgatagaaaatatcacgctttccattcttgaagtactataagtaattatagtataatgtaaaggtttatatattcaatattttttataaaaaaatcatttcgacattaattcctttttaaatttccgtctatcatctatagaaacatattctatgaatttataaaatgcttttacgtgtcctatcgtaggcgatagaaccgctaaaaagcctattgaatttctacaaaagaatctattatatggtatagggagagtataaaacattaaatgcccgtacttattaaagtattcagtagccaatcctaactctttcgaatacttattaatggctcttgttctgtacgaatctatttttttgaacaacggacctagtggtatatcttgttctatgtatctaaaataatgtctgactagatccgttagtttaatatcctcagtcatcttgtctagaatggcaaatctaactgcgggtttaggctttagtttagtttttatatctacatctatgtctttatctaacaccaaaaatataatagctaatattttattacaatcatccggatattcttctacgatctcactaactaatgtttctttggttatactagtatagtcactatcggacaaataaagaaaatcagatgatcgatgaataatacatttaaattcatcatctgtaagatttttgagatgtctcattaaaatattattagggtcagtactcattatcattaggcagctattacttattttattatttttcaccatatagatcaatcattagatcatcaaaatatgtttcaatcatcctaaagagtatggtgaatgactcttcccatctaatttctgaacgttcaccaatgtctctagccactttggcactaatagcgatcattcgcttagcgtcttctatattattaactggttgattcaatctatctagcaatggaccgtcggacagcgtcattctcatgttcttaatcaatgtacatacatcgccgtcatctaccaattcatccaacaacataagctttttaaaatcatcattataataggtttgatcgttgtcatttctccaaagaatatatctaataagtagagtcctcatgcttagtaatttaactattttagttaacaactattttttatgttaaatcaattagtacaccgctatgtttaatacttattcatattttagtttttaggattgagaatcaatacaaaaattaatgcatcattaattttagaaatacttagtttccacgtagttaatgaaacatttgaactcatcgtacaagacgttctcgtacaggacgtaactataaaccggtttatatttgttcaagatagatacaaatccgataactttttttacgaattctacgggatccactttaaaagtgtcataccgggttctttttatttttttaaacagatcaatggtgtgatgttgattaggtcttttacgaatttgatatagaatagcgtttacatattctccataatggtcaatcgccatttgttcgtatgtcataaattctttaattatatgacactgtgtattgtttagttcatccttgttcattgttaggaatctatccaaaatggcaattatactagaactataggtgcgttgtatacacatattgatgtgtctgtttatacaatccatgatatttggatccatgctactaccttcgggtaaaattgtagcatcatataccatttctagtactttaggttcattattatccattgcagaggacgtcatgatcgcatcctaaaaaaatatattatttttatgttattttgttaaaaataatcatcgaatacttcgtaagatactccttcatgaacataatcagttacaaaacgtttatatgaagtaaagtatctacgatttttacaaaagtccggatgcataagtacaaagtacgcgataaacggaataataatagatttatctagtctatctttttctatagctttcatagttagatacatggtctcagaagtaggattatgtaacatcagcttcgataaaatgactgggttatttagtcttacacattcgctcatacatgtatgaccgttaactacagagtctacactaaaatgattgaacaatagatagtctaccattgtttcgtattcagatagtacagcgtagtacatggcatcttcacaaattatatcattgtctaatagatatttgacgcatcttatggatcccacttcaacagccatcttaaaatcggtaaaatcatattgctttcctttatcattaataatttctaaaacatcatctctatcataaaagatacaaatattaactgtttgatccgtaataacattgctagtcgatagcaatttgttaataagatgcgctgggctcaatgtcttaataagaagtgtaagaggactatctccgaatttgttttgtttattaacatccgttgatggaagtaaaagatctataatgtctacattcttgactgttttagagcatacaatatggagaggtgtatttccatcatgatctggttttgagggactaattcctagtttcatcatccatgagattgtagaagcttttggattgtctgacataagatgtctatgaatatgatttttgccaaatttatccactatcctggcttcgaatccgatggacattatttttttaaacactctttctgaaggatctgtacacgccaacaacggaccacatccttcttcatcaaccgagttgttaatcttggctccatactgtaccaataaatttattctctctatgacttcatcatctgttcccgagagataatatagaggcgttttatgctgtttatcacacgcgtttggatctgcgccgtgcgtcagcagcatcgcgactattctattattattaattttagaagctatatgcaatggataatttccatcatcatccgtctcatttggagagtatcctctatgaagaagttcttcgacaaatcgttcatctagtcctttaattccacaatacgcatgtagaatgtgataattatttccagaaggttcgatagcttgtagcatattcctaaatacatctaaatttttactattatatttggcataaagagatagataatactcggccgacataatgttgtccattgtagtataaaaattaatatttctatttctatttctgtatatttgcaacaatttactctctataacaaatatcataacttagttcttttatgtcaagaaggcactggtttagttcatctataaatgtcacgccataactaccacgcatgctatactcagaattatgataaagatatttatccttggggtgtaggtaatggggattaatctttgttggatcagtctctaagttaacacatgtcacacatgatccatttatagttatatcacacgatgatgatttatgaattgattccggaagatcgctatcgtattttgtggttccacaattcatttccatacatgttattgtcacactaatattatgatgaactttatctagccgctgagtggtaaacaacagaacagatagtttattatctttaccaacaccctcagccgctgccacaaatctctgatccgtatccatgatggtcatgtttatttctagtccgtatccagtcaacactatgttagcatttctgtcgatatagctttcactcatatgacactcaccaataatagtagaattaatgtcgtaatttacaccaatagtgagttcggcggcaaagtaccaataccggtaatcttgtcgaggaggacatatagtattcttgtattctaccgaatacccgagagatgcgatacaaaagagcaagactaatttgtaaaccatcttactcaaaatatgtaacaatagtacgatgcaatgagtaagacaataggaaatctatcttatatacacataattattctatcaattttaccaattagttagtgtaatgttaacaaaaatgtgggagaatctaattagtttttctttacacaattgacgtacatgagtctgagttccttgtttttgctaattatttcatccaatttattattcttgactatatcgagatcttttgtataggagtcagacttgtattcaacatgcttttctataatcattttagctatttcggcatcatccaatagtacattttccagattagcagaatagatattaatgtcgtatttgaacagagcctgtaacatctcaatgtctttattatctatagccaatttaatgtccggaatgaagagaagggaattattggtgtttgtcgacgtcatatagtcgagcaagagaatcatcatatccacgtgtccattttttatagtggtgtgaatacaactaaggagaatagccagatcaaaagtagatggtatttctgaaagaaagtatgatacaatacttacatcattaagcatgacggcatgataaaatgaagttttccatccagttttcccatagaacatcagtctccaatttttcttaacaaacagttttaccgtttgcatgttaccactatcaaccgcataatacaatgcagtgtttcccttgtcatcaaattgtgaatcatccagtccactgaatagcaaaatctttactattttggtatcttccaatgtggctgcctgatgtaatggaaattcattctctagaagatttttcaatgctccagcgttcaacaacgtacatactagacgcacgttattatcagctattgcataatacaaggcactatgtccatggacatccgccttaaatgtatctttactagagagaaagcttttcagctgcttagacttccaagtattaattcgtgacagatccatgtctgaaacgagacgctaattagtgtatattttttcattttttataattttgtcatattgcaccagaattaataatatctctaatagatctgattagtagatacatggctatcgcaaaacaacatatacacatttaataaaaataatatttattaagaaaattcagatttcacgtacccatcaatataaataaaataatgattccttacaccgtacccatattaaggagattccaccttacccataaacaatataaatccagtaatatcatgtctaatgatgaacacaaatggtgtattaaattccagtttttcaggagatgatctcgccgtagctaccataatagtagatgcctctgctacagttccttgttcgtcgacatctatctttgcattctgaaacattttataaatatataatgggtccctagtcatatgtttaaacgacgcattatctggattaaacatactaggagccatcatttcggctatcgacttaatatccctcttattttcgatagaaaatttagggagtttaagattgtacactttattccctaattgaaacgaccaatagtctaattttgcagccgtaatagaatctgtgaaatgggtcatattatcacctattgccaggtacatactaatattagcatccttatacggaaggcgtaccatgtcatattctttgtcatcgattgtgattgtatttccttgcaatttagtaactacgttcatcatgggaaccgttttcgtaccgtacttattagtaaaactagcattgcgtgttttagtgatatcaaacggatattgccatgtacctttaaaatatatagtattaatgattgcccatagagtattattgtcgagcatattagaatctactacattagacataccggatctacgttctactatagaattaattttattaaccgcatctcgtctaaagtttaatctatataggccgaatctatgatattgttgataatacgacggtttaatacacacagtattatctacgaaactttgataagttagatcagtgtacgtatatttagatgttttcagcttagctaatcctgatattaattctgtaaatgctggacccagatctctttttctcaaatccatagtcttcaataattctattctagtattacctgatgcaggcaatagcgacataaacatagaaaacgaatagccaaacggcgagaagacaatattatcatcttgaatatttttatacgctactataccggcattggtaaatccttgcagacgataggtagacgctgaacacgttaacgatagtatcaataacgcaatcatgattttatggtattaataattaaccttatttttatgttcggtataaaaaaattattgatgtctacacatccttttgtaattgacatctatatatccttttgtataatcaactctaatcactttaacttttacagttttccctaccagtttatccctatattcaacatatctatccatatgcatcttaacactctctgccaagatagcttcagagtgaggatagtcaaaaagataaatatatagagcataatccttctcgtatactctgccctttattacatcgcccgcattgggcaacgaataacaaaatgcaagcatcttgttaacgggctcgtaaattgggataaaaattatgtttttatatctattttattcaagagaatattcaggaatttctttttccggttgtatctcgtcgcagtatatatcatttgtacattgtttcatattttttaatagtttacaccttttagtaggactagtatcgtacaattcatagctgtattttgaattccaatcacgcataaaaatatcttccaattgttgacgaagacctaatccatcatccggtgtaatattaatagatgctccacatgtatccgtaaagtaatttcctgtccaatttgaggtacctatataggccgttttatcggttaccatatatttggcatggtttaccctagaatacggaatgggaggatcagcatctggtacaataaatagctttacttctatatctatgtttttagattttagcatagcgatagatcttaaaaagtttctcatgataaacgaagatcgttgccagcaactaatcaatagcttaacggatacttgtctgtctatagcggatcttcttaattcatcttctatataaggccaaaacaaaattttacccgccttcgaataaataatagggataaagttcataacagatacataaacgaatttactcgcatttctaatacatgacaataaagcggttaaatcattggttctttccatagtacatagttgttgcggcgcagaagcaataaatacagagtgtggaacaccacttacgttaatactaagaggatgatctgtattataatacgacggataaaagtttttccaattatatggtagattgttaactccaagataccagtatacctcaaaaatttgagtgagatccgctgccaagttcctattattgaagatcgcaatacccaattctttgacctgagttagtgatctccaatccatgttagcgcttcctaaataaatatgtgtattatcagatatccaaaattttgtatgaagaactcctcctaggatatttgtaatatctatgtatcgtacttcaactccggccatttgtagtctttcaacatcctttaatggtttgttagatttattgacggctactctaactcttactcctcttttgggtaattgtacaatctcgtttaatattatcgtgccgaaattcgtacccacttcatccgataaactccaataaaaagatgatatatctagtgtttttgtggtattggatagaatttccctccacatgttaaatgtagacaaatatactttatcaaattgcatacctataggaatagtctctgtaatcactgcgattgtattatccggattcattttatttgttaaaaaataatcctatatcacttcactctattaaaaatccaagtttctatttctttcatgactgattttttaacttcatccgtttccttatgaagatgatgtttggcaccttcataaatttttatttctctattacaatttgcatgttgcatgaaataatatgcacctaaaacatcgctaatctcattgtttgttccctggagtatgagagtcggggggtgttaatcttggaaattatttttctaaccttgttggtagccttcaagacctgactagcaaatccagccttaattttttcatgattgattaatgggtcgtattggtatttataaactttatccatatctctagatactgattctggacatagctttccgactggcgcatttggtgtgatggttcccataagtttggcagctagcagattcagttttgaaacagcatctgcattaactagaggagacattagaatcattgctgtaaacaagtttggattatcgtaagaggctagtatagaaattgttgctcccatggaatgacccaataagtagatttaatagttaccacgtgctgtaccaaagtcatcaatcatcattttttcaccattacttcttccatgtccaatatgatcatgtgagaatactaaaattcctaacgatgatatgttttcagctagttcgtcataacgtccagaatgtttaccagctccatgacttatgaatactaatgccttaggatatgtaataggtttccaatatttacaatatatgtaatcattgtccagattgaacatacagtttgcactcatgattcacgttatataactatcaatattaacagttcgtttgatgatcatattatttttatgttttattgataattgtaaaaacatacaattaaatcaatatagaggaaggagacggatactgtcttttgtgagatagtcatggcgactaaatcagattatgaggatgctgttttttactttgtggatgatgataaaatatgtagtcgcgactccatcatcgatctaatagatgaatatatcacgtggagaaatcatgttatagtgtttaacaaagatattaccagttgtggaagactgtacaaggaattgatgaagttcgatgatgccgctatacagtactatggtattgataaaattaatgagattgtcgaagctatgagcgaaggagaccactacatcaattttacaaaagtccatgatcaggaaagtttattcgctaccataggaatatgtgctaaaatcactgaacattggggatacaaaaagatttcagaatctagattccaatcattgggaaacattacagatctgatgaccgacgataatataaacatcttgatactttttctagaaaaaaaattgaattgatgatataggggtcttcataacgcataattattacgttagcattctatatccgtgttaaaaaaaattatcctatcatgtatttgagagttttatatgtagcaaacatgatagctgtgatgccaataagctttagatattcacgcgtgctagtgttagggatggtattatctggtggtgaaatgtccgttatataatctacaaaacaatcatcgcatatagtatgcgatagtagagtaaacatttttatcgtttctactgggttcatacatcgtctacccaattcggttatgaatgaaattgtcgccaatcttacacccaaacccttgttatccattagcatagtattaacttcgttatttatgtcataaactgtaaatgattctgtagatgccatatcatacatgatattcatgtccctattataatcattactaactttatcacaatatatgttgataatatctatatatgatctagtctttgtgggcaactgtctatacaagtcgtctaaacgttgtttactcatatagtatcgaacagccatcattacatggtcccgttccgttgatagataatcgagtatgttagtggacttgtcaaatctatataccatattttctggaagtggatatacatagtcgtgatcaacattattgctagcctcatcttctatatcctgtactataccattatctatatcatctacataatctacgatattattatacataaacatcgacaacatactattgtcaattatctaagtcctgttgatccaaacccttgatctcctctatctgtactatctagagattgtacttcttccagttctggataatatatacgttgatagattagctgggctattctatcccccgtatttacattaaacgtacattttccattattaataagaataactcctatgtttcccctataatcttcgtctattacaccgcctcctatatcaatgccttttagggacagaccagacctaggagctattctaccatagcagaacttaggcatggacatactaatatctgtcttaattaactgtcgttctccaggagggatagtataatcgtaagcgctatataaatcatatccggcggcgtaaggtgattgcctagtaggagatttagctctgttagtttccttaacaaatctaactggtgagttaatattcatgttgaacataaaactaatattttatttcaaaattatttaccatcccatatattccatgaataagtgtgatgattgtacacttctatagtatctatatacgattcacgataaaatcctcctatcaatagcagtttattatccactatgatcaattctggattatccctcggataaataggatcatctatcagagtccatgtattgctggattcacaataaaattccgcatttctaccaaccaagaataaccttctaccgaacactaacgcgcatgatttataatgaggataataagtggatggtccaaactgccactgatcatgattgggtagcaaatattctgtagttgtatcagtttcagaatgtcctcccattacgtatataacattgtttatagatgccactgctggattacatctaggtttcagaagactcggcatattaacccaagcagcatccccgtggaaccaacgctcaacagatgtgggatttggtagacctcctactacgtataatttattgttagcgggtatcccgctagcatacagtctggggctattcatcggaggaattggaatccaattgtttgatatataatttacagctatagcattgttatgtatttcattgttcatccatccaccgatgagatatactacttctccaacatgagtacttgtacacatatggaatatatctataatttgatccatgttcataggatactctatgaatggatacttgtatgatttgcgtggttgtttatcacaatgaaatattttggtacagtctagtatccattttacattatttatacctctgggagaaagataatttgacctgattacatttttgataaggagtagcagatttcctaatttatttcttcgctttatataccacttaatgacaaaatcaactacataatcctcatctggaacatttagttcatcgctttctagaataagtttcatagatagataatcaaaattgtctatgatgtcatcttccagttccaaaaagtgtttggcaataaagtttttagtatgacataagagattggatagtccgtattctatacccatcatgtaacactcgacacaatattcctttctaaaatctcgtaagataaagtttatacaagtgtagatgataaattctacagaggttaatatagaagcacgtaataaattgacgacgttatgactatctatatatacctttccagtatatgagtaaataactatagaagttaaactgtgaatgtcaaggtctagacaaacccttgtaactggatctttatttttcgtgtatttttgacgtaaatgtgtgcgaaagtaaggagataactttttcaatatcgtagaattgactattatattgccacctatagcatcaataattgttttgaatttcttagtcatagacaatgctaatatattcttacagtacacagtattaacaaatatcggcatttatgtttctttaaaagtcaacatctagagaaaaatgattatctttttgagacataactcccattttttggtattcacccacacgtttttcgaaaaaattagtttttccttccaatgatatattttccatgaaatcaaacggattggtaacattataaatttttttaaatcccaattcagaaatcaatctatccgcgacgaattctatatatgttttcatcatttcacaattcattcctataagtttaactggaagagccgcagtaagaaattcttgttcaatggatactgcatctgttataatagatctaacggtttcttcactcggtggatacaataaatgtttaaacatcaaacatgcgaagtcgcagtgtagaccctcgtctctactaattagttcgttggaaaacgtgagtccgggcattaggccacgctttttaagccaaaatatggaagcgaatgatccggaaaagaagattccttctactgcagcaaaggcaataagtctctctccataaccggcgctgtcatgtatccacttttgagcccaatcggccttcttttttacacaaggcattgtttctatggcattaaagagatagtttttttcattactatctttaacataagtatcgatcaaaagactatacatttccgaatgaatgttttcaatggccatctgaaatccgtagaaacatctagcctcggtaatctgtacttctgtacaaaatcgttccgccaaattttcattcactattccgtcactggctgcaaaaaacgccaatacatgttttataaaatatttttcgtctggtgttagtttattccaatcattgatatctttagatatatctacttcttccactgtccaaaatgatgcctctgcctttttatacatgttccagatgtcatgatattggattgggaaaataacaaatctatttggatttggtgcaaggatgggttccataactaaattaacaatatcaataaattttttttcagttatctatatgcctgtacttggattttttgtacatcgatatcgccgcaatcactacaataattacaagtattattgatagcattgttattagtactatcataattaaattatcgacattcatgggtgctgaataatcgttattatcatcattatcattttgtaattgtgacatcatactaaataaatcgtttgcgagattgttgtgggaagcgggcatggaggatgcattatcattattatttaacgccttccatttggattcacaaatatggcgcgcgttcaacattttatggaaactataattttgtgaaaacagataacaagaaaactcgtcatcgttcaaatttttaacgatagtaaaccgattaaacgtcgagctaatttctaacgctagcgactctgttggatatgggtttccagatatatatcttttcagttcccctacgtatctataatcatctgtaggaaatggaagatatttccatttatctactgttcctaatatcatatgtggtggtgtagtagaaccattaagcgcgaaagatgttatttcgcatcgtattttaacttcgcaataatttctggttagataacgcactctaccagtcaagtcaatgatattagcctttacagatatattcatagtagtcgtaacgatgactccatcttttagatgcgatactcctttgtatgtaccagaatcttcgtacctcaaactcgatatatttaaacaagttaatgagatattaacgcgttttatgaatgatgatatataaccagaagttttatcctcggtggctagcgctataaccttatcattataataccaactagtgtgattaatatgtgacacgtcagtgtgggtacaaatatgtacattatcgtctacgtcgtattcgatacatccgcatacagccaacaaatataaaatgacaaatactctaacgccgttcgtacccatcttgatgcggtttaataaatgttttgatttcaatttattgtaaaaaaagattcggttttatactgttcgatattctcattgcttatattctcatctatcatctccacacagtcaaatccgtggttagcatgcacctcatcaaccggtaaaagactatcggactcttctatcattataactctagaatatttaatttggtcattattaatcaagtcaattatcttatttttaacaaacgtgagtattttactcattttttataaaaacttttagaaatatacagactctatcgtgtgtctatatcttctttttatatccaatgtatttatgtctgatttttcttcatttatcatatataatggtccaaattctacacgtgcttcggattcatccagatcattaaggttcttataattgtaacatccttctcttccctcttctacatcttccttcttattcttattcttagcgtcacagaatctaccacagcaggatcccatgacgagcgtcatattaaactaatccattttcaattataatatatgattagtaatgaccattaaaataaaaaatattcttcataaccggcaagaaagtgaaaagttcacattgaaactatgtcagtagtatacatcatgaaatgatgatatatatatactctattttggtggaggattatatgatataattcgtggataatcattcttaagacacatttcttcattcgtaaatcttttcacgttaaatgagtgtccatattttgcaatttcttcatatgatggcggtgtacgtggacgaggctgctcctgttcttgttgtggtcgccgactgtcgtgtttgcgtttatccctccattatcgcgattgcgtagatggagtactattatataccttgtaattaaatttttttattaattaaacgtataaaaacgttccgtatctgtatttaagagccagatttcgtctaatagaacaaatagctacagtaaaaataactagaataattgctacacccactagaaaccacggatcgtaatacggcaatcggttttcgataataggtggaacgtatattttatttaaggacttaacaattgtctgtaaaccacaatttgcttccgcggatcctgtattaactatctgtaaaagcatatgttggccgggcggagccgaacattctccgatatccaatttctgtatatctataatattattaacctccgcatacgcattacagttcttttctagcttggataccgcactaggtacatcgtctagatctattcctatttcctcagcgatagctcttctatccttttccggaagcaatgaaatcacttcaataaatgattcaaccatgagtgtgaaactaagtcgagaattactcatgcatttgttagttattcggagcgcgcaatttttaaactgtcctataacctctcctatatgaatagcacaagtgacattagtagggatagaatgttgagctaatttttgtaaataactatctataaaaagattatacaaagttttaaactctttagtttccgccatttatccagtctgagaaaatgtctctcataataaatttttccaagaaactaattgggtgaagaatggaaacctttaatctatatttatcacagtctgttttggtacacatgatgaattcttctaatgccgtactaaattcgatatctttttcgatttctggatatgtttttaataaagtatgaacaaagaaatggaaatcgtaataccagttatgtttaactttgaaattgttttttattttcttgttaatgattccagccacttgggaaaagtcaaagtcgtttaatgccgatttaatacgttcattaaaaacaaactttttatcctttagatgaattattattggttcattggaatcaaaaagtaagatattatcgggtttaagatctgcgtgtaaaaagttgtcgcagcatggtagttcgtagattttaatgtataacagagccatctgtaaaaagataaactttatgtattgtaccaaagatttaaatcctaatttgatagctaactcggtatctactttatctgccgaatacagtgctaggggaaaaattataatgtttcctctttcgtattcgtagttagttctcttttcatgttcgaaaaagtgaaacatgcggttaaaatagtttataacattaatattactgttaataactgccgggtaaaagtgggatagtaatttcacgaatttgatactgtcctttctctcgttaaacgcctttagaaaaactttagaagaatatctcaatgatagttcctgaccatccatagtttgtatcaataatagcaacatatgaagaacacgtttatacagagtatgtaaaaatgttaatttatagtttaatcccatggcccacgcacacacgattaattttttttcatctccctttagattgttgtatagaaatttgggtactgtgaactccgccgtagtttccatgggactatataattttgtggcctcgaatacaaattttactacatagttatctatcttaaaaactataccatatcctcctgtagatatgtgataaaaatcgtcgtttataggataaaatcgtttatccttttgttggaaaaaggatgaattaatgtaatcattctcttctatctttagtagtgtttccttattaaaattcttaaaataatttaacaatctaactgacggagcccaattttggtgtaaatctaattgggacattatattgttaaaatacaaacagtctcctaatataacagtatctgataatctatggggagacatccattgatattcaggggatgaatcattggcaacacccatttattgtacaaaaagccccaatttacaaacgaaagtccaggtttgatagagacaaactattaactattttgtctctgtttttaacacctccacagtttttaatttctttagtaatgaaattattcacaatatcagtatcttctttatctaccagagattttactaacttgataaccttggctgtctcattcaatagggtagtaatatttgtatgtgtgatattgatatctttttgaattgtttcttttagaagtgattctttgatggtgccagcatacgaattacaataatgcagaaactcggttaacatgcaggaattatagtaagccaattccaattgttgcctgtgttgtattagagtgtcaatatgagcaatggtgtccttgcgtttctctgatagaatgcgagcagcgattttggcgttatcatttgacgatatttctggaatgacgaatcctgtttctactaactttttggtaggacaaagtgaaacaatcaagaagatagcttctcctcctatttgtggaagaaattgaactcctctagatgatctactgacgatagtatctccttgacagatattggaccgaattacagaagtacctggaatgtaaagccctgaaaccccctcattttttaagcagattgttgccgtaaatcctgcactgtgaccaagatagagagctcctttggtgaatccatctctatgtttcagtttaaccaagaaacagtcagctggtctaaaatttccatctctatctaatacagcatctaacttgatgtcaggaactatgaccggtttaatgttatatgtaacattgagtaaatccttaagttcataatcatcactgtcatcagttatgtacgatccaaacaatgtttctactggcatagtggatacgaagatgctatccatcagaatgtttccctgattagtattttctatatagctattcttctttaaacgattttccaaatcagtaactatgttcatttttttaggagtaggacgcctagccagtatggaagaggattttctagatcctctcttcaacatctttgatctcaatggaatgcaaaaccccatagtgaaacaaccaacgataaaaataatattgtttttcactttttataattttaccatctgactcatggattcattaatatctttataagagctactaacgtataattctttataactgaactgagatatatacaccggatctatggtttccataattgagtaaatgaatgctcggcaataactaatggcaaatgtataaaacaacgaaattatactagagttgttaaagttaatattttctatgagctgttccaataaattatttgttgtgactgcgttcaagtcataaatcatcttgatactatccagtaaacagtctttaagttctggaatattatcatcccattgtaaagcccctaattcgactatcgaatatcctgctctgatagcagtttcaatatcgacggacgtcaatactgtaataaaggtggtagtattgtcatcatcgtgataaactacgggaatatggtcgttagtaggtacggtgactttacacaacgcgatatataactttccttttgtaccatttttaacgtagttgggacgtcctgcagggtattgttttgaagaaatgatatcgagaacagatttgatacgatatttgttggattcctgattattcactataatataatctagacagatagatgattcgataaatagagaaggtatatcgttggtaggataatacatccccattccagtattctcggatactctattgatgacactagttaagaacatgtcttctattctagaaaacgaaaacatcctacatggactcattaaaacttctaacgctcctgattgtgtctcgaatgcctcgtacaaggatttcaaggatgccatagattctttgaccaacgatttagaattgcgtttagcatctgatttttttattaaatcgaatggtcggctctctggtttgctaccccaatgataacaatagtcttgtaaagataaaccgcaagaaaatttatacgcatccatccaaataaccctagcaccatcggatgatattaatgtattattatagattttccatccacaattattgggccagtatactgttagcaacggtatatcgaatagattactcatgtaacctactagaatgatagttcgtgtactagtcataatatctttaatccaatctaagaaatttaaaattagattttttacactgttaaagttaacaaaggtattacccggatacgtggatatcatatatggcattggtccattatcagtaatagctccataaactgatacggcgatggtttttatatgtgtttgatctaacgaggaagaaattcgcgcccacaattcatctctagatatgtatttaatatcaaacggtaacacatcaatttcgggacgcgtatatgtttctaaatttttaatccaaatataatgatgacctatatgccctattatcatactgtcaactatagtacacctagagaacttacgatacatctgtttcctataatcgttaaattttacaaatctataacatgctaaaccttttgacgacaaccattcattaatttctgatatggaatctgtattctcgataccgtattgttctaaagccagtgctatatctccctgttcgtgggaacgctttcgtataatatcgatcaacggataatctgaagtttttggagaataatatgactcatgatctatttcgtccataaacaatctagacataggaattggaggcgatgatcttaattttgtgcaatgagtcgtcaatcctataacttctaatattgtaatattcatcatcgacataacactatctatgttatcatcgtatattagtataccacggccttcttcatttcgtgccaaaataatatacagtcttaaataattacgcaatatctcaatagtttcataattgttagctgttttcatcaaggtttgtatcctgtttaacatgatggcgttctataacgtctctattttctatttttaattttttaaatttttaacgatttactgtggctagatacccaatctctctcaaatatttttttagcctcgcttacaagctgtttatctatactattaaaactgacgaatccgtgattttggtaatgggttccgtcgaaatttgccgaagtgatatgaacatattcgtcgtcgactatcaacaattttgtattattctgaatagtgaaaaccttcacagatagatcattttgaacacacaacgcgtctagacttctggcggttgccatagaatatacgtcgttcttatcccaattaccaactagaagtctgatcttaactcctctattaatggctgcttctataatggagttgtaaatgtcaggccaatagtagctattaccgtcgacacgtgtagtgggaactatggccaaatgttcaatatctatactagtcttagccgacttgagtttatcaataactacatcagtgtctagatctctagaatatcccaataggtgttctggagaatcagtaaagaacactccacctataggattcttaatatgatacgcagtgctaactggcagacaacaagccgcagagcataaattcaaccatgaattttttgcgctattaaaggctttaaaagtatcaaatcttctacgaagatctgtggccagcgggggataatcagaatatacacctaacgttttaatcgtatgtatagatcctccagtaaatgacgcgtttcctacataacatctttcatcatctgacacccaaaaacaaccgagtagtagtcccacattattttttttatctatattaacggttataaaatttatatccgggcagtgactttgtagctctcccagatttcttttccctcgttcatctagcaaaactattattttaatccctttttcagatgcctcttttagtttatcaaaaataagcgcgcccctagtcgtactcagaggattacaacaaaaagatgctatgtatatatatttcttagctagagtgataatttcgttaaaacattcaaatgttgttaaatgatcggatctaaaatccatattttctggtagtgtttctaccagcctacattttgctcccgcaggtaccggtgcaaatggccacatttagttaacataaaaacttatacatcctgttctatcaacgattctagaatatcatcggctatatcgctaaaattttcatcaaagtcgacatcacaacctaactcagtcaatatattaagaagttccatgatgtcatcttcgtttatttctatatccgtatccattgtagattgttgaccgattatcgagtttaaatcattactaatactcaatccttcagaatacaatctgtgtttcattgtaaatttataggcggtgtatttaagttggtagattttcaattatgtatcaatatagcaacagtagttcttgctcctccttgattctagcatcctcttcattattttcttctacgtacataagcatgtccaatacgttagacaacacaccgacgatggcggccgccacagacacgaatatgactagaccgatgaccatttaaaaacccctctctagctttcacttaaactgtatcgattattcttttagaacatgtataatataaaaacattattctatttcgaatttaggcttccaaaaatttttcatccgtaaaccgataataatatatatagacttgttaatagtcggaataaatagattaatgcttaaactatcatcatctccacgattagagatacaatatttacattctttttgctgtttcgaaactttatcaatacacgttaatacaaacccaggaaggagatattgaaactgaggctgttgaaaatgaaacggtgaatacaataattcagataatgtaaaatcatgattccgtattctgatgatattagaactgctaatggatgtcgatggtatgtatctaggagtatctattttaacaaagcatcgatttgctaatatacaattatcattttgattaattgttattttattcatattcttaaaaggtttcatatttatcaattcttctacattaaaaatttccatttttaatttatgtagccccgcaatactcctcattacgtttcattttttgtctataatatccattttgttcatctcggtacatagattatccaattgagaagcgcatttagtagttttgtacattttaagtttattgacgaatcgtcgaaaactagttatagttaacattttattatttgataccctgatattaatacccctgccgttactattatttataactgatgtaacccacgtaacattagaattaattatcgatagtaatgcatcgacgcttccaaaattgtctattataaactcaccgataatttttttattgcatgttttcatattcattaggattatcaaatctttaatcttattacgattgtatgcgttgatattacaagacgtcattctaaaagacggaggatctccatcaaatgccagacaatcacgtacaaagtacatggaaataggttttgttctattgcgcatcatagattcatatagaacacccatagaaatactaatttgttttactctataaaatactaatgcatctatttcatcgttttgtataacgtctttccaagtgccaaattccaaatttttttcattgatagtaccaaattcttctatctctttaactacttgcatagataggtaattacagtgatgcctacatgccgttttttgaaactgaatagatgcgtctagaagcgatgctacactagtcacaatcaccactttcatatttagaatatatgtatgtaaaaatatagtagaatttcattttgtttttttctatgctataaatgaattctcattttgcatctgctcatactccgttttatatcaataccaaagaaggaagatatctggttctaaaagccgttaaagtatgcgatgttagaactgtagaatgcgaaggaagtaaagcttcctgcgtactcaaagtagataaaccctcatcgcccgcgtgtgagagaagaccttcgtccccgtccagatgcgagagaatgaataaccctggaaaacaagtcccgtttatgaggacggacatgctacaaaatatgttcgcggctaatcgcgataatgtagcttctagacttttgtcctaaaatactattatatccttttcgatattaataaatccgtgtcgtccaggttttttatctctttcagtatgtgaatagataggtattttatctctattcatcatcgaatttaagagatccgataaacattgtttgtattctccagatgtcagcatctgatacaacaatatatgtgcacataaacctctggcacttatttcatgtaccttccccttatcactaaggagaatagtatttgagaaatatgtatacatgatattatcatgaattagatatacagaatttgtaacactctcgaaatcacacgatgtgtcggcgttaagatctaatatatcactcgataacacattttcatctagatacactagacattttttaaagctaaaatagtctttagtagtgacagtaactatgcgattattttcatcgatgatacatttcatcggcatattattacgcttaccatcaaagactataccatgtgtatatctaacgtattctagcatggttgccatacgtgcattaaacttttcaggatctttggatagatcttccaatctatctatttgagaaaacatttttatcatgttcaatagttgaaacgtcggatccactatatagatattatctataaagattttaggaactacgttcatggtatcctggcgaatattaaaactatcaatgatatgattatcgttttcatcttttatcaccatatagtttctaagatatgggattttacttaatataatattatttcccgtgataaattttattagaaaggccaaatctataagaaaagtcctagaattagtctgaagaatatctatatcgccgtaccgtatatttggattaattagatatagagaatatgatccgtaacatatacaacttttattatggcgtctaagatattcttccatcaacttattaacatttttgactagggaagatacattatgacgtcccattacttttgccttgtctattactgcgacgttcatagaatttagcatatctcttgccaattcttccattgatgttacattataagaaattttagatgaaattacatttggagctttaatagtaagaactcctaatatgtccgtgtatgtggtcactaatacagattgtagttctataatcgtaaataatttacctatattatatgtttgagtctgtttagaaaagtagctaagtatacgatcttttatttctgatgcagatgtatcaacatcggaaaaaaatctttttttattcttttttactaaagatacaaatatgtctttgttaaaaacagttattttctgaatatttctagcttgtaattttaacatatgatattcgttcacactaggtactctgcctaaataggtttctataatctttaatgtaatattaggaagagtattctgatcaggattcctattcattttgaggatttaaaactctgattattgtctaatatggtctcaacacaaactttttcacagagcgatagagtttttgataactcgtttttcttaagaaatataaaactactgtttccagagctcgctctatcttttattttatctaattcgatacaaactcctgatactggttcagaaagtaattcattaattttcagtcctttatagaagatatttaatatagataatacaaaattttcagttcttgatatcgatctgattgatcctagaactagatatattaataacgtgctcattaggcagtttatggcagcttgataattagatatagtatattccagttcatatttattagataccgcattgcccagattttgatattctatgaattcctctgaaaataaatccaaaataactagacattctattttttgtggattagtgtactctcttccctctatcatgttcactactggtgtccacgatgataaatatctagagggaatataatatagtccataggatgccaatctagcaatgtcgaataactgtaatttgattcttcgttcttcattatgaattgattcttgaggtataaacctaacacaaattatattattagacttttcgtatgtaatgtctttcatgttataagtttttaatcctggaatagaatctattttaatgaggcttttaaacgcagagttctccaacgagtcaaagcataatactctgttgtttttcttatatacgatgttacgattttcttctttgaatggaataggtttttgaattagtttataattacaacataatagataaggaagtgtgcaaatagtacgcggaaaaaacataatagctcccctgttttcatccatggttttaagtaaatgatcactggcttctttagtcaatggatattcgaacattaaccgtttcatcatcattggacataatccatatttcttaatgtaaagagtgatcaaatcattgtgtttattgtaccatcttgttgtaaatgtgtattcggttatcggatctgctcctttttctattaaagtatcgatgtcgatctcgtctaagaattcaactatatcgacatatttcatttgtatacacataaccattactaacgtagaatgtataggaagagatgtaacgggaacagggtttgttgattcgcaaactattctaatacataattcttctgttaatacgtcttgcacgtaatctattatagatgccaagatatctatataattattttgtaagatgatgttaactatgtgatctatataagtagtgtaataattcatgtatttcgatatatgttccaactctgtctttgtgatgtctagtttcgtaatatctatagcatcctcaaaaaatatattcgcatatattcccaagtcttcagttctatcttctaaaaaatcttcaacgtatggaatataataatctattttacctcttctgatatcattaatgatatagtttttgacactatcttctgtcaattgattcttattcactatatctaagaaacggatagcgtccctaggacgaactactgccattaatatctctattatagcttctggacataattcatctattataccagaattaatgggaactattccgtatctatctaacatagttttaagaaagtcagaatctaagacctgatgttcatatattggttcatacatgaaatgatctctattgatgatagtgactatttcattctctgaaaattggtaactcattctatatatgctttccttgttgatgaaggatagaatatactcaatagaatttgtaccaacaaactgttctcttatgaatcgtatatcatcatctgaaataatcatgtaaggcatacatttaacaattagagacttgtctcctgttatcaatatactattcttgtgataatttatgtgtgaggcaaatttgtccacgttctttaattttgttatagtagatatcaaatccaatggagctacagttcttggcttaaacagatatagtttttctggaacgaattctacaacattattataaaggactttgggtagataagtgggatgaaatcctattttaattaatgcgatagccttgtcctcgtgcagatatccaaacgcttttgtgatagtatggcattcattgtctagaaacgctctacgaatatctgtgacagatatcatctttagagaatatactagtcgcgttaatagtactacaatttgtattttttaatctatctcaataaaaaaattaatatgtatgattcaatgtataactaaactactaactgttattgataactagaatcagaatctaatgatgacgtaaccaagaagtttatctactgccaatttagctgcattatttttagcatctcgtttagattttccatctgccttatcgaatactcttccgtcgatgtctacacaggcataaaatgtaggagagttactaggccccactgattcaatacgaaaagaccaatctctcctagtaatttggcagtactcattaataacggtgacagggttagcacctttccaatcaataatttttttagccggaataacatcatcaaaagacttatgatcctctctcattgatttttcgcgggatacatcatctattatggcgtcagccataacatcagcatccggcttatccgcctccgttgtcataaaccaacgaggaggaatatcgtcggagctgtacaccatagcactacgttgaagatcgtacagagctttattaacttctcgcttctccatattaagttgtctagttagttgtgcagcagtagctccttcgattccaatggttttaatagcctcacacacaatctctgcgttagaacgttcgtcgatatagattttagacatttttagagagaactaacacaaccagcaataaaactgaacctactttatcatttttttattcatcatcctctggtggttcgtcgttcctatcgaatgtggatctgattaacccgtcatctataggtgatgctggttctggagattctggaggagatggattattatctggaagaatctctgttatttccttgttttcatgtatcgattgcgttgtaacattaagattgcgaaatgctctaaatttgggaggcttaaagtgttgtttgcaatctctacacgcatgtctaactagtggaggttcgtcagcggctctagtttgaatcatcatcggcgtagtattcctacttttacagttaggacacggtgtattgtatttctcgtcgagaacgttaaaataatcgttgtaactcacatcctttattttatctatattgtattctactcctttcttaatgcattttataccgaataagagatagcgaaggaattctttttcggtgccgctagtacccttaatcatatcacatagtgttttatattccaaatttgtggcaatagacggtttatttctatacgatagtttgtttctggaatcctttgagtattctataccaatattattctttgattcgaatttagtttcttcgatattagattttgtattacctatattcttgatgtagtactttgatgatttttccatggcccattctattaagtcttccaagttggcatcatccacatattgtgatagtaattctcggatatcagtagcggctaccgccattgatgtttgttcattggatgagtaactactaatgtatacattttccatttataacacttatgtattaactttgttcatttatattttttcattattatgttgatattaacaaaagtgaatatatatgttaataattgtattgtggttatacggctacaatttcataatgagtggaagtcagtgtccgatgatcaatgacgatagctttactctgaaaagaaagtatcaaatcgatagtgcggagtcaacaataaaaatggataagaagaggataaagtttcagaatagagccaaaatggtaaaagaaataaatcagacaataagagcagcacaaactcattacgagacattgaaactaggatacataaaatttaagagaatgattaggactactactctagaagatatagcaccatctattccaaataatcagaaaacttataaactattctcggacatttcagccatcggcaaagcatcacagaatccgagtaagatggtatatgctctgctgctttacatgtttcccaatttgtttggagatgaccatagattcattcgttatagaatgcatccaatgagtaaaatcaaacacaagatcttctctcctttcaaacttaatcttattagaatattagtggaagaaagattctataataatgaatgcagatctaataaatggagaataattggaacacaagttgataaaatgttgatagctgaatctgataaatatacaatagatgcaaggtataacctaaaacccatgtatagaatcaagggaaaatctgaagaagataccctcttcatcaaacagatggtagaacaatgtgtgacatcccaggaattggtggaaaaagtgttgaagatactgtttagagatttgttcaagagtggagaatacaaagcatacagatacgatgatgatgtagaaaatggatttattggattggatacactaaaattaaacattgttcatgatatagttgaaccatgtatgcctgttcgtaggccagtggctaagatactgtgtaaagaaatggtaaataaatactttgagaatccgctacatattattggtaaaaatcttcaagagtgcattgactttgttagtgaataggcatttcatctttctccaatactaattcaaattgttaaattaataatggatagtataaatagttattagtgataaaatagtaaaaataattattagaataagagtgtagtatcatagataactctcttctataaaaatggattttattcgtagaaagtatcttatatacacagtagaaaataatatagattttttaaaggatgatacattaagtaaagtaaacaattttaccctcaatcatgtactagctctcaagtatctagttagcaattttcctcaacacgttattactaaggatgtattagctaataccaatttttttgttttcatacatatggtacgatgttgtaaagtgtacgaagcggttttacgacacgcatttgatgcacccacgttgtacgttaaagcattgactaagaattatttatcgtttagtaacgcaatacaatcgtacaaggaaaccgtgcataaactaacacaagatgaaaaatttttagaggttgccgaatacatggacgaattaggagaacttataggcgtaaattatgacttagttcttaatccattatttcacggaggggaacccatcaaagatatggaaatcatttttttaaaactgtttaagaaaacagacttcaaagttgttaaaaaattaagtgttataagattacttatttgggcatacctaagcaagaaagatacaggcatagagtttgcggataatgatagacaagatatatatactctatttcaacaaactggtagaatcgtccatagcaatctaacagaaacgtttagagattatatctttcccggagataagactagctattgggtgtggttaaacgaaagtatagctaatgatgcggatatcgttcttaatagacacgccattaccatgtatgataaaattcttagttatatatactctgagataaaacaaggacgcgttaataaaaacatgcttaagttagtttatatctttgagcctgaaaaagatatcagagaacttctgctagaaatcatatatgatattcctggagatatcctatctattattgatgcaaaaaacgacgattggaaaaaatattttattagtttttataaagctaattttattaacggtaatacatttattagtgatagaacgtttaacgaggacttattcagagttgttgttcaaatagatcccgaatatttcgataatgaacgaattatgtctttattctctacgagtgctgcggacattaaacgatttgatgagttagatattaataacagttatatatctaatataatttatgaggtgaacgatatcacattagatacaatggatgatatgaagaagtgtcaaatctttaacgaggatacgtcgtattatgttaaggaatacaatacatacctgtttttgcacgagtcggatcccatggtcatagagaacggaatactaaagaaactgtcatctataaaatccaagagtagacggctgaacttgtttagcaaaaacattttaaaatattatttagacggacaattggctcgtctaggtcttgtgttagatgattataaaggagacttgttagttaaaatgataaaccatcttaagtctgtggaggatgtatccgcattcgttcgattttctacagataaaaaccctagtattcttccatcgctaatcaaaactattttagctagttataatatttccatcatcgtcttatttcaaaggtttttgagagataatctatatcatgtagaagaattcttggataaaagcatccatctaaccaagacggataagaaatatatacttcaattgataagacacggtagatcatagaacagaccaaatatattattaataatttgtatatacatagatataattatcacatattaaaaattcacacatttttgataaatgggaactgctgcaacaattcagactcccaccaaattaatgaataaagaaaatgcagaaatgattttggaaaaaattgttgatcatatagttatgtatattagtgacgaatcaagtgattcagaaaataatcctgaatatattgattttcgtaacagatacgaagactatagatctctcattataaaaagtgatcacgagtttgtaaagctatgtaaaaatcatgcagagaaaagttctccagaaacgcaacaaatgattatcaaacacatatacgaacaatatcttattccagtatctgaagtactattaaaacctataatgtccatgggtgacataattacatataacggatgtaaagacaatgaatggatgctagaacaactctctaccctaaactttaacaatctccgcacatggaactcatgtagcataggcaatgtaacgcgtctgttttatacattttttagttatctgatgaaagataaactaaatatataagtataatcccattctaatactttaacctgatgtattacctgcatcttattagaatattaacctaactaaaagacataacataaaaactcattacatagttgataaaaagcggtaggatataaatattatggctgccaccgttccgcgttttgacgacgtgtacaaaaatgcacaaagaagaattctagatcaagaaacattttttagtagaggtctaagtagaccgttaatgaaaaacacatatctatttgataattacgcgtatggatggataccagaaactgcaatttggagtagtagatacgcaaacttagatgcaagtgactattatcccatttcgttgggattacttaaaaagttcgagtttctcatgtctctatataaaggtcctattccagtatacgaagaaaaagtaaatactgaattcatagccaatggatcgttctctggtagatacgtatcatatcttcgaaagttttctgctcttccaacaaacgagtttattagttttttgttactgacttccattccaatctataatatcttgttctggtttaaaaatactcagtttgatattactaaacacacattattcagatacgtctatacagataatgccaaacacctggcgttggctaggtatatgcatcaaacaggagactataagcctttgtttagtcgtctcaaagagaattatatatttaccggtcccgttccaataggtatcaaagatatagatcaccctaatcttagtagagcaagaagtccatccgattatgagacattagctaatattagtactatattgtactttaccaagtatgatccggtattaatgtttttattgttttacgtacctgggtattcaattactacaaaaattactccagccgtagaatatctaatggataaactgaatctaacaaagagcgacgtacaactgttgtaaattattttatgcttcgtaaaatgtaggttttgaaccaaacattctttcaaagaatgagatgcataaaactttattatccaatagattgactatttcggacgtcaatcgtttaaagtaaacttcgtaaaatattctttgatcactgccgagtttaaaacttctatcgataattgtctcatatgttttaatatttacaagttttttggtccatggtacattagccggacaaatatatgcaaaataatatcgttctccaagttctatagtttctggattatttttattatattcagtaaccaaatacatattagggttatctgcggatttataatttgagtgatgcattcgactcaacataaataattctagaggagacgatctactatcaaattcggatcgtaaatctgtttctaaagaacggagaatatctatacatacctgattagaattcatccgtccttcagacaacatctcagacagtctggttttgtacatcttaatcatattcttatgaaacttggaaacatctcttctagtttcactagtacctttattaattctctcaggtacagattttgaattcgacgatgccgagtatttcatcgttgtatatttcttcttcgattgcataatcagattcttatataccgcctcaaactctattttaaaattattaaacaatactctactattaatcagtcgttctaactctttcgctatttctatagacttatctacatcttgactgtctatctctgtaaacacggagtcggtatctccatacacgctacgaaaacgaaatctgtaatctataggcaacgatgttttcacaatcggattaatatctctatcgtccatataaaatggattacttaatggattggcaaaccgtaacataccgttagataactctgctccatttagtaccgattctagatacaagatcattctacgtcctatggatgtgcaactcttagccgaagcgtatgagtatagagcactatttctaaatcccatcagaccatatactgagttggctactatcttgtacgtatattgcatggaatcataaatggccttttcagttgaactggtagcctgttttaacatctttttatatctggctctctctgccaaaaatgttcttaatagtctaggaatggttccttctatcgatctatcgaaaattgctatttcagagatgaggttcggtagtctaggttcacaatgaaccgtaatatatctaggaggtggatatttctgaagcaatagctgattatttatttcttcttccaatctattggtactaacaacgacaccgactaatgtttccggagatagatttccaaagatacacacattaggatacagactgttataatcaaagattaatacattattactaaacattttttgttttggagcaaataccttaccgccttcataaggaaacttttgttttgtttctgatctaactaagatagttttagtttccaacaatagctttaacagtggacccttgatgactgtactcgctctatattcgaataccatggattgaggaagcacatatgttgacgcacccgcgtctgtttttgtttctactccataatactcccacaaatactgacacaaacaagcatcatgaatacagtatctagccatatctaaagctatgtttagattataatccttatacatctgagctaaatcaacgtcatcctttccgaaagataatttatatgtatcattaggtaaagtaggacataatagtacgactttaaatccattttcccaaatatctttacgaattactttacatataatatcctcatcaacagtcacataattacctgtggttaaaacctttgcaaatgcagcggctttgcctttcgcgtccgtagtatcgtcaccgatgaacgtcatttctctaactcctctatttaatactttacccatgcaactgaacgcgttcttggatatagaatccaatttgtacgaatccaatttttcagatttttgaatgaatgaatatagatcgaaaaatatagttccattattgttattaacgtgaaacgtagtattggccatgccgcctactcccttatgactagactgatttctctcataaatacagagatgtacagcttcctttttgtccggagatctaaagataatcttctctcctgttaataactctagacgattagtaatatatctcagatcaaagttatgtccgttaaaggtaacgacgtagtcgaacgttagttccaacaattgtttagctattcgtaacaaaactatttcagaacatagaactagttctcgttcgtaatccatttccattagtgactgtatcctcaaacatcctctatcgacggcttcttgtatttcctgttccgttaacatctcttcattaatgagcgtaaacaataatcgtttaccacttaaatcgatataacagtaacttgtatgcgagattgggttaataaatacagaaggaaacttcttatcgaagtgacactctatatctagaaataagtacgatcttgggatatcgaatctaggtatttttttagcgaaacagttacgtggatcgtcacaatgataacatccattgttaatctttgtcaaatattgctcgtccaacgagtaacatccgtctggagatatcccgttagaaatataaaaccaactaatattgagaaattcatccatggtggcattttgtatgctgcgtttctttggctcttctatcaaccacatatctgcgacggagcattttctatctttaatatctagattataacttattgtctcgtcaatgtctatagttctcatctttcccaacggcctcgcattaaatggaggaggagacaatgactgatatatttcgtccgtcactacgtaataaaagtaatgaggaaatcgtataaatacggtctcaccatttcgacatctggatttcagatataaaaatctgttttcaccgtgactttcaaaccaattaatgcaccgaacatccatttatagaatttagaaatatattttcatttaaatgaatcccaaacattggggaagagccgtatggaccattatttttatagtactttcgcaagcgggtttagacggcaacatagaagcgtgtaaacgaaaactatatactatagtcagcactcttccatgtcctgcatgtagacggcacgcgactatcgctatagaggacaataatgtcatgtctagcgatgatctgaattatatttattattttttcatcagattatttaacaatttggcatctgatcccaaatacgcgatcgatgtgacaaaggttaaccctttataaacttaacccattataaaacttatgattagtcacaactgaaataaccgcgtgattattttttggtataattctacacggcatggtttctgtaactatgaattcaacccccgttacattagtgaaatctttaacaaacagcaagggttcgtcaaagacataaaactcattgtttacaatcgaaatagaccccctatcacacttaaaataaaaaatatccttatcctttaccaccaaataaaattctgattggtcaatgtgaatgtattcacttaacagttccacaaatttatttattaactccgaggcacatacatcgtcggtattttttatggcaaactttactcttccagcatccgtttctaaaaaaatattaacgagttccatttatatcatccaatattattgaaatgacgttgatggacagatgatacaaataagaaggtacggtacctttgtccaccatctcctccaattcatgctctattttgtcattaactttaatgtatgaaaacagtacgccacatgcttccatgacagtgtgtaacactttggatacaaaatgtttgacattagtataattgttcaagactgtcaatctataatagatagtagctataatatattctatgatggtattgaagaagatgacaaccttggcatattgatcatttaacacagacatggtatcaacagatagcttgaatgaaagagaatcagtaattggaataagcgtcttctcgatagagtgtccgtataccaacatgtctgatattttgatgtattccattaaattatttagttttttctttttattttcgttaaacagcatttctgtcaacggaccccaacatcgttgaccgattaagttttgattgatttttccgtgtaatgcgtatctagtcagatcgtatagcctatccaataatccatcatctgtgcgtagatcacatcgtacactttttaattctctatagaagagcgacagacatctggagcaattacagacagcaatttctttattctctacagatgtaagatacttgaagacattcctatgatgatgcagaattttggataacacggtattgatggtatctgttaccataattcctttgatggctgatagtgtcagagcacaagatttccaatctttgacaatttttagcaccattatctttgttttgatatctatatcagacagcatggtgcgtctgacaacacagggattaagacggaaagatgaaatgattctctcaacatcttcaatggataccttgctattttttctggcattatctatatgtgcgagaatatcctctagagaatcagtatcctttttgatgatagtggatctcaatgacatgggacgtctaaaccttcttattttatcaccagattgcatggtgatttgtcttctttcttttatcataatgtaatctctaaattcatcggcaaattgtctatatctaaaatcataatatgagatgtttacctctacaaatatctgttcgtccaatgttagagtatctacatcagttttgtattccaaattaaacatggcaacggatttaattttatattcctctattaagtcctcgtcgataataacagaatgtagataatcatttaatccatcgtacatggttggaagatgcttgttgacaaaatctttaattgtcttgatgaaggtgggactatatctaacatcttgattaataaaatttataacattgtccataggatactttgtaactagttttatacacatctcttcatcggtaagtttagacagaatatcgtgaacaggtggtatattatattcatcagatatacgaagaacaatgtccaaatctatattgtttaatatattatatagatgtagcgtagctcctacaggaatatctttaactaagtcaatgatttcatcaaccgttagatctattttaaagttaatcatataggcattgatttttaaaaggtatgtagccttgactacattctcattaattaaccattccaagtcactgtgtgtaagaagattatattctatcataagcttgactacatttggtcccgataccattaaagaattcttatgatataaggaaacagcttttaggtactcatctactctacaagaattttggagagccttaacgatatcagtgacgtttattatttcaggaggaaaaaacctaacattgagaatgtcggagttaatagcttccagatacagtgattttggcaatagtccgtgtaatccataatccagtaacacgagctggtgcttgctagacaccttttcaatgtttaatttttttgaaataagctttgataaagccttcctcgcaaattccggatacatgaacatgtcggcgacatgattaagtattgttttttcattatttttatattttctcaacaagttctcaataccccaatagatgatagaatatcacccaatgcgtccatgttgtctatttccaacaggtcgctatatccaccaatagaagtttttccaaaaaagattctaggaacagttctaccaccagtaatttgttcaaaatagtcacgcaattcattttcgggtttaaattctttaatatcgacaatttcatacgctcctcttttgaaactaaacttatttagaatatccagtgcatttctacaaaaaggacatgtatacttgacaaaaattgtcactttgttattggccaacctttgttgtacaaattcctcggccattttaatatttaagtgatataaaactatctcgacttatttaactctttagtcgagatatatggacgcagatagctatatgatagccaactacagaaggcaaacgctataaaaaacataattacgacgagcatatttataaatatttttattcagcattacttgatatagtaatattaggcacagtcaaacattcaaccactctcgatacattaactctctcattttctttaacaaattctgcaatatcttcgtaaaaagattcttgaaactttttagaatatctatcgactctagatgaaatagcgttcgtcaacatactatgttttgtatacataaaggcgcccattttaacagtttctagtgacaaaatgctagcgatcctaggatcctttagaatcacatagattgacgattcgtctctcttagtaactctagtaaaataatcatacaatctagtacgcgaaataatattatccttgacttgaggagatctaaacaatctagttttgagaacatcgataagttcatcgggaatgacatacatactatctttaatagaactcttttcatccagttgaatggattcgtccttaaccaactgattaatgagatcttctattttatcattttccagatgatatgtatgtccattaaagttaaattgtgtagcgcttctttttagtctagcagccaatactttaacatcactaatatcgatatacaaaggagatgatttatctatggtattaagaattcgtttttcgacatctgtcaaaaccaattcctttttgcctgtatcatccagttttccatcctttgtaaagaaattattttctactagactattaataagactgataaggattcctccataattgcacaatccaaactttttaacaaaactagactttacaagatctacaggaatgcgtacttcaggtttcttagcttgtgattttttcttttgtggacattttcttgtgaccaactcatctaccatttcattgattttagcagtgaaataagctttcaatgcacgggcactgatactattgaaaacgagttgatcttcaaattccgccatttaagttcaccaaacaacttttaaatacaaatatatcaatagtagtagaataagaactataaaaaaaataataattaaccaataccaaccccaacaaccggtattattagttgatgtgactgttttctcatcacttagaacagatttaacaatttctataaagtctgtcaaatcatcttccggagaccccataaatacaccaaatatagcggcgtacaacttatccatttatacattgaatattggcttttctttatcgctatcttcatcatattcatcatcaatatcaacaagtcccagattacgagccagatcttcttctacattttcagtcattgatacacgttcactatctccagagagtccgataacgttagccaccacttctctatcaatgattagtttcttgagtgcgaatgtaatttttgtttccgttccggatctatagaaaactacaggtgtgataattgccttggccaattgtctttctcttttactgagtgattctagttcaccttctatagatctgagaatggatgattctccagtcgaaacatattctaccatggatccgtttaatttgttgatgaagatggattcatccttaaatgttttctctgtaatagtttccaccgaaagactatgcaaagaatttggaatgcgttccttgtgcttaatgtttccatagacggcttctagaagttgatacaacataggactagccgcggtaacttttatttttagaaagtatccatcgcttctatcttgtttagatttatttttataaagtttagtctctccttccaacataataaaagtggaagtcatttgactagataaactatcagtaagttttatagagatagacgaacaattagcgtattgagaagcatttagtgtaacgtattcgatacattttgcattagatttactaatcgattttgcatactctataacacccgcacaagtctgtagagaatcgctagatgcagtaggtcttggtgaagtttcaactctcttcttgattaccttactcatgattaaacctaaataattgtactttgtaatataatgatatatattttcactttatctcatttgagaataaaaatgtttttgtttaaccactgcatgatgtacagatttcggaatcgcaaaccaccagtggttttattttatccttgtccaatgtgaattgaatgggagcggatgcgggtttcgtacgtagatagtacattcccgtttttagaccgagactccatccgtaaaaatgcatactcgttagtttggaataactcggatctgctatatggatattcatagattgactttgatcgatgaaggctcccctgtctgcagccatttttatgatcgtcttttgtggaatttcccaaatagttttataaactcgcttaatatcttctggaaggtttgtattctgaatggatccaccatctgccataatcctattcttgatctcatcattccataattttctctcggttaaaactctaaggagatgcggattaactacttgaaattctccagacaatactctccgagtgtaaatattactggtatacggttccaccgactcattatttcccaaaatttgagcagttgatgcagtcggcataggtgccaccaataaactatttctaagaccgtatgttctgattttatcttttagaggttcccaattccaaagatccgacggtacaacattccaaagatcatattgtagaataccgttactggcgtacgatcctacatatgtatcgtatggtccttccttctcagctagttcacaactcgcctctaatgcaccgtaataaatggtttcgaagatcttcttatttagatcttgtgcttccaggctatcaaatggataatttaagagaataaacgcgtccgctaatccttgaacaccaataccgataggtctatgtctcttattagagatttcagcttctggaataggataataattaatatctataattttattgagatttctgacaattactttgaccacatccttcagtttgagaaaatcaaatcgcccatctattacaaacatgttcaaggcaacagatgccagattacaaacggctacctcattagcatccgcatattgtattatctcagtgcaaagattactacacttgatagttcctaaattttgttgattactctttttgttacacgcatccttataaagaatgaatggagtaccagtttcaatctgagattctataatcgctttccagacgactcgagcctttattatagatttgtatctcctttctctttcgtatagtgtatacaatcgttcgaactcgtctccccaaacattgtccaatccaggacattcatccggacacatcaacgaccactctccgtcatccttcactcgtttcataaagagatcaggaatccaaagagctataaatagatctctggttctatgttcctcgtttcctgtattctttttaagatcgaggaacgccataatatcagaatgccacggttccaagtatatggccataactccaggccgtttgtttcctccctgatctatgtatctagcggtgttattataaactctcaacattggaataataccgtttgatataccattggtaccggagatatagcttccactggcacgaatattactaattgatagacctattccccctgccattttagagattaatgcgcatcgttttaacgtgtcatagataccctctatgctatcatcgatcatgttaagtagaaaacagctagacatttggtgacgactagttcccgcattaaataaggtaggagaagcgtgcgtaaaccatttttcagaaagtagattgtacgtctcaatagctgagtctatatcccattgatgaattcctactgcgacacgcattaacatgtgctgaggtctttcaacgatcttgttgtttattttcaacaagtaggatttttccaaagttttaaaaccaaaatagttgtatgaaaagtctcgttcgtaaataataaccgagttgagtttatccttatatttgttaactatatccatggtgatacttgaaataatcggagaatgtttcccatttttaggattaacatagttgaataaatcctccatcacttcactaaatagtttttttgtttccttgtgtagatttgatacggctattctggcggctagaatggcataatccggatgttgtgtagtacaagtggctgctatttcggctgccagagtgtccaattctaccgttgttactccattatatattccttgaataaccttcatagctattttaataggatctatatgatccgtgtttaagccataacataattttctaatacgagacgtgattttatcaaacatgacattttccttgtatccatttcgtttaatgacaaacatttttgttggtgtaataaaaaaattatttaacttttcattaatagggatttgacgtatgtagcgtacaaaattatcgttcctggtatatagataaagagtcctatatatttgaaaatcgttacggctcgattaaactttaatgattgcatagtgaatatatcattaggatttaactccttgactatcagggcggcaccagaaattaccatcaaaagcattaatacagttatgccgatcgcagttagaacggttatagcatccaccatttatatctaaaaattagatcaaagaatatgtgacaaagtcctagttgtatactgagaattgacgaaacaatgtttcttacatatttttttcttattagtaactgacttaatagtaggaactggaaagctagacttgattattctataagtatagatacccttccaaataatattctctttgataaaagttccagaaaatgtagaattttttaaaaagttatcttttgctattaccaagattgtgtttagacgcttattattaatatgagtgatgaaatccacaccgcctctagatatcgcttttatttccacattagatggtaaatccaatagtgaaactatctttttaggaatgtatggactcgcgtttagaggagtgaacgtcttaggcgtcggaaaggatgattcatcaaacgaataaacaatttcacaaatggatgttaatgtattagtaggaaattttttgacgctagtggaattgaagattctaatggatgatgttctacctatttcatccgataacatgttaatttccgacaccaacggttttaatatttcgatgatatacggtagtctctctttcggacttatatagcttattccacaatacgagtcattatatactccaaaaaacaaaataactagtataaaatctgtatcgaatgggaaaaacgaaattatcgacataggtatagaatctggaacattgaacgtattaatacttaattctttttctgtggtaagtaccgataggttattgacattgtatggttttaaatattctataacttgagacttgatagatattagtgatgaattgaaaattatttttatcaccacgtgtgtttcaggatcatcgtcgacgcccgtcaaccaaccgaatggagtaaaataaatatcattaatatatgctctagatattagtatttttatcaatcctttgattatcatcttctcgtaggcgaatgattccatgatcaagagtgatttaagaacatcctccggagtattaatgggcttagtaaacagtccatcgttgcaataataaaagttatccaagttaaaggatattatgcattcgtttaaagatatcacctcatctgacggagacaattttttggtaggttttagagactttgaagctacttgtttaacaaagttattcatcgtcgtttactattctatttaattttgtagttaatttatcacatatcacattaattgactttttggtccatttttccatacgtttatattcttttaatcctgcgttatccgtttccgttatatccagggatagatcttgcaagttaaatagaatgctcttaaataatgtcatttttttatccgctaaaaatttaaagaatgtataaacttttttcaaagatttaaaacttttaggtggagttctagtacacaatatcataaacaaactaataaacatcccgcattcagattccaacagctgattaacttccacattaatacagcctattttcgctccaaatgtacattcgaaaaatctgaataaaacatcgatgtcacaatttgtattatccaatacagaatgtctgtgattcgtgttaaaaccatcggagaaggaatagaaataaaaattattatagtggtggaattcagttggaatattgcctccggagtcataaaaggatactaaacattgttttttatcataaattacacatttccaatgagacaaataacaaaatccaaacattacaaatctagaggtagaacttttaattttgtctttaagtatatacgataagatatgtttattcataaacgcgtcaaatttttcatgaatcgctaaggagtttaagaatctcatgtcaaattgtcctatataatccacttcggatccataagcaaactgagagactaagttcttaatacttcgattgctcatccaggctcctctctcaggctctattttcatcttgacgacctttggattttcaccagtatgtattcctttacgtgataaatcatcgattttcaaatccatttgtgagaagtctatcgccttagatactttttcccgtagtcgaggtttaaagaaatacgctaacggtatactagtaggtaactcaaagacatcatatatagaatggtaacgcgtctttaactcgtcggttaactctttcttttgatcgagttcgtcgctactattgggtctgctcaggtgccccgactctactagttccaacatcataccgataggaatacaagacactttgccagcggttgtagatttatcatatttctccactacatatccgttacaatttgttaaaaatttagatacatctatattgctacataatccagctagtgaatatatatgacataataaattggtaaatcctagttctggtattttactaattactaaatctgtatatctttccatttatcatggaaaagaatttaccagatatcttcttttttccaaactgcgttaatgtattctcttacaaatattcacaagatgaattcagtaatatgagtaaaacggaacgtgatagtttctcattggcggtgtttccagttataaaacatagatggcataacgcacacgttgtaaaacataaaggaatatacaaagttagtacagaagcacgtggaaaaaaagtatctcctccatcactaggaaaacccgcacacataaacctaaccgcgaagcaatatatatacagtgaacacacaataagctttgaatgttatagttttctaaaatgtataacaaatacagaaatcaattcgttcgatgagtatatattaagaggactattagaagctggtaatagtttacagatattttccaattccgtaggtaaacgaacagatactataggtgtactagggaataagtatccatttagcaaaattccattggcctcattaactcctaaagcacaacgagagatattttcagcgtggatttctcatagacctgtagttttaactggaggaactggagtgggtaagacgtcacaggtacccaagttattgctttggtttaattatttatttggtggattctctactctagataaaatcactgactttcacgaaagaccagtcattctatctcttcctaggatagctttagttagattgcatagcaataccattttaaaatcattgggatttaaggtactagatggatctcctatttctttacggtacggatctataccggaagaattaataaacaaacaaccaaaaaaatatggaattgtattttctacccataagttatctctaacaaaactatttagttatggcactcttattatagacgaagttcatgagcatgatcaaataggagatattattatagcagtagcgagaaagcatcatacgaaaatagattctatgtttttaatgactgccacgttagaggatgacagggaacggctaaaagtatttttacctaatcccgcatttatacatattcctggagatacactgtttaaaattagcgaggtatttattcataataagataaatccatcttccagaatggcatacatagaagaagaaaagagaaatttagttactgctatacagatgtatactcctcctgatggatcatccggtatagtctttgtggcatccgttgcacagtgtcacgaatataaatcatatttagaaaaaagattaccgtatgatatgtatattattcatggtaaggtcttagatatagacgaaatattagaaaaagtgtattcatcacctaatgtatcgataattatttctactccttatttggaatccagcgttactatacacaatgttacacacatttatgatatgggtagagtttttgtccccgctccttttggaggatcgcaacaatttatttctaaatctatgagagatcaacgaaaaggaagagtaggaagagttaatcctggtacatacgtctatttctatgatctgtcttatatgaagtctatacagcgaatagattcagaatttctacataattatatattgtacgctaataagtttaatctaacactccccgaagatttgtttataatccctacaaatttggatattctatggcgtacaaaggaatatatagactcgttcgatattagtacagaaacatggaataaattattatccaattattatatgaagatgatagagtatgctaaactttatgtactaagtcctattctcgctgaggagttggataactttgagaggacgggagaattaactagtattgtacgagaagccattttatctctaaatttacgaattaagattttaaattttaaacataaagatgatgatacgtatatacacttttgtaaaatattattcggtgtctataacggaacaaacgctactatatattatcatagacctctaacgggatatatgaatatgatttcagatactatatttgttcctgtagataataactaaaaatcaaactctaatgaccacatctttttttagagatgaaaaattttctacatctccttttgtagacacgactaaacattttgcagaaaaaagtttattagtgtttagataatcgtatacttcatcagtgtagatagtaaatgtgaacagataaaaggtattcttgctcaatagattggtaaattccatagaatatattaatcctttcttcttgagatcccacatcatttcaaccagagacgttttatccaatgatttacctcgtactataccacatacaaaactagattttgcagtgacgtcgtacctggtattcctaccaaacaaaattttacttttagttcttttagaaaattctaaggtagaatctctatttgccaatatgtcatctatggaattaccactagcaaaaaatgatagaaatatatattgatacatcgcagctggttttgatctactatactttaaaaacgaatcagattccataattgcctgtatatcatcagctgaaaaactatgttttacacgtattccttcggcatttctttttaatgatatatcttgtttagacaatgataaagttatcatgtccatgagagacgcgtctccgtatcgtataaatatttcattagatgttagacgcttcattaggggtatacttctataaggtttcttaatcagtccatcattggttgcgtcaagaactactatcggatgttgttgggtatctctagtgttacacatggccttactaaagtttgggtaaataactatgatatctctattaattatagatgcatatatttcattcgtcaaggatattagtatcgacttgctatcgtcattaatacgtgtaatgtaatcatataaatcatgcgatagccaaggaaaatttaaatagatgttcatcatataatcgtcgctataattcatattaatacgttgacattgactaatttgtaatatagcctcgccacgaagaaagctctcgtattcagtttcatcgataaaggataccgttaaatataactggttgccgatagtctcatagtctattaagtggtaagtttcgtacaaatacagaatccctaaaatattatctaatgttggattaatctttaccataactgtataaaatggagacggagtcataactattttaccgtttgtacttactggaatagatgaaggaataatctccggacatgctggtaaagacccaaatgtctgtttgaagaaatccaatgttccaggtcctaatctcttaacaaaaattacgatattcgatcccgatatcctttgcattctatttaccagcatatcacgaactatattaagattatctatcatgtctattctcccaccgttatataaatcgcctccgctaagaaacgttagtatatccatacaatggaatacttcatttctaaaatagtattcgttttctaattctttaatgtgaaatcgtatactagaaagggaaaaattatctttgagttttccgttagaaaagaaccacgaaactaatgttctgattgcgtccgattccgttgctgaattaatggatttacaccaaaaactcatataacttctagatgtagaagcattcgctaaaaaattagtagaatcaaaggatataagtagatgttccaacaagtgagcaattcccaagatttcatctatatcattctcgaatccgaaattagaaattcccaagtagatatcctttttcatccgatcgttgatgaaaatacgaactttattcggtaagacaatcatttactaaggagtaaaataggaagtaatgttcgtatgtcgttatcatcgtataaattaaaggtgtgttttttaccattaagtgacattataattttaccaatattggaattataatataggtgtatttgcgcactcgcgacggttgatgcatcggtaaatatagctgtatctaatgttctagtcggtatttcatcatttcgctgtctaataatagcgttttctctatctgtttccattacagctgcctgaagtttattggtcggataatatgtaaaataataagaaatacatacgaataacaaaaataaaataagatataataaagatgccatttagagatctaattttgttcaacttgtccaaattcctacttacagaagatgaggaatcgttggagatagtgtcttccttatgtagaggatttgaaatatcttatgatgacttgataacttactttccagataggaaataccataaatatatttataaagtatttgaacatgtagatttatcggaggaattaagtatggaattccatgatacaactttgcgagatttagtttatcttagattgtacaagtattccaagtgtatacggccgtgttataaattaggagataatctaaaaggcatagttgttataaaggacaggaatatttatattagggaagcaaatgatgacttgatagaatatctcctcaaggaatacactcctcagatttatacatattctaatgagcgcgtccccataactggttcaaaattaattctttgtggattttctcaagttacatttatggcgtatacaacgtcgcatataacaacaaataaaaaggtagatgttctcgtttccaaaaaatgtatagatgaactagtcgatccaataaattatcaaatacttcaaaatttatttgataaaggaagcggaacaataaacaaaatactcaggaagatattttattcggtaaccggtggccaaactccataggtagctttttctatttcggattttagaatttccaaattcaccagcgatttatcggttttggtgaaatccaaggatttattaatgtccacaaatgccatttgttttgtctgtggattgtatttgaaaatggaaacgatgtagttagatagatgcgctgcgaagtttcctattagggttccgcgcttcacgtcacccagcatacttgaatcaccatcctttaaaaaaaatgataagatatcaacatggagtatatcatactcggattttaattcttctactgcatcactgacattttcacaaatactacaatacggtttaccgaaaataatcagtacgttcttcatttatgggtatcaaaaacttaaaatcgttactgctggaaaataaatcactgacgatattagatgataatttatacaaagtatacaatggaatatttgtggatacaatgagtatttatatagccgtcgccaattgtgtcagaaacttagaagagttaactacggtattcataaaatacgtaaacggatgggtaaaaaagggagggcatgtaaccctttttatcgatagaggaagtataaaaattaaacaagacgttagagacaagagacgtaaatattctaaattaaccaaggacagaaaaatgctagaattagaaaagtgtacatccgaaatacaaaatgttaccggatttatggaagaagaaataaaggcaaaaatgcaattaaaaatcgataaacttacatttcaaatatatttatctgattctgataacataaaaatatcattgaatgagatactaacacatttcaacaataatgagaatgttacattattttattgtgatgaacgagacgcagaattcgttatgtgtctcgaggctaaaacacatttctctaccacaggagaatggccgttgataataagtaccgatcaggatactatgctatttgcatctactgataatcatcctaagatgataaaaaacttaactcaactgtttaaatttgttccctcggcagaggataactatttagcaaaattaacggcgttagtgaatggatgtgatttctttcctggactctatggggcatctataacacccaccaacttaaacaaaatacaattgtttagtgattttacaatcgataatatagtcactagtttggcaattaaaaattattatagaaagactaactctaccgtagacgtgcgtaatattgttacgtttataaacgattacgctaatttagacgatgtctactcgtatgttcctccttgtcaatgcactgttcaagaatttatattttccgcattagatgaaaaatggaatgaatttaaatcatcttatttagagaccgttccgttaccctgtcaattaatgtacgcgttagaaccacgtaaggagattgatgtttcagaagttaaaactttatcatcttatatagatttcgaaaatactaaatcagatatcgatgttataaaatctatatcctcgatttttggatattctaacgaaaactgtaacacgatagtattcggcatctataaggataatttactactgagtataaataattcattttactttaacgatagtctgttaataaccaatactaaaagtgataatataataaatataggttactagattaaaaatggtgttccaactcgtgtgctctacatgcggtaaagatatttctcacgaacgatataaattgattatacgaaaaaaatcattaaaggatgtactcgtcagtgtaaagaacgaatgttgtaggttaaaattatctacacaaatagaacctcaacgtaacttaacagtgcaacctctattggatataaactaatatggatccggttaattttatcaagacatatgcgcctagaggttctattatttttattaattataccatgtcattaacaagtcatttgaatccatcgatagaaaaacatgtgggtatttattatggtacgttattatcggaacacttggtagttgaatctacctatagaaaaggagttcgaatagtcccattggatagtttttttgaaggatatcttagtgcaaaagtatacatgttagagaatattcaagttatgaaaatagcagctgatacgtcattaactttattgggtattccgtatggatttggtcatgatagaatgtattgttttaaattggtagctgactgttataaaaatgccggtgttgaaacatcgtctaaacgaatattaggtaaagatatttttctgagccaaaacttcacagacgataatagatggataaagatatatgattctaataatttaacattttggcaaattgattaccttaaagggtgagttaatatgcataactactcctccgttgttttttccctcgttctttttcttaacgttgtttgccatcactctcataatgtaaagatattctaaaatggtaaacttttgcatatcggacgcagaaattggtataaatgttgtaattgtattatttcccgtcaatggactagtcacagctccatcagttttatatcctttagagtatttctcactcgtgtctaacattctagagcattccatgatctgtttatcgttgatattggccggaaagatagattttttattttttattatattactattggcaattgtagatataacttctggtaaatatttttctaccttttcaatctcttctattttcaagccggctatatattctgctatattgttgctagtatcaataccttttcttgctaagaagtcatatgtggtattcactatatcagttttaactggtagttccattagcctttccacttctgcagaataatcagaaattggttctttaccagaaaatccagctactataataggctcaccgatgatcattggcaaaatcctatattgtaccagattaatgagagcatatttcatttccaataattctgctagttcttgagacattgatttatttgatgaatctagttggttctctagatactctaccatttctgccgcatacaataacttgttagataaaatcagggttatcaaagtgtttagcgtggctagaatagtgggcttgcatgtattaaagaatgcggtagtatgagtaaaccgttttaacgaattatatagtctccagaaatctgtggcgttacatacatgagccgaatgacatcgaagattgtccaatatttttaatagctgctctttgtccattatttctatatttgactcgcaacaattgtagataccattaatcactgattcctttttcgatgccggacaatagcacaattgtttagctttggactctatgtattcagaattaatagatatatctcttaatacagattgcactatacattttgaaactatgtcaaaaattgtagaacgacgctgttctgcagccatttaactttaaataatttacaaaaatttaaaatgagcatccgtataaaaatcgataaactgcgccaaattgtggcatatttttcagagttcagtgaagaagtgtctataaatgtagactcgacggatgagttaatgtatatttttgccgccttgggcggatctgtaaacatttgggccattatacctctcagtgcatcagtgttctaccgcggagccgaaaatattgtgtttaatcttccggtgtccaaggtaaaatcgtgtttgtgtagttttcacaatgatgccatcatagatatagaacctgatctggaaaataatctagtaaaactttctagttatcatgtagtaagtgtcgattgtaacaaggaactgatgcctattaggacagatactactatttgtctaagtatagatcaaaagaaatcttacgtgtttaattttcacaagtatgaagaaaaatgttgtggtagaaccgtcattcatttagaatggttgttgggctttatcaagtgtattagtcagcatcagcatttggctattatgtttaaagatgacaatattattatgaagactcctggtaatactgatgcgttttccagggaatattctatgactgaatgttctcaagaactacaaaagttttctttcaaaatagctatctcgtctctcaacaaactacgaggattcaaaaagagagtcaatgtttttgaaactagaatcgtaatggataatgacgataacattctaggaatgttgttttcggatagagttcaatcctttaagatcaacatctttatggcgtttttagattaatactttcaatgagataaatatgggtggcggagtaagtgttgagctccctaaacgggatccgcctccgggagtacccactgatgagatgttattaaacgtggataaaatgcatgacgtgatagctcccgctaagcttttagaatatgtgcatataggaccactagcaaaagataaagaggataaagtaaagaaaagatatccagagtttagattagtcaacacaggacccggtggtctttcggcattgttaagacaatcgtataatggaaccgcacccaattgctgtcgcacttttaatcgtactcattattggaagaaggatggaaagatatcagataagtatgaagagggtgcagtattagaatcgtgttggccagacgttcacgacactggaaaatgcgatgttgatttattcgactggtgtcagggggatacgttcgatagaaacatatgccatcagtggatcggttcagcctttaataggagtgatagaactgtagagggtcaacaatcgttaataaatctgtataataagatgcaaacattatgtagtaaagatgctagtgtaccaatatgtgaatcatttttgcatcatttacgcgcacacaatacagaagatagcaaagagatgatcgattatattctaagacaacagtctgcggactttaaacagaaatatatgagatgtagttatcccactagagataagttagaagagtcattaaaatatgcggaacctcgagaatgttgggatccagagtgttcgaatgccaatgttaatttcttactaacacgtaattataataatttaggactttgcaatattgtacgatgtaatactagcgtgaacaacttacagatggataaaacttcctcattaagattgtcatgtggattaagcaatagtgatagattttctactgttcccgtcaatagagcaaaagtagttcaacataatattaaacattcgttcgacctaaaattgcatttgatcagtttattatctctcttggtaatatggatactaattgtagctatttaaatgggtgccgcggcaagcatacagacgacggtgaatacactcagcgaacgtatctcgtctaaattagaacaagaagcgaacgctagtgctcaaacaaaatgtgatatagaaatcggaaatttttatatccgacaaaaccatggatgtaacctcactgttaaaaatatgtgctctgcggacgcggatgctcagttggatgctgtgttatcagccgctacagaaacatatagtggattaacaccggaacaaaaagcatacgtgccagctatgtttactgctgcgttaaacattcagacaagtgtaaacactgttgttagagattttgaaaattatgtgaaacagacttgtaattctagcgcggtcgtcgataacaaattaaagatacaaaacgtaatcatagatgaatgttacggagccccaggatctccaacaaatttggaatttattaatacaggatctagcaaaggaaattgtgccattaaagcgttgatgcaattgacgactaaggccactactcaaatagcacctagacaagttgctggtacaggagttcagttttatatgattgttatcggtgttataatattggcagcgttgtttatgtactatgccaagcgtatgctgttcacatccaccaatgataaaatcaaacttattttagccaataaggaaaacgtccattggactacttacatggacacattctttagaacttctccgatggttattgctaccacggatatacaaaactgaaaatatattgataatattttaatagattaacatggaagttatcgctgatcgtctagacgatatagtgaaacaaaatatagcggatgaaaaatttgtagattttgttatacacggtctagagcatcaatgtcctgctatacttcgaccattaattaggttgtttattgatatactattatttgttatagtaatttatatttttacggtacgtctagtaagtagaaattatcaaatgttgttggtggcgctagtcatcacattaactattttttattactttatactataatagtactagactgacttctaacaaacatctcacctgccataaataaatgcttgatattaaagtcttctatttctaacactattccatctgtggaaaataatactctgacattatcgctaattgacacatcggtgagtgatatgcctataaagtaataatcttctttgggcacatataccagtgtaccaggttctaacaacctatttactggtgctcctgtagcatactttttctttaccttgagaatatccatcgtttgcttggtcaatagcgatatgtgattttttatcaaccactcgaaaaagtaattggagtgttcatatcctctacgggctattgtctcatggccgtgtatgaaatttaagtaacacgactgtggtagatttgttctatagagccggttgccgcaaatagatagaactaccaatatgtctgtacaaatgttaaacattaattgattaacagaaaaaacaatgttcgttctgggaatagaaaccagatcaaaacaaaattcgttagaatatatgccacgtttatacattgaatataaaataactacagtttgaaaaataacagtatcatttaaacatttaacttgcggggttaatctcacaactttactgtttttaaactgttcaaaatatagcatcgatccatgagaaatacgtttagccgcctttaatagaggaaatcccaccgcctttctggatctcaccaacgacgatagttctgaccagcaactcatttcttcatcatccacctgttttaacatataataggcaggagatagatatccgtcattgcaatattccttctcgtaggcacacaatctaatattgataaaatctccattctcttctctgcatttattatcttgtttcggtggctgattaggctgtagtcttggtttaggctttggtatatcgttgttgaatctattttggtcattaaatctttcatttcttcctggtatatttttatcacctcgtttggttggatttttgtctatattatcgtttgtaacatcggtacgggtattcatttatcacaaaaaaaacttctctaaatgagtctactgctagaaaacctcatcgaagaagataccatattttttgcaggaagtatatctgagtatgatgatttacaaatggttattgccggcgcaaaatccaaatttccaagatctatgctttctatttttaatatagtacctagaacgatgtcaaaatatgagttggagttgattcataacgaaaatatcacaggagcaatgtttaccacaatgtataatataagaaacaatttgggtctaggagatgataaactaactattgaagccattgaaaactatttcttggatcctaacaatgaagttatgcctcttattattaataatacggatatgactgccgtcattcctaaaaaaagtggtaggagaaagaataagaacatggttattttccgtcaaggatcatcacctatcttgtgtattttcgaaactcgtaaaaagattaatatttataaagaaaatatggaatccgcatcgactgagtatacacctatcggagacaacaaggctttgatatctaaatatgcgggaattaatatcctaaatgtgtattctccttccacatccataagattgaatgccatttacggattcaccaataaaaataaactagagaaacttagtactaataaggaactagaatcgtatagttctagccctcttcaagaacccattaggttaaatgattttctgggactattggaatgtgttaaaaagaatattcctctaacagatattccgacaaaggattgattactataaatggagaatgttcctaatgtatactttaatcctgtgtttatagagcccacgtttaaacattctttattaagtgtttataaacacagattaatagttttatttgaagtattcgttgtattcattctaatatatgtattttttagatctgaattaaatatgttcttcatgcctaaacgaaaaatacccgatcctattgatagattacgacgtgctaatctagcgtgtgaagacgataaattaatgatctatggattaccatggatgacaactcaaacatctgcgttatcaataaatagtaaaccgatagtgtataaagattgtgcaaagcttttgcgatcaataaatggatcacaaccagtatctcttaacgatgttcttcgcagatgatgattcattttttaagtatttggctagtcaagatgatgaatcttcattatctgatatattgcaaatcactcaatatctagactttctgttattattattgatccaatcaaaaaataaattagaagccgtgggtcattgttatgaatctctttcagaggaatacagacaattgacaaaattcacagactttcaagattttaaaaaactgtttaacaaggtccctattgttacagatggaagggtcaaacttaataaaggatatttgttcgactttgtgattagtttgatgcgattcaaaaaagaatcctctctagctaccaccgcaatagatcctattagatacatagatcctcgtcgcgatatcgcattttctaacgtgatggatatattaaagtcgaataaagtgaacaataattaattctttattgtcatcatgaacggcggacatattcagttgataatcggccccatgttttcaggtaaaagtacagaattaattagacgagttagacgttatcaaatagctcaatataaatgcgtgactataaaatattctaacgataatagatacggaacgggactatggacgcatgataagaataattttgaagcattggaagcaactaaactatgtgatgtcttggaatcaattacagatttctccgtgataggtatcgatgaaggacagttctttccagacattgttgaattctgtgagcgtatggcaaacgaaggaaaaatagttatagtagccgcactcgatgggacatttcaacgtaaaccgtttaataatattttgaatcttattccattatctgaaatggtggtaaaactaactgctgtgtgtatgaaatgctttaaggaggcttccttttctaaacgattgggtgaggaaaccgagatagaaataataggaggtaatgatatgtatcaatcggtgtgtagaaagtgttacatcgactcataatattatattttttatctaaaaaactaaaaataaacattgattaaattttaatataatacttaaaaatggatgttgtgtcgttagataaaccgtttatgtattttgaggaaattgataatgagttagattacgaaccagaaagtgcaaatgaggtcgcaaaaaaactaccgtatcaaggacagttaaaactattactaggagaattattttttcttagtaagttacagcgacacggtatattagatggtgccaccgtagtgtatataggatcggctcctggtacacatatacgttatttgagagatcatttctataatttaggagtgatcatcaaatggatgctaattgacggccgccatcatgatcctattttaaatggattgcgtgatgtgactctagtgactcggttcgttgatgaggaatatctacgatccatcaaaaaacaactgcatccttctaagattattttaatttctgatgtaagatccaaacgaggaggaaatgaacctagtacggcggatttactaagtaattacgctctacaaaatgtcatgattagtattttaaaccccgtggcatctagtcttaaatggagatgcccgtttccagatcaatggatcaaggacttttatatcccacacggtaataaaatgttacaaccttttgctccttcatattcagctgaaatgagattattaagtatttataccggtgagaacatgagactgactcgagttaccaaattagacgctgtaaattatgaaaaaaagatgtactaccttaataagatcgtccgtaacaaagtagttgttaactttgattatcctaatcaggaatatgactattttcacatgtactttatgctgaggaccgtgtactgcaataaaacatttcctactactaaagcaaaggtactatttctacaacaatctatatttcgtttcttaaatattccaacaacatcaactgaaaaagttagtcatgaaccaatacaacgtaaaatatctagcaaaaattctatgtctaaaaacagaaatagcaagagatccgtacgcggtaataaatagaaacgtgctactgagatatactaccgatatagagtataatgatttagttactttaataaccgttagacataaaattgattctatgaaaactgtgtttcaggtatttaacgaatcatccataaattatactccggttgatgatgattatggagaaccaatcattataacatcgtatcttcaaaaaggtcataacaagtttcctgtaaattttctatacatagatgtggtaatatctgacttatttcctagctttgttagactagatactacagaaactaatatagttaatagtgtactacaaacaggcgatggtaaaaagactcttcgtcttcccaaaatgttagagacggaaatagttgtcaagattctctatcgccctaatataccattaaaaattgttagatttttccgcaataacatggtaactggagtagagatagccgatagatctgttatttcagtcgctgattaatcaattagtagagatgagataagaacattataataatcaataatattatcttatatctcgtttagaaaaatgctaatattaaaatagctaacgctagtaatccaatcggaagccatttgatatctataatagggtatctaatttcctgattcagatagcggacagctatattctcggtagctactcgtttggaatcacaaacattatttacatctaatttactatctgtaatggaaacgtttcccaatgaaatggtacaatccgatacattgcattttgttatatttttttttaaagaggctggtaacaacgcatcgcttcgtttacatggctcgtaccaacaataatagggtaatcttgtatctattcctatccgtactatgcttttatcaggataaatacatttacatcgtatatcgtctttgttagcatcacagaatgcataaatttgttcgtccgtcatgataaaaatttaaagtgtaaatataactattatttttatagttgtaataaaaagggaaatttgattgtatactttcggttctttaaaagaaactgacttgataaaaatggctgtaatctctaaggttacgtatagtctatatgatcaaaaagagattaatgctacagatattatcattagtcatgttaaaaatgacgacgatatcggtaccgttaaagatggtagactaggtgctatggatggggcattatgtaaaacttgtgggaaaacggaattggaatgtttcggtcactggggtaaagtaagtatttataaaactcatatagttaagcctgaatttatttcagaaattattcgtttactgaatcatatatgtattcactgcggattattgcgttcacgagaaccgtattccgacgatattaacctaaaagagttatcgggacacgctcttaggagattaaaggataaaatattatccaagaaaaagtcatgttggaacagcgaatgtatgcaaccgtatcaaaaaattactttttcaaagaaaaaggtttgtttcgtcaacaagttggatgatattaacgttcctaattctctcatctatcaaaagttaatttctattcatgaaaagttttggccattattagaaattcatcaatatccagctaacttattttatacagactactttcccatccctccgctgattattagaccggctattagtttttggatagatagtatacccaaagagaccaatgaattaacttacttattaggtatgatcgttaagaattgtaacttgaatgctgatgaacaggttatccagaaggcggtaatagaatacgatgatattaaaattatttctaataacactaccagtatcaatttatcatatattacatccggcaaaaataatatgattagaagttatatcgtcgcccgacgaaaagatcagaccgctagatctgtaattggtcccagtacatctatcaccgttaatgaggtaggaatgcccgcatatattagaaatacacttacagaaaagatatttgttaatgcctttacagtggataaagttaaacaactattagcgtcaaaccaagttaaattttactttaataaacgattaaaccaattaacaagaatacgccaaggaaagtttatcaaaaataaaatacatttattgcctggtgattgggtagaagtagctgttcaagaatatacaagtattatttttggaagacagccgtctctacatagatacaacgtcatcgcttcatctatcagagctaccgaaggagatactatcaaaatatctcccggaattgccaactctcaaaatgctgatttcgacggagatgaagaatggatgatattggagcaaaatcctaaagccgtaattgaacaaagtattcttatgtatccgacgacgttactcaaacacgatattcatggagcccccgtttatggatctattcaagatgaaatcgtagcagcgtattcattgtttaggatacaagatctttgtttagatgaagtattgaacatcttggggaaatatggaagagagttcgatcctaaaggtaaatgtaaattcagcggtaaagatatctatacttacttgataggtgaaaagattaattatccgggtctcttaaaggatggtgaaattattgcaaacgacgtagatagtaattttgttgtggctatgaggcatctgtcattggctggactcttatccgatcataagtcgaacgtggaaggtatcaactttattatcaagtcatcttatgtttttaagagatatctatctatttacggttttggggtgacattcaaagatctgagaccaaattcgacgttcactaataaattggaggccatcaacgtagaaaaaatagaacttatcaaagaagcatacgccaaatatctcaacgatgtaagagacgggaaaatagttccattatctaaagctttagaggcggactatgtggaatccatgttatccaacttgacaaatcttaatatccgagagatagaagaacatatgagacaaacgctgatagatgatccagataataacctcctgaaaatggccaaagcgggttataaagtaaatcctacagaactaatgtatattctaggtacgtatggacaacaaaggattgatggtgaaccagcagagactcgagtattgggtagagtcttaccttactatcttccagactctaaggatccagaaggaagaggttacattcttaattctttaacaaaaggattaacgggttctcaatattacttttcgatgctggttgccagatctcaatctactgatatcgtctgtgaaacatcacgtaccggaacactggctagaaaaatcattaaaaagatggaggatatggtggtcgacggatacggacaagtagttataggtaatacgctcatcaagtacgccgccaattataccaaaattctaggctcagtatgtaaacctgtagatcttatctatccagatgagtccatgacttggtatttggaaattagtgctctgtggaataaaataaaacagggattcgtttactctcagaaacagaaacttgcaaagaagacattggcgccgtttaatttcctagtattcgtcaaacccaccactgaggataatgctattaaggttaaggatctgtacgatatgattcataacgtcattgatgatgtgagagagaaatacttctttacggtatctaatatagattttatggagtatatattcttgacgcatcttaatccttctagaattagaattacaaaagaaacggctatcactatctttgaaaagttctatgaaaaactcaattatactctaggtggtggaactcctattggaattatttctgcacaggtattgtctgagaagtttacacaacaagccctgtccagttttcacactactgaaaaaagtggtgccgtcaaacaaaaacttggtttcaacgagtttaataacttgactaatttgagtaagaataagaccgaaattatcactctggtatccgatgatatctctaaacttcaatctgttaagattaatttcgaatttgtatgtttgggagaattaaatccagacatcactcttcgaaaagaaacagataaatatgtagtagatataatagttaatagattatacatcaagagagcagaaataaccgaattagttgtcgaatatatgattgaacgatttatctcctttagcgtcattgtaaaggaatggggtatggagacattcattgaggacgaggataatattagatttactgtctacctaaatttcgttgaaccggaagaattgaatcttagtaagtttatgatggttcttccgggtgccgccaacaagggcaagattagtaaattcaagattcctatctctgattatacgggttatgacgacttcaatcaaacaaaaaagctcaataagatgactgtagaactcatgaatctaaaagaattgggttctttcgatttggaaaacgtcaacgtgtatcctggagtatggaatacatacgatatcttcggtatcgaggccgctcgtgaatacttgtgcgaagccatgttaaacacctatggagaagggttcgattatctgtatcagccttgtgatcttctcgctagtttactatgtgctagttacgaaccagaatcagttaataaattcaagttcggtgcagctagtactcttaagagagctacgttcggagacaataaagcattgttaaacgcggctcttcataaaaagtcagaacctattaacgataatagtagctgccacttttttagcaaggtccctaatataggaactggatattacaaatactttatcgacttgggtcttctcatgagaatggaaaggaaactatctgataagatatcttctcaaaagatcaaggaaatggaagaaacagaagacttttaattcttatcaataacatatttttctatgatctgtcttttaaacgatggattttccacaaatgcgcctctcaagtccctcatagaatgatacacgtataaaaaatatagcataggcaatgactccttatttttagacattagatatgccaaaatcatagccccgcttctatttactcccgcagcacaatgaaccaacacgggctcgtttcgttgatcacatttagataaaaaggcggttacgtcgtcaaaatatttactaatatcggtagttgtatcatctaccaacggtatatgaataatattaatattagagttaggtaatgtatatttatccatcgtcaaatttaaaacatatttgaacttaacttcagatgatggtgcatccatagcatttttataatttcccaaatacacattattggttacccttgtcattatagtgggagatttggctttgtgcatatctccagttgaacgtagtagtaagtatttatacaaacttttcttatccatttataacgtacaaatggataaaactactttatcggtaaacgcgtgtaatttagaatacgttagagaaaaggctatagtaggcgtacaagcagccaaaacatcaacacttatattctttgttattatattggcaattagtgcgctattactctggtttcagacgtctgataatccagtctttaatgaattaacgagatatatgcgaattaaaaatacggttaacgattggaaatcattaacggatagcaaaacaaaattagaaagtgatagaggtagacttctagccgctggtaaggatgatatattcgacttcaaatgtgtggatttcggcgcctattttatagctatgcgattggataagaaaacatatctgccgcaagctattaggcgaggtactggagacgcgtggatggttaaaaaggcggcaaaggtcgatccatctgctcaacaattttgtcagtatttgataaaacacaagtctaataatgttattacttgtggtaatgagatgttaaatgaattaggttatagcggttattttatgtcaccgcattggtgttccgattttagtaatatggaatagtgttagataaatgcggtaacgaatgttcctgtaaggaaccataacagtttagatttaacgttaaagatgagcataaacataataaacaaaattacaatcaaacctataacattaatatcaaacaatccaaaaaatgaaatcagtggagtagtaaacgcgtacataactcctggataacgtttagcagctgccgttcctattctagaccaaaaattcggtttcatgttttcgaagcggtgttctgcaacaagtcggggatcgtgttctacatatttggcggcgttatccagtatctgcctattgatcttcatttcgttttcgattctggctatttcaaaataaaatcccgatgatagacctccagactttataatttcatctacgatgttcagcgccgtagtaactctaataatataggctgataagctaacatcataccctcctgtatatgtgaatatggcatgatttttgtccattacaagctcggttttaactttattgcctgtaataatttctctcatctgtaggatatctatttttttgtcatgcattgccttcaagacgggacgaagaaacgtaatatcctcaataacgttatcgttttctacaataactacatattctacctttttattttctaactcggtaaaaaaattagaatcccatagggctaaatgtctagcgatatttcttttcgtttcctctgtacacatagtgttacaaaaccctgaaaagaagtgagtatacttgtcatcatttctaatgtttcctccagtccactgtataaacgcataatccttgtaatgatctggatcatccttgactaccacaacatttcttttttctggcataacttcgttgtcctttacatcatcgaacttctgatcattaatatgctcatgaacattaggaaatgtttctgatggaggtctatcaataactggcacaacaataacaggagttttcaccgccgccatttagttattgaaattaatcatatacaactctttaatacgagttatattttcgtctatccattgtttcacatttacatatttcgacaaaaagatataaaatgcgtattccaatgcttctctgtttaatgaattactaaaatatacaaacacgtcactgtctggcaataaatgatatcttagaatattgtaacaatttattttgtattgcacatgttcgtgatctatgagttcttcttcgaatggcataggatctccgaatctgaaaacgtataaataggagttagaataataatatttgagagtattggtaatatataaactctttagcggtataattagtttttttctctcaatttctatttttagatgtgatggaaaaatgactaattttgtagcattagtatcatgaactctaatcaaaatcttaatatcttcgtcacacgttagctctttgaagtttttaagagatgcatcagttggttctacagatggagtaggtgcaacaattttttgttctacacatgtatgtactggagccattgttttaactataatggtgcttgtatcgaaaaactttaatgcagatagcggaagctcttcgccgcgactttctacattgtaattgggttctaacgccgatctctgaatggatactagttttctaagttctaatgtgattctctgaaaatgtaaatccaattcctccggcattatagatgtgtatacatcggtaaataaaactatagtatccaacgatcccttctcgcaaattctagtcttaaccaaaaaatcgtatataaccacggagatggcgtatttaagagtggattcttctaccgttttgttcttggatgtcatataggaaactataaagtccgcactactgttaagaatgattactaacgcaactatatagttcaaattaagcattttggaaacataaaataactctgtagacgatacttgactttcgaataagtttgcagacaaacgaagaaagaacagacctctcttaatttcagaagaaaactttttttcgtattcctgacgtctagagtttatatcaataagaaagttaagaattagtcggttaatgttgtatttcattacccaagtttgagatttcataatattatcaaaagacatgataatattaaagataaagcgctgactatgaacgaaatagctatatggttcgctcaagaatatagtcttgttaaacgtggaaacgataactgtatttttaatcacgtcagcggcatctaaattaaatataggtatatttattccacacactctacaatatgccacaccatcttcataataaataaattcgttagcaaaattattaattttagtgaaatagttagcgtcaactttcatagcttccttcaatctaatttgatgctcacacggtgcgaattccactctaacatcccttttccatgcctcaggttcatcgatctctataatatctagtttcttgcgtttcacaaacacgggctcgtctctcgcgatgagatctgtatagtaactatgtaaatgataactagatagaaagatgtagctatatagatgacgatcctttaagagaggtataataactttaccccaatcagataaactattgttatggtcttcggaaaaagaatttttataaatttttccagtattttccaaatatacgtacttgacatctaaaaaatccttaatgataataggaatggataatccgtctattttataaagaaatacatatcgcacattatacttttttttggaaatgggaataccgatgtgtctacataaatatgcaaagtctaaatattttttagagaatcttagttggtccaaattcttttccaagtacggtaatagatttttcatattgaacggtatcttcttaatctctggttctagttccgcattaaatgatgaaactaagtcactatttttataactaacgattacatcacctctaacatcatcatttaccagaatactgatcttcttttgtcgtaaatacatgtctaatgtgttaaaaaaaagatcatacaagttatacgtcatttcatctgtggtattcttgtcattgaaggataaactcgtactaatctcttctttaacagcctgttcaaatttatatcctatatacgaaaaaatagcaaccagtgtttgatcatccgcgtcaatattctgttctatcgtagtgtataacaatcgtatatcttcttctgtgatagtcgatacgttataaaggttgataacgaaaatatttttatttcgtgaaataaagtcatcgtaggattttggacttatattcgcgtctagtagatatgcttttatttttggaatgatctcaattagaatagtctctttagagtccatttaaagttacaaacaactaggaaattggtttatgatgtataatttttttagtttttatagattctttattctatacttaaaaaatgaaaataaatacaaaggttcttgagggttgtgttaaattgaaagcgagaaataatcataaattatttcattatcgcgatatccgttaagtttgtatcgtaatggcgtggtcaattacaaataaagcggatactagtagcttcacaaagatggctgaaatcagagctcatctaaaaaatagcgctgaaaataaagataaaaacgaggatattttcccggaagatgtaataattccatctactaagcccaaaaccaaacgagccactactcctcgtaaaccagcggctactaaaagatcaaccaaaaaggaggaagtggaagaagaagtagttatagaggaatatcatcaaacaactgaaaaaaattctccatctcctggagtcagcgacattgtagaaagcgtggccgctgtagagctcgatgatagcgacggggatgatgaacctatggtacaagttgaagctggtaaagtaaatcatagtgctagaagcgatctttctgacctaaaggtggctaccgacaatatcgttaaagatcttaagaaaattattactagaatctctgcagtatcgacggttctagaggatgttcaagcagctggtatctctagacaatttacttctatgactaaagctattacaacactatctgatctagtcaccgagggaaaatctaaagttgttcgtaaaaaagttaaaacttgtaagaagtaaatgcgtgcacttttttataaagatggtaaactctttaccgataataattttttaaatcctgtatcagacgataatccagcgtatgaggttttgcaacatgttaaaattcctactcatttaacagatgtagtagtatatgaacaaacgtgggaggaggcgttaactagattaatttttgtgggaagcgattcaaaaggacgtagacaatacttttacggaaaaatgcatgtacagaatcgcaacgctaaaagagatcgtatttttgttagagtatataacgttatgaaacgaattaattgttttataaacaaaaatataaagaaatcgtccacagattccaattatcagttggcggtttttatgttaatggaaactatgttttttattagatttggtaaaatgaaatatcttaaggagaatgaaacagtagggttattaacactaaaaaataaacacatagaaataagtcccgatgaaatagttatcaagtttgtaggaaaggacaaagtttcacatgaatttgttgttcataagtctaatagactatataagccgctattgaaactgacggatgattctagtcccgaagaatttctgttcaacaaactaagtgaacgaaaggtatacgaatgtatcaaacagtttggtattagaatcaaggatctccgaacgtatggagtcaattatacgtttttatataatttttggacaaatgtaaagtccatatctcctcttccatcaccaaaaaagttaatagcgttaactatcaaacaaactgctgaagtggtaggtcatactccatcaatttcaaaaagagcttacatggcaacgactattttagaaatggtaaaggataaaaattttttagatgtagtatctaaaactacgttcgatgaattcctatctatagtcgtagatcacgttaaatcatctacggatggatgatatagatctttacacaaataattacaagaccgataaatggaaatggataagcgtatgaaatctctcgcaatgacagctttcttcggagagctaaacacattagatattatggcattgataatgtctatatttaaacgccatccaaacaataccattttttcagtggataaggatggtcagtttatgattgatttcgaatacgataattataaggcttctcaatatttggatctgaccctcactccgatatctggagatgaatgcaagactcacgcatcgagtatagccgaacaattggcgtgtgtggatattattaaagaggatattagcgaatatatcaaaactactccccgtcttaaacgatttataaaaaaataccgcaatagatcagatactcgtatcagtcgagatacagaaaagcttaaaatagctctagctaaaggcatagattacgaatatataaaagacgcttgttaataagtaaatgaaaaaaaactagtcgtttataataaaacacaatatggatgccaacatagtatcatcttctactattgcaacgtatatagacgctttagcaaagaatgcttcagaattagaacagaggtctaccgcatacgaaataaataatgaattggaactagtatttattaagccgccattaattactttgacaaatgtagtgaatatctctacgattcaggaatcgtttattcgatttaccgttactaataaggaaggtgtcaaaattagaactaagattccattatctaaggtacatggtctagatgtaaaaaatgtacagttagtagatgctatagataacatagtttgggaaaagaaatcattagtgacggaaaatcgtcttcacaaagaatgcttgttgagactatcgacagaggaacgtcatatatttttggattacaagaaatatggatcctctatccgactagaattagtcaatcttattcaagcaaaaacaaaaaactttacgatagactttaagctaaaatattttctaggatccggtgcccaatctaaaagttctttgttgcacgctattaatcatccaaagtcaaggcctaatacatctctggaaatagaattcacacctagagacaatgaaaaagttccatatgatgaactaataaaggaattgacgactctatcacgtcatatatttatggcttctccagagaatgtaattctttctccgcctattaacgcacctataaagacttttatgttgcctaaacaagatatagtaggtctggatctggaaaatctatatgccgtaactaagactgacggcattcctataactatcagagttacatcaaacgggttgtattgttattttacacatcttgggtatattattagatatccagttaagagaataatagattccgaagtagtagtctttggtgaggcagttaaggataagaactggaccgtatatctcattaagctaatagagcctgtgaatgcaatcaatgatagactagaagaaagtaagtatgttgaatctaaactagtggatatttgtgatcggatagtattcaagtcaaagaaatatgaaggtccgtttactacaactagtgaagtcgtcgatatgttatctacatatttaccaaagcaaccagaaggtgttattctgttctattcaaagggacctaaatctaacattgattttaaaattaaaaaggaaaatactatagaccaaactgcaaatgtagtatttaggtacatgtccagtgaaccaattatctttggagaatcgtctatctttgtagagtataagaaatttagcaacgataaaggctttcctaaagaatatggttctggtaagattgtgttatataacggcgttaattatctaaataatatctattgtttggaatatattaatacacataatgaagtgggtattaagtccgtggttgtacctattaagtttatagcagaattcttagttaatggagaaatacttaaacctagaatcgataaaaccatgaaatatattaactcagaagattattatggaaatcaacataatatcatagtcgaacatttaagagatcaaagcatcaaaataggagatatctttaacgaggataaactatcggatgtgggacatcaatacgccaataatgataaatttagattaaatccagaagttagttattttacgaataaacgaactagaggaccgttgggaattttatcaaactacgtcaagactcttcttatttctatgtattgttccaaaacatttttagacgattccaacaaacgaaaggtattggcgattgattttggaaacggtgctgacctggaaaaatacttttatggagagattgcgttattggtagcgacggatccggatgctgatgctatagctagaggaaatgaaagatacaacaaattaaactctggaattaaaaccaagtactacaaatttgactacattcaggaaactattcgatccgatacatttgtctctagtgtcagagaagtattctattttggaaagtttaatatcatcgactggcagtttgctatccattattcttttcatccgagacattatgctaccgtcatgaataacttatccgaactaactgcttctggaggcaaggtattaatcactaccatggacggagacaaattatcaaaattaacagataaaaagacttttataattcataagaatttacctagtagcgaaaactatatgtctgtagaaaaaatagctgatgatagaatagtggtatataatccatcaacaatgtctactccaatgactgaatacattatcaaaaagaacgatatagtcagagtgtttaacgaatacggatttgttcttgtagataacgttgatttcgctacaattatagaacgaagtaaaaagtttattaatggcgcatctacaatggaagatagaccgtctacaaaaaactttttcgaactaaatagaggagccattaaatgtgaaggtttagatgtcgaagacttacttagttactatgttgtttatgtcttttctaagcggtaaataataatatggtatgggttctgatatccccgttctaaatgcattaaataattccaatagagcgatttttgttcctataggaccttccaactgtggatactctgtattgttaatagatatattaatacttttgtcgggtaacagaggttctacgtcttctaaaaataaaagtttgataacatctggcctgttcataaataaaaacttggcgattctatatatactcttattatcaaatctagccattgtcttatagatgtgagctactgtaggtgtaccatttgattttctttctaatactatatatttctctcgaagaagttcttgcacatcatctgggaataaaatactactgttgagtaaatcagttattttttttatatcgatattgatggacatttttatagttaaggataataagtatcccaaagtcgataacgacgataacgaagtatttatacttttaggaaatcacaatgactttatcagatcaaaattaacaaaattaaaggagcatgtatttttttctgaatatattgtgactccagatacatatggatctttatgcgtcgaattaaatgggtctagttttcagcacggtggtagatatatagaggtggaggaatttatagatgctggaagacaagttagatggtgttctacatccaatcatatatctgaagatatacccgaagatatacacactgataaatttgtcatttatgatatatacacttttgacgctttcaagaataaacgattggtattcgtacaggtacctccgtcgttaggagatgatagctatttgactaatccgttattgtctccgtattatcgtaattcagtagccagacaaatggtcaatgatatgatttttaatcaagattcatttttaaaatatttattagaacatctgattagaagccactatagagtttctaaacatataacaatagttagatacaaggataccgaagaattaaatctaacgagaatatgttataatagagataagtttaaggcgtttgtattcgcttggtttaacggcgtttcggaaaatgaaaaggtactagatacgtataaaaaggtatctaatttgatataatgaattcagtgactgtatcacacgcgccatatactattacttatcacgatgattgggaaccagtaatgagtcaattggtagagttttataacgaagtagccagttggctgctacgagacgagacgtcgcctattcctgataagttctttatacagttgaaacaaccgcttagaaataaacgagtatgtgtgtgcggtatagatccgtatccgaaagatggaactggtgtaccgttcgaatcaccaaattttacaaaaaaatcaattaaggagatagcttcatctatatctagattaaccggagtaattgattataaaggttataaccttaatataatagacggggttataccctggaattattacttaagttgtaaattaggagaaacaaaaagtcacgcgatctactgggataagatttccaagttactgctgcagcatataactaaacacgttagtgttctttattgtttgggtaaaacagatttctcgaatatacgggcaaagttagaatccccggtaactaccatagtgggatatcatccagcggctagagaccgtcaattcgagaaagatcgatcatttgaaattatcaacgttttactggaattagacaacaaggtacctataaattgggctcaagggtttatttattaatgctttagtgaaattttaacttgtgttctaaatggatgcggctattagaggtaatgatgttatctttgttcttaagactataggtgtcccgtcagcgtgcagacaaaatgaagatccaagatttgtagaagcatttaaatgcgacgagttagaaagatatattgagaataatccagaatgtacactattcgaaagtcttagggatgaggaagcatactctatagtcagaattttcatggatgtagatttagacgcgtgtctagacgaaatagattatttaacggctattcaagattttattatcgaggtgtcaaactgtgtagctagattcgcgtttacagaatgcggcgccattcatgaaaatgtaataaaatccatgagatctaatttttcattgactaagtctacaaatagagataaaacaagttttcatattatctttttagacacgtataccactatggatacattgatagctatgaaacgaacactattagaattaagtagatcatctgaaaatccactaacaagatcgatagacactgccgtatataggagaaaaacaactcttcgggttgtaggtactaggaaaaatccaaattgcgacactattcatgtaatgcaaccacctcatgataatatagaagattacctattcacttacgtggatatgaacaacaatagttattacttttctctacaacgacgattggaggatttagttcctgataagttatgggaaccagggtttatttcattcgaagacgctataaaaagagtttcaaaaatattcattaattctataataaactttaatgatctcgatgaaaataattttacaacggtaccactggtcatagattacgtaacaccttgtgcattatgtaaaaaacgatcgcataaacatccgcatcaactatcgttggaaaatggtgctattagaatttacaaaactggtaatccacatagttgtaaagttaaaattgttccgttggatggtaataaactgtttaatattgcacaaagaattttagacactaactctgttttattaaccgaacgaggagaccatatagtttggattaataattcatggaaatttaacagcgaagaacccttgataacaaaactaattttgtcaataagacatcaactacctaaggaatattcaagcgaattactctgtccaagaaaacgaaagactgtagaagctaacatacgagacatgttagtagattcagtggagaccgatacctatccggataaacttccgtttaaaaatggtgtattggacctggtagacggaatgttttactctggagatgatgctaaaaaatatatgtgtactgtatcaaccggatttaaatttgacgatacaaagttcgtcgaagacagtccagaaatggaagagttaatgaatatcattaacgatatccaaccattaacggatgaaaataagaaaaatagagagctatatgaaaaaacattatctagttgtttatgcggtgctaccaaaggatgtttaacattcttttttggagaaactgcaactggaaagtcgacaaccaaacgtttgttaaagtctgctatcggtgacctgtttgttgagacgggtcaaacaattttaacagatgtattggataaaggacctaatccatttatcgctaacatgcatttgaaaagatctgtattctgtagcgaactacctgattttgcatgtagtgggtcaaagaaaatcagatctgataatattaaaaagttgacagaaccttgtgtcattggaagaccgtgtttctccaataaaattaataatagaaaccatgcgacaatcattatcgatactaattacaaacctgtttttgataggatagataacgcattaatgagaagaattgccgtcgtgcgattcagaacacacttttctcaaccttctggtagagaggctgctgaaaataatgacgcgtacgataaagtcaaactattagacgaggggttagatggtaaaatacaaaataatagatatagattcgcatttctatacttgttggtgaaatggtacagaaaatatcatgttcctattatgaaactatatcctacacccgaagagattcctgactttgcattctatctcaaaataggtactctgttggtatctagctctgtaaagcatattccattaatgacggacctctccaaaaagggatatatattgtacgataatgtggtcactcttccgttgactactttccaacagaaaatatccaagtattttaattctagactatttggacacgatatagagagcttcatcaatagacataagaaatttgccaatgttagtgatgaatatctgcaatatatattcatagaggatatttcatctccgtaaatatatgctcatatatttatagaagatatcacatatctaaatgaataccggaattatagatttatttgataatcatgttgatagtataccaactatattacctcatcagttagctactctagattatctagttagaactatcatagatgagaacagaagcgtgttattgttccatattatgggatcaggtaaaacaataatcgctttgttgttcgccttggtagcttccagatttaaaaaggtttacattctagtgccgaacatcaacatcttaaaaattttcaattataatatgggtgtagctatgaacttgtttaatgacgaattcatagctgagaatatctttattcattccacaacaagtttttattctcttaattataacgataacgtcattaattataacggattatctcgctacaataactctatttttatcgttgatgaggcacataatatctttgggaataatactggagaacttatgaccgtgataaaaaataaaaacaagattccttttctactattgtctggatctcccattactaacacacctaatactctgggtcatattatagatttaatgtccgaagagacgatagattttggtgaaattattagtcgtggtaagaaagtaattcagacacttcttaacgaacgcggtgtgaatgtacttaaggatttgcttaaaggaagaatatcatattacgaaatgcctgataaagatctaccaacgataagatatcacggacgtaagtttctagatactagagtagtatattgtcacatgtctaaacttcaagagagagattatatgattactagacgacagctatgttatcatgaaatgtttgataaaaatatgtataacgtgtcaatggcagtattgggacaacttaatctgatgaataatttagatactttatttcaggaacaggataaggaattgtacccaaatctgaaaataaataatggcgtgttatacggagaagaattggtaacgttaaacattagttccaaatttaaatactttattaatcggatacagacactcaacggaaaacattttatatacttttctaattctacatatggcggattggtaattaaatatatcatgctcagtaatggatattctgaatataatggttctcagggaactaatccacatatgataaacggcaaaccaaaaacatttgctatcgttactagtaaaatgaaatcgtctttagaggatctattagatgtgtataattctcctgaaaacgatgatggtagtcaattgatgtttttgttttcatcaaacattatgtccgaatcctatactctaaaagaggtaaggcatatttggtttatgactatcccagatactttttctcaatacaaccaaattcttggacgatctattagaaaattctcttacgccgatatttctgaaccagttaatgtatatcttttagccgccgtatattccgatttcaatgacgaagtgacgtcattaaacgattacacacaggatgaattaattaatgttttaccatttgacatcaaaaagctgttatatctaaaatttaagacgaaagaaacgaatagaatatactctattcttcaagagatgtctgaaacgtattctcttccaccacatccatcaattgtaaaagttttattgggagaattggtcagacaatttttttataataattctcgtattaagtataacgataccaagttacttaaaatggttacatcagttataaaaaataaagaagacgctaggaattacatagatgatattgtaaacggtcacttctttgtatcgaataaagtatttgataaatctcttttatacaaatacgaaaacgatattattacagtaccgtttagactttcctacgaaccatttgtttggggagttaactttcgtaaagaatataacgtggtatcttctccataaaactgatgagatatataaagaaataaatgtcgagctttgttaccaatggataccttccagttacattggagccacacgagctgacgttagacataaaaactaatattaggaatgccgtatataagacgtatctccatagagaaattagtggtaaaatggccaagaaaatagaaattcgtgaagacgtggaattacctctcggcgaaatagttaataattctgtagttataaacgttccgtgtgtaataacctacgcgtattatcacgttggggatatagttagaggaacattaaacatcgaagatgaatcaaatgtaactattcaatgtggagatttaatctgtaaactaagtagagattcgggtactgtatcatttagcgattcaaagtactgcttttttcgaaatggtaatgcgtatgacaatggcagcgaagtcactgccgttctaatggaggctcaacaaggtatcgaatctagttttgtttttctcgcgaatatcgtcgactcataagaaagagaatagcggtaagtataaacacgaatactatggcaataattgcgaatgttttattcccttcgatatatttttgataatatgaaaaacatgtctctctcaaatcggacaaccatctcataaaatagttatctcgcgctggcgaggtggttgccgctcgtataatctccccagaataatatacttgcgtgtcgtcgttcaatttatacggatttctatagttctctgttatataatgcggttttccatcatgattagacgacgacaatagtgttctaaatttagatagttgatcagaatgaatgtttattggcgttggaaaaattatccatgctgcgtctgcagagtggttgatagttgttcctagatatgtaaaataatccaacgtactaggtagcaaattgtctagataaaatactgaatcaaacggcgcagacgtattagcggatctaatggaatccaattgattgactatcttttgaaaatatacatttttatgatccgatacttgtaagaatatagaaataatgataagtccatcatcgtgtttttttgcctcttcataagaactatattttttcttattccaatgaacaagattaatctctccagagtatttgtacacatctatcaagtgattggatccataatcgtcttcctttccccaatatatatgtagtgatgataacacatattcattggggagaaaccctccacttatatatatcctcctttaaaattaatccttactagttttccagtgttctggatagtggttggtttcgactcattataatgtatgtctaacggcttcaatcgcgcgttagaaattgcttttttagtttctatattaataggagatagttgttgcggcatagtaaaaatgaaatgataactgtttaaaaatagctcttagtatgggaattacaatggatgaggaagtgatatttgaaactcctagagaattaatatctattaaacgaataaaagatattccaagatcaaaagacacgcatgtgtttgctgcgtgtataacaagtgacggatatccgttaataggagctagaagaacttcattcgcgttccaggcgatattatctcaacaaaattcagattctatctttagagtatccactaaactattacggtttatgtactacaatgaactaagagaaatctttagacggttgagaaaaggttctatcaacaatatcgatcctcactttgaagagttaatattattgggtggtaaactagataaaaaggaatctattaaagattgtttaagaagagaattaaaagaggaaagtgatgaacgtataacagtaaaagaatttggaaatgtaattctaaaacttacaacacgggataaattatttaataaagtatatataggttattgcatggcgtgttttattaatcaatcgttggaggatttatcgcatactagtatttacaatgtagaaattagaaagattaaatcattaaatgattgtattaacgacgataaatacgaatatctgtcttatatttataatatgctagttaatagtaaatgaacttttacagatctagtataattagtcagattattaagtataatagacgactagctaagtctattatttgcaaggatgactctcaaattattacactcacggcattcgttaaccaatgcctatggtgtcataaacgagtatccgtgtccgctattttattaactactgataacaaaatattagtatgtaacagacgagatagttttctctattctgaaataattagaactagaaacatgtttagaaagaaacgattatttctgaattattccaattatttgtccaaacaggaaagaagtatactatcgtcatttttttctctatatccagctactgctgataatgatagaatagacgctatttatccgggtggcatacccaaaaggggtgagaatgttccagagtgtctatccagggaaatcaaagaagaagttaatatagacaattcttttgtattcatagacactcggttttttattcatggtatcatagaagataccattatcaacaaattttttgaggtaattttctttgtcggaagaatatctctaacgagtgatcaaattattgatacctttaaaagtaatcatgaaatcaaggatctaatatttttagatccgaattcaggtaatggactccaatacgaaattgcaaaatatgctctagatactgcaaaacttaaatgttacggccatagaggatgttattatgaatcattaaaaaaattaactgaggatgattgattagaaaatataaattaatttaccatcgtgtatttttataacgggattgtccggcatatcatgtagatagttaccgtctacatcgtatactcgaccatctacgcctttaaatcctctatttattgacattaatctattagaattggaataccaaatattagtaccctcaattagtttattggtaatattttttttagacgatagatcgatggctcttgaaaccaaggttttccaaccggactcattgtcgatcggtgagaagtctttttcattagcatgaatccattctaatgatgtatgtttaaacactctaaacaattggacaaattcttttgatttgctttgaatgatttcaaataggtcttcgtctacagtaggcataccattagataatctagccattataaagtgcacgtttacatatctacgttctggaggagtaagaacgtgactattgagacgaatggctcttcctactatctgacgaagagacgcctcgttccatgtcatatctaaaatgaagatatcattaattgagaaaaaactaataccctcgcctccactagaagagaatacgcatgttttaatgcattctccgttagtgtttgattcttggttaaactcagccaccgccttgattctagtatcttttgttctagatgagaactctatattagagataccaaagactttgaaatatagtaataagatttctattcctgactgattaacaaatggttcaaagactagacatttaccatgggatgctaatattcccaaacatacatctataaatttgacgcttttctcttttaattcagtaaatagagagatatcagccgcactagcatcccctttcaatagttctccctttttaaaggtatttaatgcggatttagaaaactctctatctcttaatgaatttttaaaatcattatatagtgttgctatctcttgcgcgtattcgccgggatcacgattttgtctttcaggaaagctatcgaacgtaaacgtagtagccatacgtctcagaattctaaatgatgatataccagtttttatttctgcgagtttagccttttgataaatctcttcttgcttttttgacatattaacgtatcgcattaatactgttttcttagcgaatgatgcagacccttctacgttatcaaaaatagaaaactcgttattaactatgtacgaacataggcctcctagtttggagactaattctttttcatcgactagacgtttattctcaaatagtgattggtgttgtaaggatcctggtcgtagtaagttaaccaacatggtgaattcttgcacactattgacgataggtgtagccgataaacaaatcatcttatggttttttaatgcgatggtcttggataaaaaattatatactgaacgagtaggacggatcttaccatcttctttgattaatgatttagaaatgaagttatgacattcatcaataatgacgcatattctactcttggaattaatagttttgatattagtaaaaaatttatttctaaaattttgatcatcgtaattaataaaaatacaatccttcgttatctctggagcgtatctgagtatagtgttcatccaaggatcttctatcaaagcctttttcaccaataagataatagcccaattcgtataaatatccttaagatgtttgagaatatatacagtagtcattgttttaccgacacccgtttcatggaacaataaaagagaatgcatactgtctaatcctaagaaaactcttgctacaaaatgttgataatccttgaggcgtactacgtccgaccccatcatttcaacgggcatattagtagttctgcgtaaggcataatcgatataggccgcgtgtgatttactcatttatgagtgataagtaataactatgttttaaaaatcacagcagtagtttaactagtcttctctgatgtttgttttcgatactttttgaatcagaagtcatactagaataaagcaacgagtgaacgtaatagagagcttcgtatactctattcgaaaactctaagaacttattaatgaattccgtatccactggattgtttaaaatactaaattgaacactgttcacatccttccaagaagaagacttagtgacggacttaacatgagacataaataaatccaaattttttttacaaacatcactagccaccataatggcgctatctttcaaccagctatcgcttacgcattttagcagtctaacatttttaaagagactacaatatattctcatagtatcgattacacctctaccgaataaagttggaagtttaataatacaatatttttcgtttacaaaatcaaataatggtcgaaacacgtcgaaggttaacatcttataatcgctaatgtatagattgttttcagtgagatgattattagatttaatagcatctcgttcacgtttgaacagtttattgcgtgcgctgaggtcggcaactacggcgtccgctttagtactcctcccataatactttacgctattaatctttaaaatttcatagactttatctagatcgctttctggtaacatgatatcatgtgtaaaaagttttaacatgtcggtcggcattctatttagatcattaactctagaaatctgaagaaagtaattagctccgtattccagactaggtaatgggcttttacctagagacagattaagttctggcaatgtttcataaaatggaagaaggacatgcgttccctcccggatattttttacaatttcatccatttacaactctatagtttgttttcattattattattagttattatctcccataatcttggtaatacttaccccttgatcgtaagataccttatacaggtcattacatacaactaccaattgtttttgtacataatagattggatggttgacatccatggtggaataaactactcgaacagatagtttatctttccccctagatacattggccgtaatagttgtcggcctaaagaatatctttggtgtaaagttaaaagttagggttcttgttccattattgctttttgtcagtagttcattataaattctcgagatgggtccgttctctgaatatagaacatcatttccaaatctaacttctagtctagaaataatatcggtcttattcttaaaatctattcccttgatgaagggatcgttaatgaacaaatccttggcctttgattcggctgatctattatctccgttatagacgttacgttgactagtccaaagacttacaggaatagatgtatcgatgatgttgatactatgtgatatgtgagcaaagattgttctcttagtggcatcactatatgttccagtaatggcggaaaactttttagaaatgttatatataaaagaattttttcgtgttccaaacattagcagattagtatgaagataaacactcatattatcaggaacattatcaatttttacatacacatcagcatcttgaatagaaacgataccatcttctggaacctcaacaatctcggcagactccggataaccagtcggtggaccatcgctaacaataactagatcatccaacaatctactcacatatgcatctatataatctttttcatcttgtgagtaccctggatacgaaataaatttattatccgtatttccataataaggtttagtataaacagagagcgatgttgccgcatgaacttcagttacagtcgccgttggttggtttatttgacctattactctcctaggtttctctataaacgatggtttaatttgtacattcttaaccatatatccaataaagctcaattcaggaacataaacaaattctttgttgaacgtttcaaagtcgaacgaagagtcacgaataacgatatcggatactggattgaaggttaccgttacggtaatttttgaatcggatagtttaagactgctgaatgtatcttccacatcaaacggagttttaatataaacgtatactgtagatggttctttaatagtgtcattaggagttaggccaatagaaatatcattaagttcactagaatatccagagtgtttcaaagcaattgtattattgatacaattattatataattcttcgccctcaatttcccaaataacaccgttacacgaagagatagatacgtgattaatacatttatatccaacatatggtacgtaaccgaatcttcccatacctttaacttctggaagttccaaactcagaaccaaatgattaagcgcagtaatatactgatccctaatttcgaagctagcgatagcctgattgtctggaccatcgtttgtcataactccggatagagaaatatattgcggcatatataaagttggaatttgactatcgactgcgaagacattagaccgtttaatagagtcatccccaccgatcaaagaattaatgatagtattattcattttctatttaaaatggaaaaagcttacaataaactccgtagagaaatatctataatttgtgagttttccttaaagtaacagcttccgtaaacgccgtctttatctcttagtaagtttattgtatttataaccttttccttatcttcatagaatactaaaggcaacaaagaaatttttggttcttctctaagagctacgtgagacttaaccatagaagccaacgaatccctacatattttagaacagaaataccctacttcaccacccttgtatgtctcaatactaataggtctaaaaaccaaatcttgattacaaaaccaacacttatcaattacactatttgtcttaatagacacatctgccatagatttataatactttggtagtatacaagcgagtgcttcttctttagcgggcttaaagactgctttaggtgctgaaataaccacatctggaaggcttactcgcttagccatttaattacggaactatttttttatacttctaatgagcaagtagaaaacctctcatctacaaaaacatactcgtgtccataatcctctaccatagttacacgttttttagatctcatatgtgctaaaaagttttcccatactaattggttactattatttttcgtataatttttaacagtttgaggttttagatttttagttacagaagtgatatcgaatattttatccaaaaagaatgaataattaattgtcttagaaggagtgttttcttggcaaaagaataccaagtgcttaaatatttctactacttcattaatcttttctgtactcagattcagtttctcatcttttacttgattgattatttcaaagactaacttataatcctttttatttattctctcgttagccttaagaaaactagatacaaaatttgcatctacatcatccgtggatatttgatttttttccatgatatccaagagttccgagataatttctccagaacattgatgagacaataatctccgcaatacatttctcaaatgaataagtttattagacacgtggaagtttgactttttttgtacctttgtacatttttgaaataccgactcgcaaaaaatacaatattcatatccttgttcagatactataccgttgtgtctacaaccgctacataatcgtagattcatgttaacactctacgtatctcgtcgtccaatattttatataaaaacattttatttctagacgttgccagaaaatcctgtaatacttttagttttttgggctgtgaataaagtatcgccctaatatggttaccgtcctccgccaatatagtagttaaattatccgcacatgcaaaagaacaccgcttaggcggattcagtacaatgttatatttttcgtaccaactcatttaaatatcataatctaaaatagttctgtaatatgtctagcgctaatatattgatcataatcctgtgcataaattaagatacaacaatgtctcgaaatcatcgacatggcttcttccatagttagaagatcgtcgtcaaagttagcaacgtgattcatcaacatttgctgttttgaggcagcaaatactgaaccgtcgccattcaaccattcataaaaaccatcgtctgaatccattgataatttcttgtactggtttttgagagctcgcatcaatctagcatttctagctcccggattgaaaacagaaagaggatcgtacatccagggtccattttctgtaaatagaatcgtataatgtcccttcaagaagatatcagacgatccacaatcaaagaattggtctccgagtttgtaacaaactgcggactttaacctatacatgataccgtttagcataatttctggtgatacgtcaatcggagtatcatctattagagatctaaagccggtgtaacattctccaccaaacatattcttattctgacgtcgttctacataaaacatcattgctccattaacgataacaggggaatgaacagcactacccatcacattagttcccaatggatcaatgtgtgtaactccagaacatcttccatagcctatgttaggaggagcgaacaccactcttccactattgccatcgaatgccatagaataaatatccttggaattgatagaaatcggactgtcggatgttgtgatcatcttcataggattaacaacgatgtatggtgccgcctgaagtttcatatcgtaactgatgccgttcataggtctagccacagaaaccaacgtaggtctaaatccaactatagacaaaatagaagccaatatctgttcctcatctgtcataacttgagagcatccagtatgaataatcttcattagatggggatctaccgcatcatcatcgttacaataaaaaattcccattctaatgttcataattgcttttctaatcatggtatgcatgtttgctctctgaatctctgtggaaattagatctgatacacctgtaatcactatcggattatcctccgtaagacgattaaccaacaacatataattataagactttacttttctaaattcataaagttgctggattaggctataggtgtctccatgtacatacgcgttctcgagcgcaggaagtttaataccgaatagtgccatcagaataggatgaatatagtaattagtttctggttttctataaataaaagacaaatcttgtgaactagacatatcggtaaaatgcatggattggaatcgtgtagtcgacagaagaatatgatgattagatggagagtatattttatctaactctttgagttggtcaccgattctaggactagctcgagaatgaataagtactaaaggatgagtacatttcacagaaacactagcattgttcaatgtgctctttacatgggtaaggagttgaaatagctcgtttctatttgttctgacaatatttagtttattcataatgttaagcatatcctgaatagtaaagttagatgtgtcatacttgttagtagttagatatttagcaattgcattcccatcatttctcaatctcgtactccaatcatgcgtggatgctacttcgtcgatggaaaccatacaatcctttttgataggctgttgagattgattatttcctgcacgtttaggtttggtacgttgatttctagcccctgcggatataaagtcatcgtctacaatttgggacaatgaattgcatacactacaagacaaagatttatcagaagtgtgaatatgatcttcatctaccaaagaaagagtttgattagtataactagattttagtcctgcgttagatgttaaaaaaacatcgctattgaccacggcttccattatttatattcgtagtttttactcgaaagcgtgattttaatatccaatcttattacttttggaatcgttcaaaacctttgactagttgtagaatttgatctattgccctacgcgtatactcccttgcatcatatacgttcgtcaccagatcgtttgtttcggcctgaagttggtgcatatctttttcaacactcgacatgagatccttaagggccatatcgtctagattttgttgagatgctgctcctggatttggattttgttgtgctgttgtacatactgtaccaccagtaggtgtaggagtacatacagtggccacaataggaggttgaggaggtgtaaccgttggagtagtacaagaaatatttccatccgattgttgtgtacatgtagttgttggtaacgtctgagaaggttgggtagatggcggtgtcgtcgtcttttgatctttattaaatttagagataatatcctgaacagcattgctcggcgtcaacgctggaaggagtgaactcgccggcgcatcagtatctgcagacagccaatcaaaaagattagacatatcagatgatgtattagtttgttgtcgtggttttggtgtaggagcagtactactaggtagaagaataggagccgatgtaggtgtcggaaccggctgtggagttatatgaatagttggttgtagcggttggataggctgtctgctggcggccatcatattatctctagctagttgttctcgcaactgtctttgataatacgactcttgagactttagtcctatttcaatcgcttcatcctttttcgtatccggatccttttcttcagaataatagattgacgactttggtgtagaggattctgccagcccctgtgagaacttgttaaagaagtccatttaaggctttaaaattgaattgcgattataagattaaatggcagacacagacgatattatcgactatgaatccgatgatctcactgaatacgaggatgatgaagaagaggaagaagatggagagtcactagaaactagtgatatagatcccaaatcttcttataagattgtagaatcagcatccactcatatagaagatgcgcattccaatcttaaacatatagggaatcatatatctgctcttaaacgacgctatactagacgtataagtctatttgaaatagcgggtataatagcagaaagctataacttgcttcaacgaggaagattacctctagtttcagaattttctgacgaaacgatgaagcaaaatatgctacatgtaattatacaagagatagaggagggttcttgtcctatagtcatcgaaaagaacggagaattgttgtcggtaaacgattttgacaaagatggtctaaaattccatctagactatattatcaaaatttggaaacttcaaaaacgatattagaatttatacgaatatcgttctctaaatgtcacaatcaagtctcgcatgttcagcaatttattgtcgtactttatatcgtgttcattaacgatatcttgcaaaatagtaatgattctatcttccttcgatagatattcttcagagattattgtcttatattctttcttgttatcagatatgaatttgataagactttgaacattattgatacccgtctgtttaattttttctacagatattttagttttggcagattctatcgtatctgtcaatagacatccaacatcgacattcgacgtcaattgtctataaatcaacgtataaattttagaaataacattagcgaattgttgtgcattgatgtcgttattctgaaacagtatgattttaggtagcattttcttaacaaagagaacgtatttattgttactcagttgaacagatgatatatccagattactaacgcatctgattccgtataccaaactttcagaagaaatggtatacaattgtttgtattcattcaatgtctctttttcagaaattagtttagagtcgaatactgcaataattttcaagagatagttttcatcagataagattttatttagtgtagatatgataaaactattgttttgttggagaacttgatacgccgcgttctctgtagtcgacgctctcaaatgggaaacgatctccattatttttttggaatcggatactatatcttcggtatcttgacgcagtctagtatacatagagttaagagagattagagtttgtacattaagcaacatgtctctaaatgtggctacaaacttttccttttccacatcatctagtttattatataccgatttcacaacggcaccagatttaaggaaccagaatgaaaaactctgataactacaatatttcatcatagttacgattttatcatcttctatagttggtgtaatagcgcatacctttttctccaagactggaaccaacgtcataaaaatgtttaaatcaaaatccatatcaacatctgatgcgctaagaccagtctcgcgttcaagattatctttactaatggtgacgaactcatcgtatagaactctaagtttgtccattatttatttacagatttagttgtttaatttatttgtgctcttccagagttgggatagtatttttctaacgtcggtattatattattaggatctacgttcatatgtatcataatattaatcatccacgttttgataaatctatctttagcttctgaaataacgtatttaaacaaaggagaaaaatatttagctacggcatcagacgcaataacattttttgtaaatgtaacgtatttagacgacagatcttcgttaaaaagttttccatctatgtagaatccatcagttgttaacaccattcccgcgtcagattgaataggagtttgaatagtttgttttggaaatagatccttcaataacttatagttgggtgggaaaaaatcgattttatcactagactctttcttttttactatcattacctcatgaactatttcttgaatgagtatatgtattttctttcctatatcggacgcgttcattggaaaatataccatgtcgttaactataagaatatttttatcctcgtttacaaactgaataatatcagatgtagttcgtaaacgaactatatcatcaccagcacaacatctaactatatgatatccactagtttcctttagtcgtttattatcttgttccatattagcagtcattccatcatttaagaaggcgtcaaagataatagggagaaatgacattttggattctgttacaactttaccaaaattaaggatatacggacttactatctttttctcaacgtcaatttgatgaacacacgatgaaaatgtacttcgatgagattgatcatgtagaaaacaacaagggatacaatatttccgcatatcatgaaatatattaagaaatcccaccttattatatttccccaaaggatccatgcacgtaaacattatgccgttatcattaataaagacttctttctcatcggatctgtaaaagttgttactgatttttttcattccaggatctagataattaataatgatgggttttctattcttattctttgtattttggcatatcctagaccagtaaacagtttccactttggtaaaatcagcagacttttgaacgctattaaacatggcattaatggcaataactaaaaatgtaaaatatttttctatgttaggaatatggtttttcactttaatagatatatggtttttggccaaaatgatagatatttttttatccgaggatagtaaaatattattagtcgccgtctctataaaaatgaagctagtctcgatatccaattttattctagaattgataggagtcgccaaatgtaccttatacgttatatctcccttgatgcgttccatttgtgtatctatatcggacacaagatctgtaaatagttttacgttattaatcatcacggtatcgccgtcgctagataatgctaatgtaccatccaagtcccaaatggagagatttaactgttcatcgtttagaataaaatgattaccggtcatattaataaagtgttcatcgtatctagataacaacgacttataattaatgtccaagtcttgaactcgctgaatgatcttttttaacccagttagttttagattggtacgaaatatattgttaaactttgattctacagtaatgtccaaatctagttgtggaaatacttccatcaacattgtttcaaacttgataatattattatctacatcttcatacgatccaaattccggaatagatgtatcacatgctcttgccacccagataaccaaaaagtcacacgctccaggatatacattgtataaaaagctatcgtttttaagtagggtttttttctgcgtgtatacgaagggattaaaaatagtattatcaacgtaactatattccaaattattcttatgagaatagataataatatcgtccttaatatctaacaaatttcctaaatatccctttaattgagtcattcgaagcgtcaatagaatatgtctcttaactatttccggctgttgtatatttaaatgacttcgtaaaaaataatatatgggcgacttctcatctatgtaatcatatggagtgagatatagggctcgttctacctcctgccccttacccacctgtaataccaattgcggacttactatatatcgcatatttatatcgtggggtaaagtgaaaatctactaccgatgatgtaagtcttacaatgttcgaaccagtaccagatcttaatttggaggcctccgtagaactaggggaggtaaatatagatcaaacaacacctatgataaaggaaaatagcggttttatatcccgtagtagacgtctattcgcccatagatctaaggatgatgagagaaaactagcactacgattctttttacaaagactttattttttagatcatagagagattcattatttgttcagatgcgttgacgctgtaaaagacgtcactattaccaaaaaaaataacattatcgtggcgccttatatagcacttttaactatcgcatcaaaaggatgcaaacttacagaaacaatgattgaagcattctttccagaactatataatgaacatagtaagaaatttaaattcaactctcaagtatccatcatccaagaaaaactcggataccagtttggaaactatcacgtttatgattttgaaccgtattactctacagtagctctggctattcgagatgaacattcatctggcatttttaatatccgtcaagagagttatctggtaagttcattatctgaaataacatatagattttatctaattaatctaaaatctgatcttgttcaatggagtgctagtacgggcgctgtaattaatcaaatggtaaatactgtattgattacagtgtatgaaaagttacaactggtcatagaaaatgattcacaatttacatgttcattggctgtggaatcagaacttccaataaaattacttaaagatagaaatgaattatttacaaaattcatcaacgagttaaaaaagaccagttcattcaagataagcaaacgcgataaggatacgctactaaaatattttacttaggactggagttagaatttatagacgactcatttcgtttatcattattactaccatcattattagtattcttcttgttatcttgttcagaaatatacagcaatgctatgcctaatactaaatacattatcatgcttgcaatggctctaacaacgacgaaccaaaatgaatttggtcgtagcttttgttcacaaaaatacataaagaaatgtctacataaatctatggcgccattggctacttgaaatagcgccagtcctcctacagattttaatatagctgtataacatgacatttattcatcatcaaaagagacagagtcaccatctgtcatatttagattttttttcatgtgttcaaagtatcctctactcatttcattataatagtttatcatacttagaattttaggacggatcaatgagtaagacttgactagatcgtcagtagtaatttgtgcatcgtctattctgcatccgcttcgtcgaataatgtatagcatcgctttgagattctccatagctatcaagtctttatacaatgacatggaaatatctgtgaatactttatacttctccaacatcgatgccttaacatcatcgcctactttagcattgaaaatacgttctattgtgtagatggatgtagcaagatttttaaacaacaatgccatcttacacgatgattgcctcaagtctccaatcgtttgtttagaacgattagctacagagttcaacgcttggctgactagcatattattatctttagaaattgtattcttcaatgaagcgtttatcatatctgtgatttcgttagtcatattacagtctgactgggttgtaatgttatccaacatatcacctatggatacggtacacgtaccagcatttgtaataatcctatctaagatgttgtatggcattgcgcagaaaatatcttctcctgtaatatctccactctcgataaatctactcagattattcttaaatgccttattctctggagaaaagatatcagtgtccatcatttcattaatagtatacgcagaaaagataccacgagtatcaattctatccaagatacttatcggttccgagtcacagataatggtttcctctccttcgggagatcctgcatagaaatatctaggacaatagtttctatactgtctgtaactctgataatctctaaagtcactaactgataccatgaaattgagaagatcaaacgctgaagtaatcaatttttctgcctcgtttttactacaactagttttcatcaatgtagtgacgatgtattgtttagttactcttggtctaatactgatgatagagatattattacttcccataatggatcttctagtagtcaccttaaagcccattgatgcaaatagcagatagataaagtcttggtatgactcctttctaatatagtacggactacctttgtcacccaactttatacccacataagccataacaacctctttaatagccgtttcatgaggtttatcagccatgagcctgagtagttggaagaatctcatgaatcccgtctcagaaagtcctatatgcatgatagatttatctttcctgggaaactctcgtatagtcatagatgaaatactcttcaaagtttctgaaataagattagtaacagtcttacctccgactactctgggtaacaaacatactctaataggtgttttctctgcggagataatatcagaaaggatagagcaataagtagtattattgtgattataaagaccgaatacataacaggtagaatttataaacatcatgtcctgaaggtttttagacttgtattcctcgtaatccataccgtcccaaaacatggatttggtaactttgatagccgtagatctttgttccttcgccaacaggttaaagaaattaataaagaatttgttgtttctatttatgtccacaaattgcacgtttggaagcgtaactgttacgttcactgcagcattttgaggatcgcgagtatgaagtacgatgttattgtttactggtatatctggaaagaaatctaccagtctaggaataagagattgatatcgcatagaaatagtaaagtttataatctcatcatcgaagagcattttgttaccattgtaataaatatccactctgtcatatgtataaatgaagtactgttcaaacatgatgagatgtttatatgttggcatagtagtgagatcgacgtttggtaatggcaatgtattaagattaactccataatgtctagcagcatctgcgatgttataagtgtcgtcaaagcggggtcgatcttgtgctgttatatattgtctaacacctataagattatcaaaatcttgtctgcttaatacaccgttaacaatttttgccttgaattcttttattggtgcattaataacatccttatagaggatgttaaacaaataagtgttatcaaagttaagatctggatatttcttttctgctagaacatccattgagtcggagccatctggtttaatataaccaccgataaatctagctctgtattctgtatccgtcaatctaatattaagaaggtgttgagtgaaaggtggaagatcgtaaaagctgtgagtattaatgataggattagtttccgaactaatgttaattggggtattaataatatctatatttccagcgttaagtgtaacattaaacagttttaattcacgtgacgtggtatcaattaaataattaatgcccaatttggatatagcagcctgaagctcatcttgtttagttacggatcctaatgagttattaagcaatatatcgaacggatgaacgaaggttgttttaagttggtcacatactttgtaatctagacatagatgcggaagaacggtagaaactatacgaaataaatattcagagtcctctaattgatcaagagtaactattgacttaataggcatcatttatttagtattaaatgacgaccgtaccagtgacggatatacaaaacgatttaattacagagttttcagaagataattatccatctaacaaaaattatgaaataactcttcgtcaaatgtctattctaactcacgttaacaacgtggtagatagagaacataatgccgccgtagtgtcatctccagaggaaatatcctcacaacttaatgaagatctatttccagatgatgattcaccggccactattatcgaacgagtacaacctcatactactattattgacgatactccacctcctacttttcgtagagagttattaatatcggaacaacgtcaacaacgagaaaaaagatttaatattacagtatcgaaaaatgctgaagcaataatggaatctagatctatgataacttctatgccaacacaaacaccatccttgggagtagtttatgataaagataaaagaattcagatgttagaggatgaagtggttaatcttagaaatcaacgatctaatacaaaatcatctgataatttagataattttaccaaaatactatttggtaagactccgtataaatcaacagaagttaataagcgtatagccatcgttaattatgcaaatttgaacgggtcccccttatcagttgaggacttggatgtttgttcggaggatgaaatagatagaatctataaaacgattaaacaatatcacgaaagtagaaaacgaaaaattatcgtcactaacgtgattattattgtcataaacattatcgagcaggcattgctaaaactcggatttgaagaaatcaaaggactgagtaccgatatcacttcagaaattatcgatgtggagatcggagatgactgcgatgctgtagcatctaaactaggaatcggtaacagtccggttcttaatattgtattgtttatactcaagatattcgttaaacgaattaaaattatttaatttaatacattcccatatccagacaacaatcgtctggattaatctgttcctgtcgtctcataccggacgacatattaatctttttattagtaggcatctttttagatggtttctttttcccagcattaactgagtcgatacctagaagatcgtgattgatctctccgaccattccacgaacttctaattggccgtctctgacggtaccataaactattttaccagcattagtaacagcttggacaatctgaccatccattgcgttgaatgatgtagttgctgttgttctacgtttaggagcaccagaagtatttttggagcccttggaggctgatgtagaagaagacgaggattttgatttacatgtaatacattttgtactctttgattttgtatcacatgcgccggcagtcacatttgtttgagaattaagattattgttgcctcctttgacggctgcatctccaccgatttgcgctagtagatttttaagctgtggtgtaatcttattaactgtttcgatataatcatcgtaactgcttctaacggctaaattttttttatccgccatttagaagctaaaaatatttttatttatgcagaagatttaactagattatacaatgaactaatatgatccttttccagattatttacaaacttggtattttttggttctggaggaggcgaatttaaattcggacttggattcggattttgtgagttcttgatcttattatacatcgagtataggatggcgacggtaactgctacgcaaataccgatcaacaaaagaataccaatcatttattgacaataacttcactattgatcaagtatgcaatatatcatcttttcactaaataagtagtaataatgattcaacaatgtcgagatatatggacgataataatttagttcatggaaatatcgctatgattggtatgaatgactccgctaactctgtggggtgcgcagtgctttccccacatagaataaattagcattccgactgtgataataataccaagtataaacgccataatactcaatactttccatgtacgagtgggactggtagacttactaaagtcaataaaggcgaagatacacgaaagaatcaaaagaatgattccagcgattagcacgccggaaaaataatttccaatcataagcatcatgtccatttaactaataaaaattttaaatcgccgaatgaacaaagtggaatataaaccatataaaaacaatagtttgtactgcaaaaataatatctatttttgttttcgaagatatggtaaaattaaatagtagtacacagcatgttataactaacagcagcaacggctcgtaattacttatcatttactagacgaaaaggtggtgggatattttcttgctcaaataatacgaatatatcacccatccattttatgcgatgtttatatactctaatctttaatagatctatagacgacgggtttaccaacaatatagattttatcgattcatctaatttaaacccttccttaaacgtgaatgatctattatctggcataacgatgactctacctgatgaatcggacaatgtactgggccatgtagaataaattatcaacgaattatcgtctacgaacatttatatcatttgttttaattttaggacgcgaataaatggatataaaatagaaaataacagatattacaaccaatgttatggccgcgcccaaccaggtaggcagttttattttatcttttactacaggttctcctggatgtacgtcaccaacggcggacgtagttctagtacaattagacgtaagttctgcttgggaattttttaacgctaaagagttaacgttaatcgtgcacccaacgtatttacatctagttctttgaacatcttgattataatataaccattttctatctctagattcgtcggtgcactcatgtaaccaacataccctaggtcctaaatatttatctccggaattagattttggataattcgcgcaccaacaatttctatttcctttatgatcgttacaaaagacgtataatgccgtatccccaaaagtaaaataatcaggacgaataattctaataaactcagaacaatatctcgcatccatatgtttggagcaaatatcggaataagtagacatagccggtttccgttttgcacgtaaccattctaaacaattggggtttccaggatcgtttctacaaaatccagtcatgaaatcatcacaatgttctgtcttgtaattattattaaatatttttggacagtgtttggtatttgtcttagaacaacattttgccacgctatcactatcgcccaggagataatccttttttataaaatgacatcgttgcccggatgctatataatcagtggcgtgttttaaatccttaatatattcaggagttacctcgttctgataatagattaatgatccaggacgaaatttgaaagaactacatggttctccatgaattaatacatattgtttagcaaattcaggaactataaaactactacaatgatctatcgacataccatctatcaaacaaaacttgggtttaatttctcccggagatgtttcataatagtacgtataactttcttctgcaaacttaacagctctattatattcaggataattaaaacctaattccatatatttgtctcgtatatctgctattcctggtgctattttaattctattaagagtaacggctgcccccattcttaataatcgtcagtatttaaactgttaaatgttggtatatcaacatctaccttatttcccgcagtataaggtttgttgcaggtatactgttcaggaatggttacatttatacttcttctatagtcctgtctttcgatgttcatcacatatgcaaagaacagaataaacaaaataatgtaagaaataatattaaatatctgtgaattcgtaaatacattgattgccataataattacagcagctacaatacatacaatagacattcccacagtgttgccattacctccacgatacatttgagttactaagcaataggtaataactaagctagtaagaggcaatagaaaagatgagataaatatcatcaatatagagattagaggagggctatatagagccaagacgaacaaaatcaaaccgagtaacgttctaacatcattatttttgaagattcccaaataatcattcattcctccataatcgttttgcattatacctccatctttaggcataaacgattgctgctgttcctctgtaaataaatctttatcaagcactccagcacccgcagagaagtcgtcaagcatattgtaatatcttaaataactcatttatatattaaaaaatgtcactattaaagatggagtataatctttatgccgaactaaaaaaaatgacttgtggtcaacccctaagtctttttaacgaagacggggatttcgtagaagttgaaccgggatcatcctttaagtttctgatacctaagggattttacgcctctccttccgtaaagacgagtctagtattcgagacattaacaacgaccgataataaaatcactagtatcaatccaacaaatgcgccaaagttatatcctcttcaacgcaaagtcgtatctgaagtagtttctaatatgaggaaaatgatcgaatcaaaacgtcctctatacattactcttcacttggcgtgtggatttggtaagactattaccacgtgttatcttatggctacacacggtagaaaaaccgtcatttgcgtacccaataaaatgttaatacatcaatggaagacacaggtagaggcagtcggattggaacataagatatctatagatggagtaagtagtctattaaaggaactaaagactcaaagtccggatgtattaatagtagtcagtagacatctgacaaacgatgccttttgtaaatatatcaataagcattatgatttgttcatcttggatgaatcacatacgtataatctgatgaacaatacagcagttacaagatttttagcgtattatcctccgatgatgtgttattttttaactgctacacctagaccagctaaccgaatttattgtaacagtattattaatattgccaagttatccgatctaaaaaaaactatctatgcggtagatagtttttttgagccatattccacagacaatattagacatatggtaaaacgactagatggaccatctaataaatatcatatatatactgagaagttattatctgtagacgagcctagaaatcaacttattcttgataccctggtagaagaattcaagtcaggaactattaatcgaattttagttattactaaactacgtgaacatatggtattcttctacaaacgattattagattttttcggatcagaggttgtatttataggagacgcccaaaatagacgtactccagatatggtcaaatcaatcaaggaactaaatagatttatattcgtatccaccttattttattccggtactggtttagatattcctagtttggattcgttgttcatttgctcggcagtaatcaacaatatgcaaatagagcaattactagggagggtatgtcgagaaacagaactattagataggacggtatatgtatttcctaacacatccatcaaagaaataaagtacatgataggaaatttcatgcaacgaattattagtctgtctgtagataaactaggatttaaacaaaaaagttatcggaaacatcaagaatccgatcccacttctgtatgtacaacatcctccagagaagaacgtgtattaaatagaatatttaactcgcaaaatcgttaagaagtttaagcgacgatccgcatgctgcgcaggccagtgtattacccctcatagtattaatataatccaatgatacttttgtgatgtcggaaatcttaaccaatttagactgacaggcagaacacgtcatgcaatcatcatcgtcatcgataactgtagtcttgggcttctttttgcggctcttcattccggaacgcacattggtgctatccatttaggtagtaaaaaataagtcagaatatgccctatagcacgatcgtgcaaaacctggtatatcgtctctatctttatcacaatatagtgtatcgacatttttattattattgacctcgtttatcttggaacatggaatgggaacatttttgttatcaacggccatctttgccttaattccagatgttgtaaaattataactaaacagtctatcatcgacacaaatgaaattcttgtttagacgtttgtagtttacgtatgcggctcgttcgcgtctcattttttcagatattgcaggtactataatattaaaaataagaatgaaataacataggattaaaaataaagttatcatgacttctagcgctgatttaactaacttaaaagaattacttagtctgtacaaaagtttgaaattttcagattctgcggctatagaaaagtataattctttggtagaatggggaacatctacttactggaaaataggcgtgcaaaaggtagctaatgtcgagacgtcaatatctgattattatgatgaggtaaaaaataaaccgtttaatattgatccgggatattacattttcttaccggtatattttggaagcgtctttatttattcgaagggtaaaaatatggtagaacttggatctggaaactcttttcaaataccagatgatatgcgaagtgcgtgtaacaaagtattagacagcgataacggaatagactttctgagatttgttttgttaaacaatagatggataatggaagatgctatatcaaaatatcagtctccagttaatatatttaaactagctagtgagtacggattaaacatacccaaatatttagaaattgaaatagaggaagacacattatttgacgacgagttatactctattatagaacgctctttcgatgataaatttccaaaaatatccatatcgtatattaagttgggagaacttagacggcaagttgtagactttttcaaattctcgttcatgtatattgagtccatcaaggtagatcgtataggagataatatttttattcctagcgttataacaaaatcaggaaaaaagatattagtaaaagatgtagaccatttaatacgatccaaggttagagaacatacatttgtaaaagtaaaaaagaaaaacacattttccattttatacgactatgatggaaacggaacagaaactagaggagaagtaataaaacgaattatagacactataggacgagactattatgttaacggaaagtatttctctaaggttggtagtgcaggcttaaagcaattgactaataaattagatattaatgagtgcgcaactgtcgatgagttagttgatgagattaataaatccggaactgtaaaacgaaaaataaaaaaccaatcagcatttgatttaagcagagaatgtttgggatatccagaagcggattttataacgttagttaataacatgcggttcaaaatagaaaattgtaaggttgtaaatttcaatattgaaaatactaattgtttaaataacccgagtattgaaactatatatggaaactttaaccagttcgtctcaatctttaatatcgtcaccgatgtcaaaaaaagattattcgagtgaaataatatgcgcctttgatataggtgcaaaaaatcctgccagaactgttttagaagtcaaggataactccgttagggtattggatatatcaaaattagactggagttctgattgggaaaggcgcatagctaaagatttgtcacaatatgaatacactacagttcttctagaacgtcagcctagaaggtcgccgtacgtcaaatttatctattttattaaaggctttttatatcatacatcggctgccaaagttatttgcgtctcgcctgtcatgtctggtaattcatatagagatcgaaaaaagagatcggtcgaagcatttcttgattggatggacacattcggattgcgagactccgttccggatagacgcaaattagacgatgtagcggatagtttcaatttggctatgagatacgtattagataaatggaatactaattatacaccttataataggtgtaaatctagaaattacataaaaaaaatgtaataacgttagtaacgccattatggataatctatttacctttctacatgaaatagaagatagatatgccagaactatttttaactttcatctaataagttgcgatgaaataggagatatatatggtcttatgaaagaacgcatttcctcagaggatatgtttgataatatagtgtataataaagatatacatcatgccattaagaaactagtgtattgcgacatccaacttactaaacacattattaatcagaatacgtatccggtatttaacgattcttcacaagtgaaatgttgtcattatttcgacataaactcagataatagcaatattagctctcgtacagtagagatatttgagagggaaaagtcatctcttgtatcatatattaaaactaccaataagaagagaaaggtcaattacggcgaaataaagaaaactgttcatggaggcactaatgcaaattacttttccggtaaaaagtctgacgagtatctgagtactacagttagatccaacattaatcaaccttggatcaaaaccatctctaagaggatgagagttgatatcattaatcactctatagtaacgcgtggaaaaagctctatattacaaactatagaaattatttttactaatagaacatgtgtgaaaatattcaaggattctactatgcacattattctatccaaggacaaggatgaaaaggggtgtatacacatgattgacaaattattctatgtctattataatttatttctgttgttcgaggatatcatccaaaacgagtactttaaagaagtagctaatgttgtaaaccacgtacttacggctacggcattagatgagaaattattcctaattaagaaaatggctgaacacgatgtttatggagttagcaatttcaaaatagggatgtttaacctgacatttattaagtcgttggatcataccgttttcccctctctgttagatgaggatagcaaaataaagttttttaaggggaaaaagctcaatattgtagcattacgatctctggaggattgtataaattacgtgactaaatccgagaatatgatagaaatgatgaaggaaagatcgactattttaaatagcatagatatagaaacggaatcggtagatcgtctaaaagaattgcttctaaaatgaaaaaaaacactgattcagaaatggatcaacgactcggatataagtttttggtgcctgatcctaaagccggagttttttatagaccgttacatttccaatatgtatcgtattctaattttatattgcatcgattgcatgaaatcttgaccgtcaagcggccactcttatcgtttaagaataatacagaacgaattatgatagaaattagcaatgttaaagtgactcctccagattactcacctataatcgcgagtattaaaggtaagagttatgacgcattagccacgttcactgtaaatatctttaaagaggtaatgaccaaagagggtatatccatcactaaaataagtagttatgagggaaaagattctcatttgataaaaattccgctactaataggatacgggaataaaaatccacttgatacagccaagtatcttgttcctaatgtcataggtggagtctttatcaataaacaatctgtcgaaaaagtaggaattaatctagtagaaaagattacaacatggccaaaatttagggttgttaagccaaactcattcactttctcgttttcctccgtatcccctcctaatgtattaccgacaagatatcgccattacaagatatctctggatatatcacaattggaagcgtcgaatatatcatcgacaaagacatttataacggtcaatattgttttgctgtctcaatatttatctagagtgagtctagaattcattagacgtagcttatcatacgatatgcctccagaagttgtctatctagtaaacgcgataatagatagtgctaaacgaattactgaatctattactgactttaatattgatacatacattaatgacctggtggaagctgaacacattaaacaaaaatctcagttaacgatcaacgagttcaaatatgaaatgctgcataactttttacctcatatgaactatacacccgatcaactaaagggattttatatgatatctttactaagaaagtttctctactgtatctaccacacttctagatatccagatagagattcgatggtttgtcatcgtatactaacatacggcaaatattttgagacgttggcacatgatgaattagagaattacataggcaacatccgaaacgatatcatgaacaatcacaagaacagaggcacttacgcggtaaacattcatgtactaacaactcctggacttaatcatgcattttctagtctattgagtggaaagttcaaaaagtcagacggtagttatcgaacacatcctcactattcatggatgcagaatatttctattcctaggagtgttggattttatccggatcaagtaaagatttcaaagatgttttctgtcagaaaataccatccaagtcaatatctttacttttgttcatcagacgttccggaaagaggtcctcaggtaggtttagtatctcaattgtctgtcttgagttccattacaaatatactaacgtctgagtatttggatttggaaaagaaaatttgtgagtatatcagatcatattataaagatgatataagttactttgaaacaggatttccaatcactatagaaaatgctctagtcgcatctcttaatccaaatatgatatgtgattttgtaactgactttagacgtagaaaacggatgggattcttcggtaacttggaggtaggtattactttagttagggatcacatgaatgaaattcgcattaatattggagcgggaagattagtcagaccattcttggttgtggataacggagagctcatgatggatgtgtgtccggagttagaaagcagattagacgacatgacattctctgacattcagaaagagtttccgcatgtcatcgaaatggtagatatagaacaatttacttttagtaacgtatgtgaatcggttcaaaaatttagaatgatgtcaaaggatgaaagaaagcaatacgatttatgtgactttcctgccgaatttagagatggatatgtggcatcttcattagtgggaatcaatcacaattctggacccagagctattcttggatgtgctcaagctaaacaagctatctcttgtctgagctcggatatacgaaataaaatagacaatggaattcatttgatgtatccagagaggccaatcgtgattagtaaggctttagaaacttcaaagattgcggctaattgcttcggccaacatgttactatagcattaatgtcgtacaaaggtatcaatcaagaggatggaattatcatcaaaaaacaatttattcagagaggcggtctcgatattgttacagccaagaaacatcaagtagaaattccattggaaaactttaataacaaagaaagagataggtctaacgcctattcaaaattagaaagtaatggattagttagactgaatgctttcttggaatccggagacgctatggcacgaaatatctcatcaagaactcttgaagatgattttgctagagataatcagattagcttcgatgtttccgagaaatataccgatatgtacaaatctcgcgttgaacgagtacaagtagaacttactgacaaagttaaggtacgagtattaaccatgaaagaaagaagacccattctaggagacaaatttaccactagaacgagtcaaaagggaacagtcgcgtatgtcgcggatgaaacggaacttccatacgacgaaaatggtatcacaccagatgtcattattaattctacatccatcttctctagaaaaactatatctatgttgatagaggttattttaacagccgcatattctgctaagccgtacaacaataagggagaaaaccgacctgtctgttttcctagtagtaacgaaacatccatcgatacatatatgcaattcgctaaacaatgttatgagcattcaaatccgaaattgtctgatgaagaattatcggataaaatcttttgtgaaaagattctctatgatcctgaaacggataagccttatgcatccaaagtattttttggaccaatttattacttgcgtctgagacatttaactcaggacaaggcaaccgttagatgtagaggtaaaaagacgaagctcattagacaggcgaatgagggacgaaaacgtggaggaggtatcaagttcggagaaatggagagagactgtttaatagcgcatggtgcagccaatactattacagaagttttgaaagattcggaagaagattatcaagatgtgtatgtttgtgaaaattgtggagacatagcagcacaaatcaagggtattaatacatgtcttagatgttcaaaacttaatctctctcctctcttaacaaaaattgataccacacacgtatctaaagtatttcttactcaaatgaacgccagaggcgtaaaagtcaaattagatttcgaacgaagacctccttcgttttataaaccattagataaagttgatctcaaaccgtcttttctggtctaatattgtttagtagatacttatcaacatcatcaagattatcaagattatcaagattatcaagataagctaattcactaaacacattatcgatttcggtatcgttactcgcagaataaagttcgttatgatcctgatattcggaaatctgtggagtttcaggttttggtggatgtgtaacagctacttgagataccgaagtctgatattcagaaagctgtggatgttctggttcggcatccaccgatggtgttacaccactactaattggttcagtaacgtctgtggacgatggaggcaccacttctacaggttctggttctttatcctcagtcatcaacggagctacttcaatgcgaggaaatgtataatttggtaatggtttctcatgtggatctgaagaagaggtaagatatctactagaaagataccgatcacgttctagttctcttttgtagaacttaactttttctttctcagcatctagttgatattccaacctcttcacgttactacgttcagatttcaattcacgttcgcatgggttacctccgcagtttttacgagcgatttcacgttcagccttcatgcgtctctccctctctctatcgagtttatcagagcagtctttctgaaggcgatcgaactccataaatttctccaacgctttgattgtttccatagatttccgaagttcagcttttaggactgtgattctttttctttcgaattcacagctggatgtacaaccgtttccattaccgccatctctaagtttcttttctagatcggcaacatttcatccccatgccttttacattcctcgagtctactgtcgtcgaaatatcgttccagctccttttcgacatcaataactttagcacgttgtctctcaagctctcttttgtagttatctgattccctggcacgtttaagatcttcatgcaattgagtcagctcttaacacaatctcttgcttcttcgtcatagtacgcgcaatcactgtgagatccattgttaccacgtctacactcggcgagctcgcgtttaagagattcaatttcccgtttgtattggtccatgtttccattgctaccaccattagatttacaggctgctagttgtcgttcgagatcagaaatacgggttttcttggaattgatttcgtcgatgtacttggcatcgaaacacttattaagttctttttccaattctacgattttatttctttcgcgagtcaattccctcctgtagtaactatctgttttgtcagattcacgctctctacgtagactttcttgcaagttactaatttgttccctagcacgtccgagtttagttttatatgctgaatagagttctgattcatcctttgagcagatctctagcgatcgtttaagattcctgattctagtctttagcctatttacctcctcagaagatgttccgttaccgttgcgtttacactcgttaagctgtctatcaagatccatgattctatctctaagacgttgcatctctctttccatatcagcattgctttcattattacgtctgcagtcactcaactgtctttcaatatctgagattctatctctaagacgtcgcatctctctctgtttcggcattggtttcattattacgtctacagtcgttcaactgtctttcaagatctgatattctagattggagtctgctaatctctgtagcattttcacggcattcactcagttgtctttcaagatctgaaattttagattggagtctgctaatctctgtaagatttcctcctccgctctcgatgcagtcggtcaacttattctctagttctctaatacgcgaacgcagtgcatcaacttcttgcgtgtcttcctggttgcgtgtacattcatcgagtctagattcgagatctctaacgcgtcgtcgttcttcctcaagttctctgcgtactacagaaagcgtgtccctatcttgttgatatttagcaatttctgattctagagtactgattttgcttacgtagttactaatatttgtcttggccttatcaagatcctccttgtatttgtcgcattccttgatatccctacgaagtctggacagttcccattcgacattacgacgtttatcgatttcagctcggagatcgtcatcgcgttgttttagccacatacgactgagttcaagttctcgttgacaagatccatctacttttccattcctaatagtatccagttccttttctagttctgaacgcatttctcgttccctatcaagcgattctctcaattctcggatagtcttcttatcaatttctaataaatctgaaccatcatctgtcccattttgaatatccctgtgttctttgatctcttttgtaagtcggtcgattctttcggttttataaacagaatccctttccaaagtcctaatcttactgagtttatcactaagttctgcattcaattcggtgagttttctcttggcttcttccaactctgttttaaactctccactatttccgcattcttcctcgcatttatctaaccattcaattagtttattaataactagttggtaatcagcgattcctatagccgttcttgtaattgtgggaacataattaggatcttctaatggattgtatggcttgatagcatcatctttatcattattagggggatggacaaccttaattggttggtcctcatctcctccagtagcgtgtggttcttcaatagccgtgttagtaataggcttaggcaaatgcttgtcgtacgcgggcacttcctcatccatcaagtatttataatcgggttctacgtctgaatattcttttctaagagacgcaacttctggagttagtagaagaactctgtttctatatctatcaacgctggaatcaatactcaagttaaggatagcgaatacctcatcgtcatcatccgtatcctctgaaacgccatcatatgacatttcatgaagtctaacgtattgataaacagaatcagatttagtattaaacagatccttaacctttttagtaaatgcatatgtatattttagatctccagatttcataatatggtcgcatgccttaaatgtcagtgcttccataatatagtctggaacactaattggtgatgaaaaagataccggaccatatgctacgttgataaataactctgagccactaactagataatgattaatgttaaggaagaggaaatattcagtgtataggtatgtcttggcgtcatatcttgtactaaacacgctaaacagtttgttaatgtgatcaatttccaatagattaattagagcagcaggaataccaacaaacatattaccacatccgtattttctatgaatatcacatatcatgttaaaaaatcttgatagaagagcgaatatctcgtctgacttaatgagtcgtagttcagcagcaacataagtcataactgtaaatagaacatactttcctgtagtgttgattctagactccacatcaacaccattattaaaaatagttttatatacatctttaatctgctctccgttaatcgtcgaacgttctagtatacggaaacactttgatttcttatctgtagttaatgacttagtgatatcacgaagaatattacgaattacatttcttgtttttcttgagagacctgattcagaactcaactcatcgttccatagtttttttacctcagtggcgaaatctttggagtgcttggtacatttttcaataaggttcgtgacctccatttattataaaaaaattttattcaaaacttaactacaatcgggtaattataaaatcgtagatctcccatgtggtggaatactaccatctatcgcatgtggatggacagtaggtaatggccatgggaacagtaatgtttgcatatttatctttcttgccagtattactgcatattgtcccaatgtttcgatgtgatgttctaacctatcaactgccgctgtatcacaacaatagtgtccgatgaaattaagattatgatccaatgtgtttaatatatgattatcaagtcttatacgatccgcgtcttttttgacaggatcaggttcttctacaggaagaagtttcggcctcttatgatattcatgtctgggaaacggtggtctagggtgaggctccggtatcggagtgggttttggattataatcatcatcgtctatgacatcatcttcgacttcgatatttattttgctatcttgatgatgtcctgtatcagttgcattttcagcactcgactgaatattagcgcattcattgtttattattaccatatttctaaacccaaaatgtatatgttgaacatcagtactatcgttgatgagtcttatagcatgaattcgcttatcgttatcgggtttagcttctgtcaccttagcaattccttttttattaaactctacataatcatatccatttctattgtttgttctaatataaacgagtatagcatcattgctaaatttttcaatagtatcgaaaacagaatatcctaaaccatataatatatattcaggaacactcaaactaaatgtccaggattctcctaaatacgtaaactttaatagtgcgaaatcattcaaaaatctaccacttatagatagatagtacataaatgcgtatagtagtctacctatctctttattatgaaaaccggcattacgatcatatatgtcgtgatatacctgtgatccgtttacgttaaaccataaatacatgggtgatcctataaacatgaatttatttctaattctcagagctatagttaattgaccgtgtaatatttgcttacatgcatacttgatacgctcattaataagatttttatcattgctcgttatctcagaatcgtatatataaggagtaccatcgtgattcttaccagatattatacaaaatactatatataaaatatattgaccaacgttagtaatcatataaatgtttaacgttttaaattttgtattcaatgatccattatcatacgctagcatggtcttatgatattcattctttaaaatataatattgtgttagccattgcattggggctcctaatggagattttttattctcatccattttaggataggctttcataaagtccctaataacttcgtgaataatgtttctatgttttctactgatgcatgtatttgcttcgatttttttatcccatgtttcatctatcatagatttaaacgcagtaatgctcgcaacattaacatcttgaaccgttggtacaattccgttccataaatttataatgttcgccatttatataactcattttttgaatatacttttaattaacaaaagagttaagttactcatatggacgccgtccagtctgaacatcaatctttttagccagagatatcatagccgctcttagagtttcagcgtgattttccaacctaaatagaacttcatcgttgcgtttacaacacttttctatttgttcaaactttgttgttacattagtaatctttttttccaaattagttagccgttgtttgagagtttcctcattgtcgtcttcatcggctttaacaattgcttcgcgtttagcctctggctttttagcagcctttgtagaaaaaaattcagttgctggaattgcaagatcgtcatctccggggaaaagagttccgtccatttaaagtacagattttagaaactgacactctgcgttatttatatttggtacaacacatggattataaatattgatgttaataacatcagaaaatgtaaagtctatacattgttgcatcgtgttaaattttctaatggatctagtattattgggtccaacttctgcctgaaatccaaatatggaagcggatacaaaaccgtttcctggataaaccacacatctccacttttgctttacatcagaaattgtgtcattgacatcttgaactctcctatctaatgccggtgttccacctatagattttgaatattcgaatgctgcatgagtagcattaaattccttaatattgccataattttcatatattgagtaaccctggataaaaagtaaacacaccgcagccgtcgctaccacaataaaaaaaattgatagagagttcatttataatctattagaagctgacaaaatttttttacacgcatcagacaatgctttaataaatagttcaacatctacttttgtcatatcgaaccgatggtatgattctaacctagaattacatccgaaaaagttgactatgttcatagtcattaagtcattaacaaacaacattccagactctggattataagacgatactgtttcgtcacaattacctaccttaatcatgtgattatgaatattggctattagagcaccttctaagaaatctataatatctttgaaacacgatttaaaatcaaaccacgaatatacttctacgaagaaagttagtttacccataggagaaataactataaatggagatctaaatacaaaatccggatctatgatagttttaacattattatattctctattaaatacctccacatctaaaaatgttaattttgaaactatgtcttcgtttattaccgtacctgaactaaacgctataagctctattgtttgagaactctttaaacgatattcttgaaatacatgtaacaaagtttcctttaactcggtcggtttatctaccatagttacagaatttgtatccttatctataatataataatcaaaatcgtataaagttatataattatcgcgttcagattgtgatcttttcaaatagactaaaaaccccatttctctagtaagtatcttatgtatatgtttgtaaaatatcttcatggtgggaatatgctctaccgcagttagccattcctcattgacagcggtagatgtattagacaaaactattccaatgtttaacaagggccattttacgagattattaaatccttgtttgataaatgtagccaatgagggttcgagttcaacgacgattgaattctcttcccgcggatgctgcatgatgaacgacgggatgttgttcgattgatttggaattctttttcgactttttgtttatattaaatattttaaaatttatagctgatagcaattcatgtactacggataatgtagacgcgtattgcgcatcgatatctttattattagataaatttatcaataaatgtgagaagtttgcctcgttaaggtcttccatttaaatattatataaacatttgtgtttgtatcttattcgtcttttatggaatagttttttactagtaaagctgcaattacacactttgtccgtaaaacataaatataaacaccagcttttatcaatcgttccaaaaagtcgacggcggacatttttaacatggcatctattttaaatacacttaggtttttggaaaaaacatcattttataattgtaacgattcaataactaaagaaaagattaagattaaacataagggaatgtcatttgtattttataagccaaagcattctaccgttgttaaatacttgtctggaggaggtatatatcatgatgatttggttgtattggggaaggtaacaattaatgatctaaagatgatgctattttacatggatttatcatatcatggagtgacaagtagtggagcaatttacaaattgggatcgtctatcgatagactttctctaaataggactattgttacaaaagttaataattatgatgatacattttttgacgacgatgattgatcgctattgcacaattttgtttttttactttctaatatagcgtttagattctttttcatgtgcgaatattgatttactaaaatatcgatgtttaacttttgttctatgacgtccttatcagcggtatcggtacatatacgtaattcaccttcacaaaatacggagtcttcgataataatagccaatcgattattggatctagcggtctgtatcatattcaacatgtttaatatatcctttcgtttcccctttacaggcatcgatcgtagcatattttccgcgtctgagatggaaatgttaaaactacaaaaatgcgtaatgttagcccgtcctaatattggtacgtgtctataagtttggcatagtagaataatagacgtgtttaaatgccttccaaagtttaagaattctattagagtattgcattttgatagtttatcgcctacatcatcaaaaataagtaaaaagtgtgctgattttttatgattttgtgcgacagcaatacatttttctatgttacttttagttcgtatcagattatattctagagattcctgactactaacgaaattaatatgatttggccaaatgtatccatcataatctggattataaacgggtgtaaacaagaatatatgtttatattttttaactagtgtagaaaacagagatagtaaatagatagtttttccagatccagatcctcccgttaaaaccattctaaacggcatttttaataaattttctcttgaaaattgtttttcttggaaacaattcataattatatttacagttactaaattaatttgataataaatcaaaatatggaaaactaaggtcgttagtagggaggagaacaaagaaggcatatcgtgatataaataacatttattatcatgatgacaccagaaaacgacgaagagcagacatctgtgttctccgctactgtttacggagacaaaattcagggaaagaataaacgcaaacgcgtgattggtctatgtattagaatatctatggttatttcactactatctatgattaccatgtccgcgtttctcatagtgcgcctaaatcaatgcatgtctgctaacgaggctgctattactgacgccgctgttgccgttgctgctgcatcatctactcatagaaaggttgcgtctagcactacgcaatatgatcacaaagaaagctgtaatggtttatattaccagggttcttgttatatattacattcagactaccagttattctcggatgctaaagcaaattgcactgcggaatcatcaacactacccaataaatccgatgtcttgattacctggctcattgattatgttgaggatacatggggatctgatggtaatccaattacaaaaactacatccgattatcaagattctgatatatcacaagaagttagaaagtatttttgtgttaaaacaatgaactaatatttatttttgtacattaataaatgaaatcgcttaatagacaaactgtaagtaggtttaagaagttgtcggtgccggccgctataatgatgatactctcaaccattattagtggcataggaacatttctgcattacaaagaagaactgatgcctagtgcttgcgccaatggatggatacaatacgataaacattgttatctagataccaacattaaaatgtctacagataatgcggtttatcagtgtcgtaaattacgagctagattgcctagacctgatactagacatctgagagtattgtttagtattttttataaagattattgggtaagtttaaaaaagaccaataataaatggttagatattaataatgataaagatatagatattagtaaattaacaaattttaaacaactaaacagtacgacggatgctgaagcgtgttatatatacaagtctggaaaactggttgaaacagtatgtaaaagtactcaatctgtactatgtgttaaaaaattctacaagtgacaacaaaaaatgaattaataataagtcgttaacgtacgccgccatggacgccgcgtttgttattactccaatgggtgttgactataacagatacattgtatgatgatctcgatatctcaatcatggactttataggaccatacattataggtaacataaaaactgtccaaatagatgtacgggatataaaatattccgacatgcaaaaatgctactttagctataagggtaaaatagttcctcaggattctaatgatttggctagattcaacatttatagcatttgtgccgcatacagatcaaaaaataccatcatcatagcatgcgactatgatatcatgttagatatagaagataaacatcagccattttatctattcccatctattgatgtttttaacgctacaatcatagaagcgtataacctgtatacagctggagattatcatctaatcatcaatccttcagataatctgaaaatgaaattgtcgtttaattcttcattctgcatatcagacggcaatggatggatcataattgatgggaaatgcaatagtaattttttatcataaaagttgtaaagtaaataataaaacaataaatattgaactagtagtacgtatattgagcaatcagaaatgatgctggtacctcttatcacggtgaccgtagttgcgggaacaatattagtatgttatatattatatatttgtaggaaaaagatacgtactgtctataatgacaataaaattatcatgacaaaattaaaaaagataaagagttctaattccagcaaatctagtaaatcaactgatagcgaatcagactgggaggatcactgtagtgctatggaacaaaacaatgacgtagataatatttctaggaatgagatattggacgatgatagcttcgctggtagtttaatatgggataacgaatccaatgttatggcgcctagcacagaacacatttacgatagtgttgctggaagcacgctgctaataaataatgatcgtaatgaacagactatttatcagaacactacagtagtaattaatgaaacggagactgttaaagtacttaatgaagataccaaacagaatcctaactattcatccaatcctttcgtaaattataataaaaccagtatttgtagcaagtcaaatccgtttattacagaacttaacaataaatttagtgagaataatccgtttagacgagcacatagcgatgattatcttaataagcaagaacaagatcatgaacacgatgatatagaatcatcggtcgtatcattggtgtgattagtttcctttttataaaattgaagtaatatttagtattattgctgccgtcacgttgtacaaatggagatattccctgtattcggcatttctaaaattagcaattttattgctaataatgactgtagatattatatagatacagaacatcaaaaaattatatctgatgagatcaatagacagatggatgaaacggtacttcttaccaacatcttaagcgtagaagttgtaaatgacaatgagatgtaccatcttattcctcatagattatcgacgattatactctgtattagttctgtcggaggatgtgttatctctatagataatgacgtcaatggcaaaaatattctaacctttcccattgatcatgctgtaatcatatccccactgagtaaatgtgtcgtagttagcaagggccctacaaccatactggttgctaaagcggatatacccagcaaacgattggtaacatcgtttacaaacgacatactgtatgtaaacaatctatcactgattaattatttgccgttgtctgtattcattattagacgagtcaccgactatttggatagacacatatgcgatcagatatttgctaataataagtggtattcccttataaccatcgacgataagcaatatcctattccatcaaattgtataggtatgtcttctgccaagtacataaattctagcatcgagcaagatactttaatacatgtttgtaacctcgagcatccattcgacttagtatacaaaaaaatgcagtcgtacaattctgtacctatcaaggaacaaatattgtacggtagaattgataatataaatatgagcattagtatttctgtggattaatagatttctagtatggggatcattaatcatctctaatctctaaatacctcataaaacgaaaaaaaagctattatcaaatactgtacggaatagattcattctcttctctttttatgaaactctgttgtatatctactgataaaactggaagcaaaaaatctgataaaaagaataagatcaagatcaaggattatatggaacacgattattataaaataacaatagttcctggttcctcttccacgtctactagctcgtggtattatacacatgcctagtaatagtctctttgcgttgatggaaagcagactagaaataacaggctaaaatgttcagacaccataatagttcccaacccagataataacagagtaccatcaacacattcctttaaactcaatcccaaacccaaaaccgttaaaatgtatccggccaattgatagtagataatgaggtgtacagcgcatgataatttacacagtaaccaaaatgaaaatactttagtaattataagaaatatagatggtaacgtcatcatcaacaatccaataatatgccggagagtaaacattgacggataaaacaaaaatgctccgcataactctatcatggcaataacacaaccaaatacttgtaagattcctaaattagtagaaaatacaacggatatcgatgtataagtgatctcgagaaataataagaataaagtaatgcccgtaaagataaacatcaacattgtttggtaatcattaaaccaattagtatgacgttgaactaatttcacagtaaattttattccagtattatccccgcatgtataagtacctggtaagatatctttatattccataatcaatgagacatcactatctgataacgaatgaagtctagcactagtatgccatttacttaatattgtcgtcttggaagttttattataagttaaaatatcatggttatccaatttccatctaatatactttgtcggattatctatagtacacggaataatgatggtatcattacatgctgtatactctatggtctttgtagttgttataacaaccaacgtatagaggtatatcaacgatattctaactcttgacattttttatttatttaaaatgatacctttgttatttattttattctattttgctaacggtattgaatggcataagtttgaaacgagtgaagaaataatttctacttacttattagacgacgtattatacacgggtgttaatggggcggtatacacattttcaaataataaactaaacaaaactggtttaactaataataattatataacaacatctataaaagtagaggatgcggataaggatacattagtatgcggaaccaataacggaaatcccaaatgttggaaaatagacggttcagacgacccaaaacatagaggtagaggatacgctccttatcaaaatagcaaagtaacgataatcagtcacaacggatgtgtactatctgacataaacatatcaaaagaaggaattaaacgatggagaagatttgacggaccatgtggttatgatttattcacggcggataacgtaattccaaaagatggtttacgaggagcattcgtcgataaagacggtacttatgacaaagtttacattcttttcactgatactatcggctcaaagagaattgttaaaattccgtatatagcacaaatgtgcctaaacgacgaaggtggtccatcatcgttgtctagtcatagatggtcgacgtttctcaaagtcgaattagaatgtgatatcgacggaagaagttatagataaattattcattctaaaactataaaaacagataatgatacgatactatatgtattcttcgatagtccgcattatgtacctattctatgaataccattaaacaatctttttctacgtcaaaattggaaggatatacaaagcaattgccgtctccagctcctggtatatgtctaccagctggaaaagttgttccacataccacgtttgaagtcatagaaaaatataatgtactagatgatattataaagcctttatctaaccaacctatcttcgaaggaccgtctggtgttaaatggttcgatataaaggagaaggaaaatgaacatcgggaatatagaatatacttcataaaagaaaattctatatattcgttcgatacaaaatctaaacaaactcgtagctcgcaagtcgatgcgcgactattttcagtaatggtaacttcgaaaccgttatttatagcagatatagggataggagtaggaatgccacaaatgaaaaaaatacttaaaatgtaatcttaatcgagtacaccacacgacaatgaacaaacataagacagattatgctggttatgcttgctgcgtaatatgcggtctaattgttggaattatttttacagcgacactattaaaagttgtagaacgtaaattagttcatacaccatcaatagataaaacgataaaagatgcatatattagagaagattgtcctactgactggataagctataataataaatgtatccatttatctactgatcgaaaaaacctgggaggaaggacgtaatgcatgcaaagctctaaatccaaattcggatctaattaagatagagactccaaacgagttaagttttttaagaagccttagacgaggctattgggtaggagaatccgaaatattaaaccagacaaccccatataattttatagctaaaaatgccacgaagaatggaactaaaaaacggaaatatatttgtagtacaacgaatactcccaaactgcattcgtgttacactatataacaattacactacatttttatcataacactacttcggttagatgttttagaaaaaaataaatatcgccgtaccgttcttgtttttataaaaataacaattaacaattatcaaattttttctttaatattttacgtggttgaccattcttggtggtaaaataatctcttagtgttggaatggaatgctgtttaatgtttccgcactcatcgtatattttgacgtatgcagtcacatcgtttacgcaatagtcagactgtagttctatcatgcttcctacatcagaaggaggaacagttttaaagtctcttggttttaatctattgccattagttttcatgaaatcctttgttttatccacttcacattttaaataaatgtccactatacattcttctgttaattttactagatcgtcatgggtcatagaatttataggttccgtagtccatggatccaaactagcaaacttcgcgtatacggtatcgcgattagtgtatacaccaactgtatgaaaattaagaaaacagtttaataaatcaacagaaatatttaatcctccgtttgatacagatgcgccatatttatggatttcggattcacacgttgtttgtctgaggtgttcgtctagtgttgcttctacgtaaacttcgattcccatatattctttattgtcagaatcgcataccgatttatcatcatacactgtttgaaaactaaatggtatacacatcaaaataataaataataacgagtacattctgcaatattgttatcgtaattggaaaattagtgttcgagtgagtcggattatgtgagtactggattgtatattttattttatattttgtaataagaataaaatgctaatgtcaagtttattccaatagatgtcttattaaaaaacatatataataaataacaatggctgaatggcataaaattatcgaggatatctcaaaaaataataagttcgaggatgccgccatcgttgattacaagactacaaagaatgttctagctgctattcctaacagaacatttgccaagattaatccgggtgaaattattcctctcatcactaatcgtaatattctaaaacctcttattggtcagaaatattgtattgtatatactaactctctaatggatgagaacacgtatgctatggagttgcttactgggtacgcccctgtatctccgatcgttatagcgagaactcataccgcacttatatttttgatgggtaagccaacaacatccagacgtgatgtgtatagaacgtgtagagatcacgctacccgtgtacgcgcaactggtaattaaaataaaaagtaatattcatatgtagtgtcaattttaaatgatgatgatgaaatggataatatccatattgacgatgtcaataatgccggtattggcatacagctcatcgatttttagatttcattcagaggatgtggaattatgttatgggcatttgtattttgataggatctataatgtagtaaatataaaatataatccgcatattccatatagatataattttattaatcgcacgttaaccgtagatgaactagacgataatgtcttttttacacatggttattttttaaaacacaaatatggttcacttaatcctagtttgattgtctcattatcaggaaacttaaaatataatgatatacaatgctcagtaaatgtatcgtgtctcattaaaaatttggcaacgagtacatctactatattaacatctaaacataagacttattctctacatcggtccacgtgtattactataataggatacgattctattatatggtataaagatataaatgacaagtataatgacatctatgattttactgcaatatgtatgctaatagcgtctacattgatagtgaccatatacgtgtttaaaaaaataaaaatgaactcttaattatgctatgctattagaaatggataaaatcaaaattacggttgattcaaaaattggtaatgttgttaccatatcgtataacttggaaaagataactattgatgttacacctaaaaagaaaaaagaaaaggatgtattattagcgcaatcagttgctgtcgaagaggcaaaagatgtcaaggtagaagaaaaaaatattatcgatattgaagatgacgatgatatggatgtagaaagcgcataatacgatctataaaaataagtatataataaatactttttatttacggtactcttgtagtggtgataccctactcaattatttttttaaaaaaatacttattctgattcttctagccatttccgtgttcgttcgaatgccacatcgacgttaaagataggggagtagttgaaatctagttctgcattgttggtacgcacctcaaatgtagtgttggatatcttcaacgtatagttgttgagtagtgatggttttctaaatagaattctcttcatatcattcttgcacgcgtacatttttagcatccatcttggaattctagatccttgttctattcccaatggtttcatcaatagaagattaaacatatcgtacgaacacgatggagagtaatcgtagcaaaagtaagcatttcctttaatcttagatcccggatactggatatattttgcagccaacacgtgcatccatgcagcatttcctacatatacccggctatgcaccgcgtcatcatcgactgtacgatacataatgttaccgtgttgcttacattgctcgtaaaagactttcgtcaatttgtctccttctccgtaaattccagtgggtcttaggcaacaagtatacaattttgctccattcatgattacggaattattggctttcataaccagttgctcggccatacgtttactttttgcgtatacatgtcctggtgatatatcataaagggtatgctcatggccgatgaatggatcaccgtgtttattgggtcctattgcttccatgctactagtatagatcaaatacttgattcctaggtccacacaagctgccaatatagtctgtgttccataatagtttactttcatgatttcattatcggtgtattttccaaatacatccactagagcagccgtatgaataatcagatttaccccatctagcgcttctctcaccttatcaaagtcgtttatatcacattgtatatagtttataaccttaactttcgaggttattggttgtggatcttctacaatatctatgactctgatttcttgaacatcatctgcactaattaacagttttactatatacctgcctagaaatccggcaccaccagtaaccgcgtacacggccattgctgccactcataatatcagactacttattctattttactaaataatggctgtttgtataatagaccacgataatatcagaggagttatttactttgaaccagtccatggaaaagataaagttttaggatcagttattggattaaaatccggaacgtatagtttgataattcatcgttacggagatattagtcaaggatgtgattccataggcagtccagaaatatttatcggtaacatctttgtaaacagatatggtgtagcatatgtttatttagatacagatgtaaatatatttacaattattggaaaggcgttatctatttcaaaaaatgatcagagattagcgtgtggagttattggtatttcttacataaatgaaaagataatacattttcttacaattaacgagaatggcgtttgatatatcagttaatgcgtctaaaacaataaatgcattagtttacttttctactcagcaaaataaattagtcatacgtaatgaagttaatgatacacactacactgtcgaatttgatagggacaaagtagttgacacgtttatttcatataatagacataatgacaccatagagataagaggggtgcttccagaggaaactaatattggttgcgcggttaatacgccggttagtatgacttacttgtataataagtatagttttaaactgattttagcagaatatataagacacagaaatactatatccggcaatatttattcggcattgatgacactagatgatttggctattaaacagtatggagacattgatctattatttaatgagaaacttaaagtagactccgattcgggactatttgactttgtcaactttgtaaaggatatgatatgttgtgattctagaatagtagtagctctatctagtctagtatctaaacattgggaattgacaaataaaaagtataggtgtatggcattagccgaacatatatctgatagtattccaatatctgagctatctagactacgatacaatctatgtaagtatctacgcggacacactgagagcatagaggatgaatttgattattttgaagacgatgattcgtctacatgttctgccgtaaccgacagggaaacggatgtataattttttttatagcgtgaaggatatgataaaaaatataattgttgtatttatcccattccaatcaccttatatgattctgtaaaaaaattatactgtaacacaataaaggagtcttatagatgtatagaggtcagatactggtttgataaactgtttattccacataagtatgtttgactttatggttagacccgcatactttaacaaatcactgaaaattggagttaggtattgacctctcagaatcagttgccgttctggaacattaaatgtattttttatgatatactccaacgcatttatgtgggcatacaacaagtcattactaatggagtattccaagagttttagttgtctagtatttaacaagagaagagatttcaacagactgtttatgaactcgaacgccgcctcattgtcgcttatattgatgatgtcgaattctcccaatatcatcactgatgagtagctcatcttgttatcgggatccaagttttctaaagatgtcattaaaccctcgatcatgaatggatttatcatcatcgtttttatgttggacatgagcttagtccgtttgtccacatctatagacgacgatttctgaattatttcatatatccctctctttaactccaggaacttgtcaggatggtctactttaatatgttctcgtctaagagatgaaaatctttggatggttgcacgcgacttttctttaaaggatgacgttgcccaagatcctctcttaaatgaatccatcttatccttggacaagatggacagtctattttccttagatggtttaatatttttgttacccatgatctataaaggtagacctaatcgtctcggatgaccatatatttattttcagttttattatacgcataaattgtaaaaaatatgttaggtttacaaaaatgtctcgtggggcattaatcgtttttgaaggattggacaaatctggaaaaacaacacaatgtatgaacatcatggaatctataccggcaaacacgataaaatatcttaactttcctcagagatccactgtcactggaaagatgatagatgactatctaactcgtaaaaaaacctataatgatcatatagttaatctattattttgtgcaaatagatgggagtttgcatcttttatacaagaacaactagaacagggaattactttaatagttgatagatacgcattttctggagtagcgtatgccgccgctaaaggcgcgtcaatgactctcagtaagagttatgaatctggattgcctaaacccgacttagttatattcttggaatctggtagcaaagaaattaatagaaacgtcggcgaggaaatttatgaagatgttacattccaacaaaaggtattacaagaatataaaaaaatgattgaagaaggagatattcattggcaaattatttcttctgaattcgaggaagatgtaaagaaggagttgattaagaatatagttatagaggctatacacacggttactggaccagtggggcaactgtggatgtaatagtgaaattacattttttataaatagatgttagtacagtgttataaatggatgaagcatattactctggcaacttggaatcagtactcggatacgtgtccgatatgcataccgaactcgcatcaatatctcaattagttattgccaagatagaaactatagataatgatatattaaacaaggacattgtaaattttatcatgtgtagatcaaacttggataatccatttatctctttcctagatactgtatatactattatagatcaagagatctatcagaccgaattgattaattcattagacgacaatgaaattatcgattgtatagttaacaagtttatgagcttttataaggataacctagaaaatatagtagatgctatcattactctaaaatatataatgaataatccagattttaaaactacgtatgccgaagtactcggttccagaatagccgatatagatattaaacaagtgatacgtaagaatatactacaattgtctaatgatatccgcgaacgatatttgtgaaaaatattaaaaaaaaatactttttttattaaatgacgtcgcttcgcgaatttagaaaattatgctgtgatatatatcacgcatcaggatataaagaaaaatctaaattaattagagactttataacagatagggatgataaatatttgatcattaagctattgcttcccggattagacgatagaatttataacatgaacgataaacaaattataaaattatatagtataatatttaaacaatctcaggaagatatgctacaagatttaggatacggatatataggagacactattaggactttcttcaaagagaacacagaaatccgtccacgagataaaagcattttaactttagaagaagtggatagttttttaactacgttatcatccgtaactaaagaatcgcatcaaataaaattattgactgatgtagcatctgtttgtacatgtaatgatttaaaatgtgtagtcatgcttattgataaagatctaaaaattaaagcgggccctcggtacgtacttaacgctattagtcctcatgcctatgatgtgtttagaaaatctaataacttgaaagagataatagaaaatgcatctaaacaaaatctagactctatatctatttctgttatgactccaattaatcccatgttagcggaatcgtgtgattctgtcaataaggcgtttaaaaaatttccatcaggaatgtttgcggaagtcaaatacgatggtgaaagagtacaagttcataaaaataataacgagtttgccttctttagtagaaacatgaaaccagtactctctcataaagtggattatctcaaagaatacataccgaaagcatttaaaaaagctacgtctatcgtattggattctgaaattgttcttgtagacgaacataatgtaccgctaccgtttggaagtttaggaatacacaaaaagaaagaatataaaaactctaacatgtgtttgttcgtgtttgactgtttgtactttgatggattcgatatgacggacattccattgtacgaacgaagatcttttctcaaagatgttatggttgaaatacccaatagaatagtattctcagagttgacgaatattagtaacgagtctcagttaactgacgtattggatgatgcactaacgagaaaattagaaggattggtcttaaaagatattaatggagtatacgaaccgggaaagagaagatggttaaaaataaagcgagactatttgaacgagggttccatggcagattctgccgatttagtagtactaggtgcctactatggtaaaggagcaaagggtggtatcatggcagtctttctaatgggttgttacgacgatgaatccggtaaatggaagacggttaccaagtgttcaggacacgatgataatacgttaagggagttgcaagaccaattaaagatgattaaaattaacaaggatcccaaaaaaattccagagtggttagtagttaataaaatctatattcccgattttgtagtagaggatccgaaacaatctcagatatgggaaatttcaggagcagagtttacatcttccaagtcccataccgcaaatggaatatccattagatttcctagatttactaggataagagaggataaaacgtggaaagaatctactcatctaaacgatttagtaaacttgactaaatcttaatagttacatacaaactgaaaattaaaataacaccatttagttggtggtcgccatggatggtgttattgtatactgtctaaacgcgttagtaaaacatggcgaggaaataaatcatataaaaaatgatttcatgattaaaccatgttgtgaaagagtttgtgaaaaagtcaagaacgttcacattggcggacaatctaaaaacaatacagtgattgcagatttgccatatatggataatgcggtatccgatgtatgcaattcactgtataaaaagaatgtatcaagaatatccagatttgctaatttgataaagatagatgacgatgacaagactcctactggtgtatataattattttaaacctaaagatgttattcctgttatcatatctataggaaaggataaagatgtctgtgaactattaatctcatcagacatatcgtgtgcatgcgtggagttaaattcatatcacgtagccattcttcccatgaatgtttccttttttaccaaaggaaatgcctcgttgattattctcctgtttgatttctctatcgatgcagcacctctcttaagaagtgtaaccgataataatgttattatatctagacaccagcgtctacatgacgagcttccgagttccaattggttcaagttttacataagtataaagtccgactattgttctatattatatatggttgttgatggatctgtgatgcatgcgatagctgataatagaactcacgcaattattagcaaaaatatattagacaatactacaattaacgatgagtgtagatgctgttattttgaaccacagattaggattcttgatagagatgagatgctcaatggatcatcgtgtgatatgaacagacattgtattatgatgaatttacctgatgtaggcgaatttggatctagtatgttggggaaatatgaacctgacatgattaagattgctctttcggtggctggtaatttaataagaaatcgagactacattcccgggagacgaggctatagctactacgtttacggtatagcctctagataatttttttaagcacgaaataaaaaacataattttaaaccaatctatttcatactattttgtgtgatcaccatggacataaagatagatattagtatttctggtgataaatttacggtgactactaggagggaaaatgaagaaagaaaaaaatatctacctctccaaaaagaaaaaactactgatgttatcaaacctgattatcttgagtacgatgacttgttagatagagatgagatgtttactattctagaggaatattttatgtacagaggtctattaggcctcagaataaaatatggacgactctttaacgaaattaaaaaattcgacaatgatgcggaagaacaattcggtactatagaagaactcaagcagaaacttagattaaattctgaagagggagcagataactttatagattatataaaggtacaaaaacaggatatcgtcaaacttactgtatacgattgcatatctatgataggattgtgtgcatgcgtggtagatgtttggagaaatgagaaactgttttctagatggaaatattgtttacgagcgattaaactgtttattaatgatcacatgcttgataagataaaatctatactgcagaatagactagtatatgtggaaatgtcatagaaagttaatgagagcaaaaatatataaggttgtattccatatttgttattttttctgtaatagttaaaaaaatacattcgatggtctatctatcagattattatgtgttataaggtactttttctcataataaactagagtatgagtaagatagtgtttttcaaaacatataaatctaaaattgatggatgagatatacagctattaatttcgaaaatatataaatctaaaattgatggataagatatacagctattaatttcgaaaatatattttaatctgataactttaaacatggatttttgatggtggtttaacgttttaaaaaagattttgttattgtagtatatgataatattaaaagatggatataaagaatttgctgactgcatgtactattttttacattactacattggctacggcagatatacctactccgccaccaacgggtcatgtgacaagggagaatatcttgataagaggcataatcaatgttgtaatcggtgtccacctggagaatttgccaaggttagatgtaatggtaacgataacacaaaatgtgaacgctgcccacctcatacatataccacaatccccaattattctaatggatgtcatcaatgtagaaaatgcccaaccggatcatttgataaggtaaagtgtaccggaacacagaacagtaaatgttcgtgtcttcctggttggtattgcgctactgattcttcacagactgaagattgttgaaattgtgtaccaaaaaggagatgtccatgcggatactttggtggaatagatgaacaaggaaatcctatttgtaaatcgtgctgtattggtgaatattgcaactacctacgtaattatagacttgatccattttctccatgcaaactatctaaatgtaattaattatgattttgatgataatgttaccatacattatatcgctacttggttagtgtattattcagtatgaagacctattaataattacttatcttttgacgatcttgttataattataatataaaaacttatggcatagtaactcataattgctgacgcgataaattcgtaataatctgttttgttcaaatttttataaggaatctacaggcataaaaataaaaatataatttataatatactcttacagcgcgccatcatgaatagcagcagtaaattaattgctgttattaatggatttagaaatagtggacgattttgtgatattaatatagttattaatgatgaaaggataaacgctcacagactcatcctatctggagcctccgaatatttttccattctgttttccaataattttatcgattctaatgaatacgaagttaatctaagtcatttagattatcaaagtgttaacgatttgatcgattacatttatgggatacctttgagcctaactaacgataacgtgaaatatattctttcaaccgctgattttttacaaattggatctgccattactgagtgcgaaaaatacatacttaaaaatctttgttctagaaactgtatcgatttctacatatacgctgataaatataataacaagaaaatagaatcagcgtcgtttaacacaatattacgaaatattttgagactcatcaacgatgaaaactttaaatacttaacagaggaatcaatgataaaaattttaagcgatgatatgttaaatataaaaaatgaggattttgcaccactaattctcattaaatggttagagagtactcaacaatcatgcaccgtcgagttacttagatgcctcagaatatcattgctttccccacaagttataaaatcactttatagtcatcaactggttagttcaatctacgaatgtataacattcttaaacaatatagcattcttggatgaatcatttcctagataccatagcatcgagttgatatctatcggtataagtaattcgcatgataagatttccataaactgctacaatcataaaaaaaatacatgggaaatgatatcttcacgtagatataggtgtagtttcgcagtggccgtcctggataatattatctatatgatgggtggatatgatcagtccccgtatagaagttcaaaggttatagcgtacaatacatgtacaaattcttggatatatgatataccagagctaaaatatcctcgttctaattgtgggggactggctgatgacgaatacatttattgtataggcggcatacgcgatcaggattcatcgttgacatctagtattgatagatggaagccatcaaaaccatattggcagaagtatgctaaaatgcgcgaaccaaaatgtgatatgggggttgcgatgttaaacggattaatatatgtcatgggtggaatcgttaaaggtgacacgtgtaccgacgcactagagagtttatcagaagatggatggatgaagcatcaacgtcttccaataaaaatgtccaatatgtcgacgattgttcatgatggcaagatttatatatctggaggttacaacaatagtagtgtagttaatgtaatatcgaatctagtccttagctataatccgatatatgatgaatggaccaaattatcatcattaaacattcctagaattaatcccgctctatggtcagcgcataataaattatatgtaggaggaggaatatctgatgatgttcgaactaatacatctgaaacatacgataaagaaaaagattgttggacattggataatggtcacgtgttaccacgcaattatataatgtataaatgcgaaccgattaaacataaatatccattggaaaaaacacagtacacgaatgattttctaaagtatttggaaagttttataggtagttgatagaacaaaatacataattttgtaaaaataaatcactttttatactaatatgacacgattaccaatacttttgttactaatatcattagtatacgctacaccttttcctcagacatctaaaaaaataggtgatgatgcaactctatcatgtaatcgaaataatacaaatgactacgttgttatgagtgcttggtataaggagcccaattccattattcttttagctgctaaaagcgacgtcttgtattttgataattataccaaggataaaatatcttacgactctccatacgatgatctagttacaactatcacaattaaatcattgactgctagagatgccggtacttatgtatgtgcattctttatgacatcaactacaaatgacactgataaagtagattatgaagaatactccacagagttgattgtaaatacagatagtgaatcgactatagacataatactatctggatctacacattcaccagaaactagttctgagaaaccagaggatatagataattttaattgctcgtcggtattcgaaatcgcgactccggaaccaattactgataatgtagaagatcatacagacacaccgtcacatacactagtgatagcattaatacagtaagtgcatcatctggagaatccacaacagacgagactccggaaccaattactgataaagaagaagatcatacagtcacagacactgtctcatacactacagtaagtacatcatctggaattgtcactactaaatcaaccaccgatgatgcggatctttatgatacgtacaatgataatgatacagtaccaccaactactgtaggcggtagtacaacctctattagcaattataaaaccaaggactttgtagaaatatttggtattaccgcattaattatattgtcggccgtggcaatattctgtattacatattatatatataataaacgttcacgtaaatacaaaacagagaacaaagtctagatttttgacttacataaatgtctgggatagtaaaatctatcatattgagcggaccatctggttcaggaaagacagccatagccaaaagactatgggaatatatttggatttgtggtgtcccataccactagatttcctcgtcctatggaacgagaaggtgtcgattaccattacgttaacagagaggccatctggaagggaatagccgccggaaactttctagaacatactgagtttttaggaaatatttacggaacttctaaaactgctgtgaatacagcggctattaataatcgtatttgtgtgatggatctaaacatcgatggcgttagaagtcttaaaaatacgtacctaatgccttactcggtgtatataagacctacctctcttaaaatggttgagaccaagcttcgttgtagaaacactgaagcggatgatgagattcatcgtcgtgtgatgttggcaaaaactgacatggatgaggcaggtgaagccggtctattcgacactattatcattgaagatgatgtgaatttagcatatagtaagttaattcagatactacaggaccgtattagaatgtattttaacactaattagagacttaagacttaaaacttgataattaataatataactcgtttttatatgtggctatttcaacgtctaatgtattagttaaatattaaaacttaccacgtaaaacttaaaatttaaaatgatatttcattgacagatagatcacacattatgaactttcaaggacttgtgttaactgacaattgcaaaaatcaatgggtcgttggaccattaataggaaaaggtggattcggtagtatttatactactaatgacaataattatgtagtaaaaatagagcccaaagctaacggatcattatttaccgaacaggcattttatactagagtacttaaaccatccgttatcgaagaatggaaaaaatctcacaatataaagcacgtaggtcttatcacgtgcaaggcatttggtctatacaaatccattaatgtggaatatcgattcttggtaattaatagattaggtgcagatctagatgcggtgatcagagccaataataatagattaccaaaaaggtcggtgatgttgatcggaatcgaaatcttaaataccatacaatttatgcacgagcaaggatattctcacggagatattaaagcgagtaatatagtcttggatcaaatagataagaataaattatatctagtggattacggattggtttctaaattcatgtctaatggcgaacatgttccatttataagaaatccaaataaaatggataacggtactctagaatttacacctatagattcgcataaaggatacgttgtatctagacgtggagatctagaaacacttggatattgtatgattagatggttgggaggtatcttgccatggactaagatatctgaaacaaagaattgtgcattagtaagtgccacaaaacagaaatatgttaacaatactgcgactttgttaatgaccagtttgcaatatgcacctagagaattgctgcaatatattaccatggtaaactctttgacatattttgaggaacccaattacgacgagtttcggcacatattaatgcagggtgtatattattaagtgtggtgtttggtcgatgtaaaatttttgtcgataaaaattaaaaaataacttaatttattattgatctcgtgtgtacaaccgaaatcatggcgatgttttacgcacacgctctcggtgggtacgacgagaatcttcatgcctttcctggaatatcatcgactgttgccaatgatgtcaggaaatattctgttgtgtcagtttataataacaagtatgacattgtaaaagacaaatatatgtggtgttacagtcaggtgaacaagagatatattggagcactgctgcctatgtttgagtgcaatgaatatctacaaattggagatccgatccatgatcaagaaggaaatcaaatctctatcatcacatatcgccacaaaaactactatgctctaagcggaatcgggtacgagagtctagacttgtgtttggaaggagtagggattcatcatcacgtacttgaaacaggaaacgctgtatatggaaaagttcaacatgattattctactatcaaagagaaggccaaagaaatgaatgcactcagttcaggacctatcatcgattaccacgtctggataggagattgtatctgtcaagttactgctgtggacgtacatggaaaggaaattatgagaatgagattcaaaaagggtgcggtgctacagatcccaaatctggtaaaagttaaacttggggagaatgatacagaaaatctttcttctactatatcggcggcaccatcgaggtaaccacctctcaagaagaccgcgtgaataatgtactcatgaaacgtttggaaactatacgccatatgtggtctgttgtatatgatcattttgatattgtgaatggtaaagaatgctgttatgtgcatacgcattcatctaatcaaaatcctataccgagtactgtaaaaacaaatttgtacatgaagactatgggatcatgcattcaaatggattccatggaagctctagagtatcttagcgaactgaaggaatcaggtggatggagtcccagaccagaaatgcaggaatttgaatatccagatggagtggaagacactgaatcaattgagagattggtagaggagttcttcaatagatcagaacttcaggctggtaaattagtcaaatttggtaattctattaattgttaaacatacatctgtttcagctaagcaactaagaacacgtatacggcagcagcttccttttatactctcatcttttaccaacacaaagggtggatatttgttcattggagttgataataatacacacaaagtatttggattcacggtgggttacgactacctcagactgatagagaatgatatagaaaagcatatcaaaagactttgtgttgtgcatttctgtgagaagaaagaggacatcaagtacacgtgtcgattcatcaaggtatataaacctggggatgaggctacctcgacatacgtgtgcgctatcaaagtggaaagatgctgttgtgctgtgtttgcagattggccagaatcatggtatatggatactaatggtatcaagaagtattctccagatgaatgggtgtcacatataaaattttaattaatgtaactatagagaacaaataataggttgtaatatcatatagacaataactaacaattaattagtaactgttatctcttttttaactaaccaactaactatatacctattaatacatcgtaattatagttcttaacatctattaatcattgattcgcttctttaattttttataaactaacattgttaattgaaaagggataacatgttacagaatataaattatatatggatttttttaaaaaggaaatacttgactggagtgtatatttatctcttcattatatagcacgcgtgtgttccaattcttccacatcccatataatacaggattataatctcgttcgaacatacgagaaagtggataaaacaatagttgattttttatctaggttgccaaatttattccatattttagaatatggggaaaatattctacatatttattctatggatgatgctaatacgaatattataattttttttctagatagagtattaaatattaataagaacgggtcatttatacacaatctcaggttatcatcatccattaatataaaagaatatgtatatcaattagttaataatgatcatccagataataggataagactaatgcttgaaaatggacgtagaacaagacattttttgtcctatatatcagatacagttaatatctatatatgtattttaataaatcatggattttatatagatgcagaagacagttacggttgtacattattacatagatgtatatatcactataagaaatcagaatcagaatcatacaatgaattaattaagatattgttaaataatggatccgatgtagataaaaaagatacgtacggaaacacaccttttatcctattatgtaaacacgatatcaacaacgtggaattgtttgagatatgtttagagaatgctaatatagactctgtagactttaatagatatacacctcttcattatgtctcatgtcgtaataaatatgattttgtaaagttattaatttctaaaggagcaaatgttaatgcgcgtaataaattcggaactactccattttattgtggaattatacacggtatctcgcttataaaactatatttggaatcagacacagagttagaaatagataatgaacatatagttcgtcatttaataatttttgatgctgttgaatctttagattatctattatccagaggagttattgatattaactatcgtactatatacaacgaaacatctatttacgacgctgtcagttataatgcgtataatacgttggtctatctattaaacagaaatggtgattttgagacgattactactagtggatgtacatgtatttcggaagcagtcgcaaacaacaacaaaataataatggaagtactattgtctaaacgaccatctttgaaaattatgatacagtctatgatagcaattactaaaaataaacaacataatgcagatttattgaaaatgtgtataaaatatactgcgtgtatgaccgattatgatactcttatagatgtacagtcgctacagcaatataaatggtatattttaaaatgtttcgatgaaatagatatcatgaagagatgttatataaaaaataaaactgtattccaattagttttttgtatcaaagacattaatactttaatgagatatggtaaacatccttctttcgtgaagtgcactagtctcgacgtatacggaagtcgtgtacgtaatatcatagcatctattagatatcgtcagagattaattagtctattatccaagaagctggatgcgggagataaatggtcgtgttttcctaacgaaataaaatataaaatattggaaaactttaacgataacgaactatccacatatctaaaaatcttataaacactattaaaatataaaatctaagtaggataaaatcacactacatcattgtttccttttagtgctcgacagtgtatactatttttaacactcataaataaaaatgaaaacgatttccgttgttacgttgttatgcgtactacctgctgttgtttattcaacatgtactgtacccactatgaataacgctaaattaacgtctaccgaaacatcgtttaatgataaacagaaagttacatttacatgtgatcagggatatcattctttggatccaaatgctgtctgcgaaacagataaatggaaatacgaaaatccatgcaagaaaatgtgcacagtttctgattatgtctctgaattatatgataagccattatacgaagtgaattccaccatgacactaagttgcaacggcgaaacaaaatattttcgttgcgaagaaaaaaatggaaatacttcttggaatgatactgttacgtgtcctaatgcggaatgtcaacctcttcaattagaacacggatcgtgtcaaccagttaaagaaaaatactcatttggggaatatatgactatcaactgtgatgttggatatgaggttattggtgcttcgtacataagttgtacagctaattcttggaatgttattccatcatgtcaacaaaaatgtgatataccgtctctatctaatggattaatttccggatctacattttctatcggtggcgttatacatcttagttgtaaaagtggttttatactaacgggatctccatcatccacatgtatcgacggtaaatggaatcccatactcccaacatgtgtacgatctaacgaaaaatttgatccagtggatgatggtcccgacgatgagacagatttgagcaaactctcgaaagacgttgtacaatatgaacaagaaatagaatcgttagaagcaacttatcatataatcatagtggcgttaacaattatgggcgtcatatttttaatctccgttatagtattagtttgttcctgtgacaaaaataatgaccaatataagttccataaattgctaccgtaaatataaatccgttaaaataattaataatttaataacaaacaagtatcaaaagattaaagacttatagctagaatcaattgagatgtcttcttcagtggatgttgatatctacgatgccgttagagcatttttactcaggcactattataacaagagatttattgtgtatggaagaagtaacgccatattacataatatatacaggctatttacaagatgcgccgttataccgttcgatgatatagtacgtactatgccaaatgaatcacgtgttaaacaatgggtgatggatacacttaatggtataatgatgaatgaacgcgatgtttctgtaagcgttggcaccggaatactattcatggaaatgtttttcgattacaataaaaatagtatcaacaatcaactaatgtatgatataattaatagcgtatctataattctagctaatgagagatatagaagcgcttttaacgacgatggtatatacatccgtagaaatatgattaacaagttgtacggatacgcatctctaactactattggcacgatcgctggaggtgtttgttattatctgttgatgcatctagttagtttgtataaataattatttcaatatactagttaaaattttaagattttaaatgtataaaaaactaataacgtttttatttgtaataggtgcattagcatcctattcgaataatgagtacactccgtttaataaactgagtgtaaaactctatatagatggagtagataatatagaaaattcatatactgatgataataatgaattggtgttaaattttaaagagtacacaatttctattattacagagtcatgcgacgtcggatttgattccatagatatagatgttataaacgactataaaattattgatatgtataccattgactcgtctactattcaacgcagaggtcacacgtgtagaatatctaccaaattatcatgccattatgataagtacccttatattcacaaatatgatggtgatgagcaacaatattctattactgcagagggaaaatgctataaaggaataaaatatgaaataagtatgatcaacgatgatactctattgagaaaacatactcttaaaattggatctacttatatatttgatcgtcatggacatagtaatacatattattcaaaatatgatttttaaaaatttaaaatatattatcacttcagtgacagtagtcaaataacaaacaacaccatgagatatattataattctcgcagttttgttcattaatagtatacacgctaaaataactagttataagtttgaatccgtcaattttgattccaaaattgaatggactggggatggtctatacaatatatcccttaaaaattatggcatcaagacgtggcaaacaatgtatacaaatgtaccagaaggaacatacgacatatccgcatttccaaagaatgatttcgtatctttctgggttaaatttgaacaaggcgattataaagtggaagagtattgtacgggactatgcgtcgaagtaaaaattggaccaccgactgtaacattgactgaatacgacgaccatatcaatttgtacatcgagcatccgtatgctactagaggtagcaaaaagattcctatttacaaacgcggtgacatgtgtgatatctacttgttgtatacggctaacttcacattcggagattctaaagaaccagtaccatatgatatcgatgactacgattgcacgtctacaggttgcagcatagactttgtcacaacagaaaaagtgtgcgtgacagcacagggagccacagaagggtttctcgaaaaaattactccatggagttcgaaagtatgtctgacacctaaaaagagtgtatatacatgcgcaattagatccaaagaagatgttcccaatttcaaggacaaaatggccagagttatcaagagaaaatttaataaacagtctcaatcttatttaactaaatttctcggtagcacatcaaatgatgttaccacttttcttagcatgcttaacttgactaaatattcataactaatttttattaatgatacaaaaacgaaataaaactgcatattatacactggttaacgcccttataggctctaaccattttcaagatgaggtccctgattatagtccttctgttcccctctatcatctactccatgtctattagacgatgtgagaagactgaagaggaaacatggggattgaaaatagggttgtgtataattgccaaagatttctatcccgaaagaactgattgcagtgttcatctcccaactgcaagtgaaggattgataactgaaggcaatggattcagggatatacgaaacaccgataaattataaaaaaagcaatgtgtccgctgtttccgttaataatactattttcgtaactggcggattattcataaataactctaatagcacgatcgtggttaacaatatggaaaaacttgacatttataaagacaaacaatggtcgattatagaaatgcctatggctagggtatatcacggcatcgactcgacatttggaatgttatattttgccggaggtctatccgttaccgaacaatatggtaatttagagaaaaacaacgagatatcttgttacaatcctagaacgaataagtggtttgatatttcatatactatttataagatatccatatcatcattgtgtaaactaaataacgtcttctatgtatttagtaaggacattggatatgtggaaaagtatgatggtgcatggaagttagtacatgatcgtctccccgctataaaggcattatcaacttctccttattgattgaaaatgaaaatataaatagtttttatgtatagcagtattaccctatagttttattgcttactactaacatggatacagatgttacaaatgtagaagatatcataaatgaaatagatagagagaaagaagaaatactaaaaaatgtagaaattgaaaataataaaaacattaacaagaatcatccaagtggatatattagagaagcactcgttattaatacaagtagtaatagtgattccattgataaagaagttatagaatgtatcagtcacgatgtaggaatatagatcatatctactaatttttataatcgatacaaaacataaaaaacaactcgttattacatagcaggcatggaatccttcaagtattgttttgataacgatggcaagaaatggattatcggaaatactttatattctggtaattcaatactatataaggtcagaaaaaatttcactagttcgttctacaattacgtaatgaaaatagatcacaaatcacacaagccattgttgtctgaaatacgattctatatatctgtattggatcctttgactatcgacaactggacacgggaacgtggtataaagtatttggctattccagatctgtatggaattggagaaaccgatgattatatgttcttcgttataaagaattcgggaagagtattcgccccaaaggatactgaatcagtcttcgaagcatgcgtcactatgataaacacgttagagtttatacactctcgaggatttacccatggaaaaatagaaccgaggaatatactgattagaaataaacgtctttcactaattgactattctagaactaacaaactatacaagagtggaaactcacatatagattacaacgaggacatgataacttcaggaaatatcaattatatgtgtgtagacaatcatcttggagcaacagtttcaaaacgaggagatttagaaatgttgggatattgcatgatagaatggttcggtggcaaacttccatggaaaaacgaaagtagtataaaagtaataaaacaaaaaaaagaatataaaaaatttatagctactttctttgaggactgttttcctgaaggaaatgaacctctggaattagttagatatatagaattagtatacacgttagattattctcaaactcctaattatgacagactacgtaaactgtttatacaagattgaaattatattctttttttatagagtgtggtagtgttacggatatctaatattaatattagactatctctatcgcgctacacgaccaatatcgattactatggatatcttcagggaaatcgcatcttctatgaaaggagagaatgtattcatttctccagcgtcaatctcgtcagtattgacaatactgtattatggagctaatggatccactgctgaacagctatcaaaatatgtagaaacggaggagaacacggataaggttagcgctcagaatatctcattcaaatccatgaataaagtatatgggcgatattctgccgtgtttaaagattcctttttgagaaaaattggcgataagtttcaaactgttgacttcactgattgtcgcactatagatgcaatcaacaagtgtgtagatatctttactgaggggaaaatcaatccactattggatgaaccattgtctcctgatacctgtctcctagcaattagtgccgtatactttaaagcaaaatggttgatgccattcgaaaaggaatttaccagtgattatcccttttacgtatctccgacggaaatggtagatgtaagtatgatgtctatgtacggcaaggcatttaatcacgcatctgtaaaggaatcattcggcaacttttcaatcatagaactgccatatgttggagatactagtatgatggtcattcttccagacaagattgatggattagaatccatagaacaaaatctaacagatacaaattttaagaaatggtgtaactctctggaagctacgtttatcgatgttcacattcccaagtttaaggtaacaggttcgtataatcttgtggatactctagtaaagtcaggactgacagaggtgttcggttcaactggagattatagcaatatgtgtaattcagatgtgagtgtcgacgctatgattcacaaaacgtatatagatgtcaatgaagagtatacagaagcagctgcagcaacttgtgcactggtgtcagactgtgcatcaacaattacaaatgagttctgtgtagatcatccgttcatctatgtgattaggcatgttgatggaaaaattcttttcgttggtagatattgctctccgacaactaattgttaaccattttttttaaaaaaatagaaaaaacatgtggtattagtgcaggtcgttgttcttccaattgcaattggtaagatgacggccaactttagtacccacgtcttttcaccacagcactgtggatgtgacagactgaccagtattgatgacgtcagacaatgtttgactgaatatatttattggtcgtcctatgcataccgcaacaggcaatgcgctggacagttgtattccacactcctctcttttagagatgatgcggaatcagtgttcatcgacattcgcgagctggtaaaaaatatgccgtgggatgatgtcaaagattgtacagaaatcatccgttgttatataccggatgagcaaaaaaccatcagagagatttcggccatcatcggactttgtgcatatgctgctacttactggggaggtgaagaccatcccactagtaacagtctgaacgcattgtttgtgatgcttgagatgctcaattacgtggattataacatcatattccggcgtatgaattgatgagttgtacatcttgacattttctttcttctcttctccctttcttctcttctcccttcctccctcttctccctttcccagaaacaaacttttttacccactataaaataaaatgagtatactacctattatatttcttcctatatttttttattcttcattcgttcagacttttaacgcgcctgaatgtatcgacaaagggcaatattttgcatcattcatggagttagaaaacgagccagtaatcttaccatgtcctcaaataaatacgctatcatccggatataatatattagatattttatgggaaaaacgaggagcggataatgatagaattataccgatagataatggtagcaatatgctaattctgaacccgacacaatcagactctggtatttatatatgcattaccacgaacgaaacctactgtgacatgatgtcgttaaatttgacaatcgtgtctgtctcagaatcaaatatagatcttatctcgtatccacaaatagtaaatgagagatctactggcgaaatggtatgtcccaatattaatgcatttattgctagtaacgtaaacgcagatattatatggagcggacatcgacgccttagaaataagagacttaaacaacggacacctggaattattaccatagaagatgttagaaaaaatgatgctggttattatacatgtgttttagaatatatatacagaggtaaaacatataacgtaaccagaattgtaaaattagaggtacgggataaaataataccttctactatgcaattaccagatggcattgtaacttcaataggtagtaatttgactattgcgtgtagagtatcgttgagacctcccacaacggatgcagacgtcttttggataagtaatggtatgtattacgaagaagatgatggggacggagacggtagaataagtgtagcaaataaaatctatatgaccgataagagacgtgttattacatcccggttaaacattaatcctgtcaaggaagaagatgctacaacgtttacgtgtatggcgtttactattcctagcatcagcaaaacagttactgttagtataacgtgaatgtatgttgttacatttccatgtcaattgagtttataagaatttttatacattatcttccaacaaacaattgacgaacgtattgctatgattaactcccacgatactatgcatattattaatcattaacttgcagactatacctagtgctattttgacatactcatgttcttgtgtaattgcggtatctatattattaaagtacgtaaatctagctatagttttattatttaattttagataatataccgtctccttatttttaaaaattgccacatcctttattaaatcatgaatgggaatttctatgtcatcgttagtatattgtgaacaacaagagcagatatctataggaaagggtggaatgcgatacattgatctatgtagttttaaaacacacgcgaactttgaagaatttatataaatcattccatcgatacatccttctatgttgacatgtatatatccaggaattcttttattaatgtcaggaaatgtataaactaaaacattgcccgaaagcggtgcctctatctgcgttatatccgttcttaacttacaaaatgtaaccaatacctttgcatgacttgttttgttcggcaacgttagtttaaacttgacgaatggattaattacaatagcatgatccgcgcatctattaagtttttttactttaacgcccttgtatgtttttacagagactttatctaaatttctagtacttgtatgtgttataaatataacgggatatagaactgaatcacctaccttagatacccaattacattttatcagatccagataataaacaaattttgtcgccctaactaattctatattgttatatattttacaattggttatgatatcatgtaataacttggagtctaacgcgcatcgtcgtacgtttatacaattgtgatttagtgtagtatatctacacatgtatttttccgcactatagtattctggactagtgataaaactatcgttatatctgtcttcaatgaactcatcgagatattgctctctgtcatattcatacacctgcataaactttctagacatcttacaatccgtgttattttaggatcatatttacatatttacgggtatatcaaagatgttagattagttaatgggaatcgtctataataatgaatattaaacaattatatgaggacttttaccacaaagcatcataaaaatgagtcgtcgtctgatttatgttttaaatatcaaccgcaaatcaactcataaaatacaagagaatgaaatatatacatattttagtcattgcaatatagaccatacttctacagaacttgattttgtagttaaaaactatgatctaaacagacgacaacatgtaactgggtatactgcactacactgctatttgtataataattactttacaaacgatgtactgaagatattattaaatcatgacgtaaatgtaacgatgaaaaccagtagcggacgtatgcctgtttatatattgcttactagatgttgcaatatttcacatgatgtagtgatagatatgatagacaaagataaaaaccacttattacatagagactattccaacctattactagagtatataaaatctcgttacatgttattaaaggaagaggatatcgatgagaacatagtatccactttattagataagggaatcgatcctaactttaaacaagacggatatacagcgttacattattattatttgtgtctcgcacacgtttataaaccaggtgagtgtagaaaaccgataacgataaaaaaggccaagcgaattatttctttgtttatacaacatggagctaatctaaacgcgttagataattgtggtaatacaccattccatttgtatcttagtattgaaatgtgtaataatattcatatgactaaaatgctgttgacttttaatccgaatttcaaaatatgtaataatcatggattaacgcctatactatgttatataacttccgactacatacaacacgatattcttgttatgttaatacatcactatgaaacaaatgttggagaaatgccgatagatgagcgtcgtatgatcgtattcgagtttatcaaaacatattctacacgtccggcagattcgataacttatttgatgaataggtttaaaaatataaatatttatacccgctatgaaggaaagacattattacacgtagcatgtgaatataataatacacacgtaatagattatcttatacgtatcaacggagatataaatgcgttaaccgacaataacaaacacgctacacaactcattatagataacaaagaaaattccccgtataccatcgattgtttactgtatatacttagatatattgtagataagaatgtgataagatcgttggtggatcaacttccatctctacctatcttcgatataaaatcatttgagaaattcatatcctactgtatacttttagatgacacattttacgataggcacgttaagaatcgcgattctaaaacgtatcgatacgcattttcaaaatacatgtcgtttgataaatacgatggtataataactaaatgtcacgacgaaacaatgttactcaaactgtccactgttctagacactacactatatgcagttttaagatgccataattcgaaaaagttaagaagatacctcaacgagttaaaaaaatataataacgataagtcctttaaaatatattctaatattatgaatgagagataccttaatgtatattataaagatatgtacgtgtcaaaggtatatgataaactatttcctgttttcacagataaaaattgtctactaacattactaccttcagaaattatatacgaaatattatacatgctgacaattaacgatctttataatatatcgtatccacctaccaaagtatagttgtatttttctcatgcgatgtgtgtaaaaaaactgatattatataaatattttagtgccgtataataaagatgacgatgaaaatgatggtacatatatatttcgtatcattattgttattgctattccacagttacgccatagacatcgaaaatgaaatcacagaattcttcaataaaatgagagatactctaccagctaaagactctaaatggttgaatccagcatgtatgttcggaggcacaatgaatgatatagccgctctaggagagccattcagcgcaaagtgtcctcctattgaagacagtcttttatcgcacagatataaagactatgtggttaaatgggagaggctagaaaagaatagacggcgacaggtttctaataaacgtgttaaacatggtgatttatggatagccaactatacatctaaattcagtaaccgtaggtatttgtgtaccgtaactacaaagaatggtgactgtgttcagggtatagttagatctcatattaaaaaacctccttcatgcattccaaaaacatatgaactaggtactcatgataagtatggcatagacttatactgtggaattctttacgcaaaacattataataatataacttggtataaagataataaggaaattaatatcgacgacattaagtattcacaaacgggaaagaaattaattattcataatccagagttagaagatagtggaagatacaactgttacgttcattacgacgacgttagaatcaagaatgatatcgtagtatcaagatgtaaaatacttacggttataccgtcgcaagaccacaggtttaaactaatactagatccaaaaatcaacgtaacgataggagaacctgccaatataacatgcactgctgtgtcaacgtcattattgattgacgatgtactgattgaatgggaaaatccatccggatggcttataggattcgattttgatgtatactctgttttaactagtagaggcggtattaccgaggcgaccttgtactttgaaaatgttactgaagaatatataggtaatacatataaatgtcgtggacacaactattattttgaaaaaacccttacaactacagtagtattggagtaaatacacaatgcatttttatatacattactgaataattattattattatttatatcgtatttgtgctataacgcgactatctaggtatttgtatctcactgatagagaacatataaatatagactctattaaacagttgtgtaaaatatcaaatcctaatagatgtggatgtacggctttacatgagtacttttataattatagatcagtcaacggaaaatacaagtatagatacaacggttactatcaatattatttatctagcgattatgaaaattataatgaatattattatgatgattatgatagaactggtatgaacagtgagagtgataatatatcaatcaaaacagaatatgaattctatgatgaaacacaagatcaaagtacacaactagtaggttacgacattaaactcaaaaccaatgaggatgattttatggctatgatagatcagtgggtgtccatgattatatagatgaatcaattaataaagtagtatatggaagagagtctcacgtaagatggcgggatatatggcaagaacataatgatggcgtatacagtataggaaaggagtgcatagataatatatacgaagacaaccataccgtagacgaattctacaagatagacagcgtatcagatgtagatgacgcggaacacatatctccgataactaatgatgtatctacacaaacatgggaaaagaaatcagagttagatagatacatggaaatgtatcctcgtcatagatatagtaagcattctgtctttaagggattttctgacaaagttagaaaaaatgatttagacatgaatgtggtaaaagaattactttctaacggtgcatctctaacaattaaggatagcagtaataaggatccaataaccgtttattttcgaagaacgataatgaatttagaaatgattgatattattaacaaacatacaactattgatgaacgaaagtatatagtacactcctatctaaaaaattataaaaatttcgattatccatttttcaggaagttagttttgactaataaacattgtctcaacaattattataatataagcgacagcaaatatggaacaccgctacatatattggcgtctaataaaaaattaataactcctaattacatgaagttattagtgtataacggaaatgatataaacgcacgaggtgaagatacacaaatgcgaactccattacacaaatatttgtgtaaatttgtatatcataatattgaatatggtatccgatactataatgaaaagattatagacgcatttatagagttaggagccgatctaactattccaaataacgatggaatgataccagtagtttactgtatacactcaaatgcagaatatggttataacaatattactaacataaagataatacgtaaactacttaatcttagtagacgtgcgtcacataatctatttagagatcgagtcatgcacgattatataagtaatacatatattgatcttgagtgtttagatattattagatcgttggatggattcgatatcaatggttactttgaaggacgtacaccacttcattgcgctatacaacataacttcactcagattgctaagtacttattagatcgaggagctgatatagtcgtacccaacacattgattatacatcagtacatacagtaaatagcatagatatggaggaggatacaaatatttcaaataaagttataaggtacaacactgtcaataatatatggaagacattacctaacttctggactggaactataaatccaggcgtggtctcgcataaagatgatatatatgttgtatgcgacatcaaagatgaaaaaaatgttaagacttgtatatttagatataacacgaatacgtataacggatgggaattggttacgacgacagaaagcagattatcagctctgcatactattcttcatgacaataccataatgatgttacattgttatgaatcgtatatgttacaagatacatttaatgtgtacactcgcgaatggaatcatatgtgtcatcaacattcgaatagttatatcatgtacaatatactacccatctactaaatataatagaataaaataaatgagtatgatcattttagataacgattgattttatcattaccgcttcattcttatattctttgcttacggaacctatatttagaaacatctactaacgattttttatgcttgcattattaatggtatgtaatatgattgattgtgtacgcaataccaatttgttaagtatgaatacggggtacaaacataaactgaaatttaacattatttatttatgatatatatcgttatcgttattgtttggtctataccatggatatctttaaagaactaatcttaaaacaccctgatgaaaatgttttgatttctccagtttctattttatctactttatctattctaaatcatggagcagctggttctacagctgaacaactatcaaaatatatagagaatatgaatgagaatacacccgatgataagaaggatgacaataatgacatggacgtagatattccgtattgtgcgacactagctaccgcaaataaaatatacggtagcgatagtatcgagttccacgcctccttcctacaaaaaataaaagacgattttcaaactgtaaactttaataatgctaaccaaacaaaggaactaatcaacgaatgggttaagacgatgacaaatggtaaaattaattccttattgactagtccgctatccattaatactcgtatgacagttgttagcgccgtccattttaaagcaatgtggaaatatccattttctaaacatcttacatatacagacaagttttatatttctaagaatatagttaccagtgttgatatgatggtgggtaccgagaataacttgcaatatgtacatattaatgaattattcggaggattctctattatcgatattccatacgagggaaactctagtatggtaattatactaccggacgacatagaaggtatatataacatagaaaaaaatataacagatgaaaaatttaaaaaatggtgtggtatgttatctactaaaagtatagacttgtatatgccaaagtttaaagtggaaatgacagaaccgtataatctggtaccgattttagaaaatttaggacttactaatatattcggatattatgcagattttagcaagatgtgtaatgaaactatcactgtagaaaaatttctacatacgacgtttatagatgttaatgaggagtatacagaagcatcggccgttacaggagtatttatgactaacttttcgatggtatatcgtacgaaggtctacataaaccatccattcatgtacatgattaaagacaacacaggacgtatactttttatagggaaatactgctatccgcaataaatataaacaaatagacttttatcacgtttatctatgtctaaatattacaaatagtaatagtataaactaaagctgataatacttaaaaaaataataatatcatttacaattaatagtataaactaaaaattaaacaaatcgttattataagtaatatcaaaatgatgatatacggattaatagcgtgtcttatattcgtgacttcatccatcgctagtccactttatattcccgttattccacccattacggaagataaatcgttcaatagtgtagaggtattagtttccttgtttagagatgaccaaaaagactatacggtaacttctcagttcaataactacactatcgataccaaagactggactatcggcgtactatccacacctgatggtttggatataccattgactaatataacttattggtcacggtttactataggtcgtgcattgttcaaatcagagtctgaggatattttccaaaagaaaatgagtattctaggtgtttctatagaatgtaagaagtcgtcgacattacttacttttttgaccgtgcgtaaaatgactcgagtatttaataaatttccagatatggcttattatcgaggagactgtttaaaagccgtttatgtaacaatgacttataaaaatactaaaactggagagactgattacacgtacctctctaatggggggttgcctgcatactatcgtaatggggtcgatggttgattattgattagtatattccttattcacacaaaaagaacatttttataaacatgaaaccactgtctaaatgtaattatgatcttgatttatagatgaagatcagcctttagaggattttaaccagtatgtttaatatgaaaaaaataaacataacatattttgagattaagcgctattgtgcttaattattttgctctataaactgaatatatagccacaattattgacgggcttgtttatgaccggcaatcatgaatttacagaaattatctctggctatatatcttactgcgacatgttagtggtgttatgaaacatgcataagaaaaactgcgttgtatcatgacattcaattggagcatgtagaagacaataaagatagtgtagcgtcgctaccgtacaagtagtcaatcaaagagaacgtagtagattgttggctacatttaattggacagatatagctgagggtgttagaaatgagttcattaaaatatgtgatatcaacggaacatatttatataattatactattgctgttagtataattattgattccacggaagaactaccaacagttactccaattacaacaacatatgaaccttctacatataattatactatcgatgatagcactgttattactactgaagaactacaagtgactcctcatatggatctccatcgatgatacatgtattaaaatactttccgaataagtcttttaaatattgtattaattatgaaaaactatgctatgcgagtatgatgcaaagatgtttaatgatacgatactagattttatctctagcgagagatgtcgttagaatcatttatcataactacgtttaataataattcatcaacgaatatcgataacatgtgtcatttatacgttaaagtctgtccgtcttctctattgtttagactgtttgtagaatgctgtgatataaacaaactagtagaaggtacgactccgttacactgttatctaatgaatgaaggatttgaatcatctgttttaaaaaacctattaaaggagtatgtcatgaatacgtttaatgttcatgacatccattacacaaatatttaactcatgatgaagttgagaatgatatgctttctgatagtatagatagctttagctaatataaaaatatattaatccactatatattctagacttgatttaaaaccgataaactactactacgtactgtataagttgttaaaaaaaggagcagaccctaattatgtagatgatagaggtaatacttttcttcattacttctgcatctatatgtccacttatgagaaaacgtcatttaataagatgcatcgtgaaaagaaatttattaaagagttggtaaaatatgaaaccgaaagtaaataatataggaaatacacctctacataactacgtatctcaatatgatatcactctcattcctcatccacaacccattaaaaaaatggaaattaaagccctctattagcataaacggctacaggtctacctttacaatggcctctccttgtgcccagttcagaccctgtcattgccacgctactaaggactccctgaataccgtggccgacgtcagacattgtctgactgaatacatcctgtgggtttctcatagatggacccatagagaaagcgcagggtctctctacaggcttctcatctctttcagaactgatgcaacggagctctttggtggtgagttgaaggattcacttccgtgggacaatatcgacaattgcgtggagatcattaaatgtttcatcagaaatgactccatgaaaaccgccgaagaacttcgtgcaatcattggactttgtactcaatcagctatcgtctctggaagagtcttcaacgataagtatatcgacatactacttatgctgcgaaagattctgaacgagaacgactatctcaccctcttggatcatatccgcactgctaaatactaaatctccttcatgctctctcactacactttttatcatcttatgaggaatgattgccttcatcatttttcgtgaaataggaataattagcaccagaatagctatggattgcacatgtattctatgtcgtctactggatgaagatgtgacgtacaaaaaaataaaactagaaattgaaacgtgtcacaacttatcaaaacatatagatagacgaggaaacaatgcgctacattgttacgtcttcaataaatgcgatacagacattaagattgttcgactgttactctctcgcggagtcgagagactttgtagaaacaacgaaggattaactccgctaggagcatacagtaagcatagatacgtaaaatctcaaattgtgcatctactgatatccagctattcgaattcctctaacgaactcaagtcgaatataaatgatttcgatctgtattcgtatatgtcttcggataatatcgacttacgtctgctaaaatacctaattgtggataaacggatacgtccgtccaagaatacgaattatgcaatcaatggtctcggattggtggatatatacgtaacgacgcctaatccgagaccagaagtattgctatggcttcttaaatcagaatgttacagcaccggttacgtatttcgtacctgtatgtacgacagtgatatgtgtaagaactctcttcattactatatatcgtctcatagagaatctcaatctctatccaaggatgtaattaaatgtttgatcaataacaatgtttccatccatggcagagacgaaggaggatctttacccatccaatactactggtcttgctcaaccatagatatagagattgttaaattattaataaaggatgtggacacgtgtagagtatacgacgtcagccctatattagaggcggattatctaaacaagcgatttagagtaaccccatataatgtagacatggaaatcgttaatcttcttattgagagacgtcatactcttgtcgacgtaatgcgtagtattacttcttacgattccagagactataaccactacatcatcgataacattctaaagagatttagacaacaggatgaatccatcgtacaagccatgttgataaactacttacattacggcgatatggtcgttcgatgcatgttagataacggacaacaactatcctctgcacgactactttgttaataataatctcgtcgatgtaaacgtcgtaaggtttatcgtggaaaataatggacacatggctgtaaatcacgtatcgaacaatggccgtctatgtatgtacggtctgatattatcgagatttaataattgcgggtatcactgttatgaaaccatactaatagatgtatttgatatactaagcaagtacatggataatatagatatgatcgataatgagaataaaactctactatattacgcggtcgatgtcaataatatacaatttgcaaagcggttattggaatatggagcgagtgttacaacatcacgctcgataatcaatacggccatccagaaaagtagttacagaagagaaaacaaaacgaggatagttgatttattacttagctaccatcccactctagagactatgattgacgcatttaatagagatatacgctatctatatcctgaaccattattcgcctgtatcagatacgccttaatcctagatgatgattttccttctaaagtaagtatgatatctccggtcgtcataaggaactaaagcgctatagagtagacattaatagaatgaagaatgcctacatatcaggcgtctccatgtttgatatattatttaaacgaagcaaacgccacagattgagatacgcaaagaatccgacatcaaatggtacaaaaaagaactaacgtccatcattacagaaactgtaaagaacaatgagaggatcgactccatagtggacaacattaatacagacgataacttgatttcgaaattacccatggagatactttattactccattaaataatttatcatggagcgataatgtcctgtttcatttgtttccatgacatattacaaaatcgattccgtccaagatgataaaaacatttaccggcatcataaacacggagtttattttatatgtctcgcataaacattactaaaaaaatatattgttcggttttctttcacatctttaattatgaaaaagtaaatcattatgagatggacgagattgtacgcatcgttcgcgacagtatgtggtacatacctaacgtatttatggacgacggtaagaatgaaggtcacgtttctgtcaacaatgtttgtcatatgtattttacgttctttgatgtggatacatcgtctcatctgtttaagctagttattaaacactgcgatctgaataaacgaggtaactctccattacattgctatacgatgaatacacgatttaatccatctgtattaaagatattgttacaccacggcatgcgtaactttgatagcaaggatgaaaaaggacatattcctctacaccactatctgattcattcactatcaatcgataacaagatctttgatatactaacggacaccattgatgactttagtaaatcatccgatctattgctgtgttatcttagatataaattcaatgggagcttaaactattacgttctgtacaaaggatccgaccctaattgcgtcgacgaggatggactcacttctcttcattactactgtaaacacatatccacgttctacaaaagcaattattacaagttaagtcacactaagatgcgagccgagaagcgattcatctacgcgataatagattatggagcaaacattaacgcggttacacacttaccttcaacagtataccaaacatagtcctcgtgtggtgtatgctcttttatctcgaggagccgatacgaggatacgtaataatcttgattgtacacccatcatggaacgattgtgcaacaggtcatattctcataatgttactcaattggcacgaacaaaaggaagaaggacaacatctactttatctattcataaaacataatcaaggatacactctcaatatactacggtatctactagataggttcgacattcagaaagacgaatactataataccgcctttcaaaattgtaacaacaatgttgcctcatacatcggatacgacatcaaccttccgactaaagacggtattcgacttggtgtttgaaaacagaaacatcatatacaaggcggatgttgtgaatgacatcatccaccacagactgaaagtatctctacctatgattaaatcgttgttctacaagatgtcagaattctctccctacgacgattactacgtaaaaaagatactagcctactgcctattaagggacgagtcattcgcggaactacatagtaaattctgtttaaacgaggactataaaagtgtatttatgaaaaatatatcattcgataagatagattccatcatcgtgacataagtcgccttaaagagattcgaatctccgacaccgacctgtatacggtatcacagctatcttaaagccatacattcggacagacacatttcatttcccatgtacgacgatctcatagaacagtgccatctatcgatggagcataaaagtaaactcgtcgacaaagcactcaataaattagagtctaccatcggtcaatctagactatcgtatttgcctccggaaattatgcgcaatatcatctaaacagtatgttgtacggaaagaaccattacaaatattatccatgatagaaagaaaatatctatatgattggagaagtaggaaacaggaacaagacgacgattactacattattaaatcatgaagtccgtattatactcgtatatattgtttctctcatgtataataataaacggaagagatatagcaccgcatgcaccatccgatggaaagtgtaaagacaacgaatacaaacgccataatttgtgtccgggaacatacgcttccagattatgcgatagcaagactaacacacgatgtacaccctgtggttcgggtaccttcacatctcgcaataatcatttacccgcttgtctaagttgtaacggaagacgcgatcgtgtaacacgactcacaatagaatctgtgaatgctctcccggatattattgtcttctcaaaggatcatccggatgcaaggcatgtgtttcccaaacaaaatgtggaataggatacggagtatccggagacgtcatctgttctccgtgtggtctcggaacatattctcacaccgtctcttccgcagataaatgcgaacccgtacccagtaatacctttaactatatcgatgtggaaattaatctgtatcccgtcaacgacacgtcgtgtactcggacgaccactaccggtctcagtgaatccatctcaacgtcggaactaactattactatgaatcataaagactgtaatcccgtatttcgtgaggaatacttctctgtccttaataaggtagcaacttcaggtttctttacaggagaaaggtgtgcactctgaatttcgagattaaatgcaataacaaagattcttcctccaaacagttaacgaaagcaaagaatgatgacggtatcatgccgcattcggagacagtaactctagtgggcgactgtatatctagcgtcgacatctatatactatatagtaataccaatactcaagactacgaaactgatacaatctcttatcatgtgggtaatgttctcgatgtcgatagccatatgcccggtagttgcgatatacataaactgatcactaattccaaacccacccgctttttatagtaagtttttcacccataaataataaatacaataattaatttctcgtaaaagtagaaaatatattctaatttattgcatggtaaggaagtagaatcataaagaacagtactcaatcaatagcaattatgaaacaatatatcgtcctggcatgcatgtgcctgccagtcttcagcaatcatcctcatcctcatcctcgtgtacggaagaagaaaacaaacatcatatgggaatcgatgttattatcaaagtcacaaagcaagaccaaacaccgaccaatgataagatttgccaatccgtaacggaaattacagagtccgagtcagatccaaatcccgaggtggaatcagaagatgattccacatcagtcgaggatgtagatcctcctaccacttattactccatcatcggtggaggtctgagaatgaactttggattcaccaaatgtcctcagattaaatccatctcagaatccgctgatggaaacacagtgaatgctagattgtccagcgtgtccccaggacaaggtaaggactctcccgcgatcactcatgaagaagctcttgctatgatcaaagactgtgaggtgtctatcgacatcagatgtagcgaagaagagaaagacagcgacatcaagacccatccagtactcgggtctaacatctctcataagaaagtgagttacgaagatatcatcggttcaacgatcgtcgatacaaaatgtgtcaagaatctagagtttagcgttcgtatcggagacatgtgcaaggaatcatctgaacttgaggtcaaggatggattcaagtatgtcgacggatcggcatctgaaggtgcaaccgatgatacttcactcatcgattcaacaaaactcaaagcgtgtgtctgaatcgataactctattcatctgaaattggatgagtagggttaatcgaacgattcaggcacaccacgaattaaaaaagtgtaccggacactatattccggtttgcaaaacaaaaatgttcttaactacattcacaaaaagttacctctcgcgacttcttctttttctgtctcaatagtgtgatacgattatgacactattcctattcctattcctatttcctttcagggtatcacaaaaatattaaacctctttctgatggtctcataaaaaaagttttacaaaaatatttttattctctttctctctttgatggtctcataaaaaaagttttacaaaaatatttttattctctttctctctttgatggtctcataaaaaaagttttacaaaaatatttttattctctttctctctttgatggtctcataaaaaaagttttacaaaaatatttttattctctttctctctttgatggtctcataaaaa

SEQ ID NO: 3 - DNA, 195092 bp, Vaccinia virus
  source 1..195092: mol_type = other DNA
  misc_feature 1..195092: note = VIR11
atcaaagagagaaagagaataaaaatatttttgtaaaactttttttatgagaccatcaaagagagaaagagaataaaaatatttttgtaaaactttttttatgagaccatcagaaagaggtttaatatttttgtgataccctgaaaggaaataggaataggaataggaatagtgtcataatcgtatcacactattgagacagaaaaagaagaagtcgcgagaggtaactttttgtgaatgtagttaagaacatttttgttttgcaaaccggaatatagtgtccggtacacttttttaattcgtggtgtgcctgaatcgttcgattaaccctactcatccaatttcagatgaatagagttatcgattcagacacacgctttgagttttgttgaatcgatgagtgaagtatcatcggttgcaccttcagatgccgatccgtcgacatacttgaatccatccttgacctcaagttcagatgattccttgcacatgtctccgatacgaacgctaaactctagattcttgacacattttgtatcgacgatcgttgaaccgatgatatcttcgtaactcactttcttatgagagatgttagacccgagtactggatgggtcttgatgtcgctgtctttctcttcttcgctacatctgatgtcgatagacacctcacagtctttgatcatagcaagagcttcttcatgagtgatcgcgggagagtccttaccttgtcctggggacacgctggacaatctagcattcactgtgtttccatcagcggattctgagatggatttaatctgaggacatttggtgaatccaaagttcattctcagacctccaccgatgatggagtaataagtggtaggaggatctacatcctcgactgatgtggaatcatcttctgattccacctcgggatttggatctgactcggactctgtaatttccgttacggattggcaaatcttatcattggtcggtgtttggtcttgctttgtgactttgataataacatcgattcccatatgatgtttgttttcttcttccgtacacgaggatgaggatgaggatgattgctgaagactggcaggcacatgcatgccaggacgatatattgtttcataattgctattgattgagtactgttctttatgattctacttccttaccatgcaataaattagaatatattttctacttttacgagaaattaattattgtatttattatttatgggtgaaaaacttactataaaaagcgggtgggtttggaattagtgatcagtttatgtatatcgcaactaccgggcatatggctatcgacatcgagaacattacccacatgataagagattgtatcagtttcgtagtcttgagtattggtattactatatagtatatagatgtcgacgctagatatacagtcgcccactagagttactgtctccgaatgcggcatgataccgtcatcattctttgctttcgttaactgtttggaggaagaatctttgttattgcatttaatctcgaaattcagagtgcacacctttctcctgtaaagaaacctgaagttgctaccttattaaggacagagaagtattcctcacgaaatacgggattacagtctttatgattcatagtaatagttagttccgacgttgagatggattcactgagaccggtagtggtcgtccgagtacacgacgtgtcgttgacgggatacagattaatttccacatcgatatagttaaaggtattactgggtacgggttcgcatttatctgcggaagagacggtgtgagaatatgttccgagaccacacggagaacagatgacgtctccggatactccgtatcctattccacattttgtttgggaaacacatgccttgcatccggatgatcctttgagaagacaataatatccgggagagcattcacagattctattgtgagtcgtgttacacgatcgcgtcttccgttacaacttagacaagcgggtaaatgattattgcgagatgtgaaggtacccgaaccacagggtgtacatcgtgtgttagtcttgctatcgcataatctggaagcgtatgttcccggacacaaattatggcgtttgtattcgttgtctttacactttccatcggatggtgcatgcggtgctatatctcttccgtttattattatacatgagagaaacaatatatacgagtataatacggacttcatgatttaataatgtagtaatcgtcgtcttgttcctgtttcctacttctccaatcatatagatattttctttctatcatggataatatttgtaatggttctttccgtacaacatactgtttagatgatattgcgcataatttccggaggcaaatacgatagtctagattgaccgatggtagactctaatttattgagtgctttgtcgacgagtttacttttatgctccatcgatagatggcactgttctatgagatcgtcgtacatgggaaatgaaatgtgtctgtccgaatgtatggctttaagatagctgtgataccgtatacaggtcggtgtcggagattcgaatctctttaaggcgacttatgtcacgatgatggaatctatcttatcgaatgatatatttttcataaatacacttttatagtcctcgtttaaacagaatttactatgtagttccgcgaatgactcgtcccttaataggcagtaggctagtatcttttttacgtagtaatcgtcgtagggagagaattctgacatcttgtagaacaacgatttaatcataggtagagatactttcagtctgtggtggatgatgtcattcacaacatccgccttgtatatgatgtttctgttttcaaacaccaagtcgaataccgtctttagtcggaaggttgatgtcgtatccgatgtatgaggcaacattgttgttacaattttgaaaggcggtattatagtattcgtctttctgaatgtcgaacctatctagtagataccgtagtatattgagagtgtatccttgattatgttttatgaatagataaagtagatgttgtccttcttccttttgttcgtgccaattgagtaacattatgagaatatgacctgttgcacaatcgttccatgatgggtgtacaatcaagattattacgtatcctcgtatcggctcctcgagataaaagagcatacaccacacgaggactatgtttggtatactgttgaaggtaagtgtgtaaccgcgttaatgtttgctccataatctattatcgcgtagatgaatcgcttctcggctcgcatcttagtgtgacttaacttgtaataattgcttttgtagaacgtggatatgtgtttacagtagtaatgaagagaagtgagtccatcctcgtcgacgcaattagggtcggatcctttgtacagaacgtaatagtttaagctcccattgaatttatatctaagataacacagcaatagatcggatgatttactaaagtcatcaatggtgtccgttagtatatcaaagatcttgttatcgattgatagtgaatgaatcagatagtggtgtagaggaatatgtcctttttcatccttgctatcaaagttacgcatgccgtggtgtaacaatatctttaatacagatggattaaatcgtgtattcatcgtatagcaatgtaatggagagttacctcgtttattcagatcgcagtgtttaataactagcttaaacagatgagacgatgtatccacatcaaagaacgtaaaatacatatgacaaacattgttgacagaaacgtgaccttcattcttaccgtcgtccataaatacgttaggtatgtaccacatactgtcgcgaacgatgcgtacaatctcgtccatctcataatgatttactttttcataattaaagatgtgaaagaaaaccgaacaatatatttttttagtaatgtttatgcgagacatataaaataaactccgtgtttatgatgccggtaaatgtttttatcatcttggacggaatcgattttgtaatatgtcatggaaacaaatgaaacaggacattatcgctccatgataaattatttaatggagtaataaagtatctccatgggtaatttcgaaatcaagttatcgtctgtattaatgttgtccactatggagtcgatcctctcattgttctttacagtttctgtaatgatggacgttagttcttttttgtaccatttgatgtcggattctttgcgtatctcaatctgtggcgtttgcttcgtttaaataatatatcaaacatggagacgcctgatatgtaggcattcttcattctattaatgtctactctatagcgctttagttccttatgacgaccggagatatcatacttactttagaaggaaaatcatcatctaggattaaggcgtatctgatacaggcgaataatggttcaggatatagatagcgtatatctctattaaatgcgtcaatcatagtctctagagtgggatggtagctaagtaataaatcaactatcctcgttttgttttctcttctgtaactacttttctggatggccgtattgattatcgagcgtgatgttgtaacactcgctccatattccaataaccgctttgcaaattgtatattattgacatcgaccgcgtaatatagtagagttttattctcattatcgatcatatctatattatccatgtacttgcttagtatatcaaatacatctattagtatggtttcataacagtgatacccgcaattattaaatctcgataatatcagaccgtacatacatagacggccattgttcgatacgtgatttacagccatgtgtccattattttccacgataaaccttacgacgtttacatcgacgagattattattaacaaagtagtcgtgcagaggatagttgttgtccgttatctaacatgcatcgaacgaccatatcgccgtaatgtaagtagtttatcaacatggcttgtacgatggattcatcctgttgtctaaatctctttagaatgttatcgatgatgtagtggttatagtctctggaatcgtaagaagtaatactacgcattacgtcgacaagagtatgacgtctctcaataagaagattaacgatttccatgtctacattatatggggttactctaaatcgcttgtttagataatccgcctctaatatagggctgacgtcgtatactctacacgtgtccacatcctttattaataatttaacaatctctatatctatggttgagcaagaccagtagtattggatgggtaaagatcctccttcgtctctgccatggatggaaacattgttattgatcaaacatttaattacatccttggatagagattgagattctctatgagacgatatatagtaatgaagagagttcttacacatatcactgtcgtacatacaggtacgaaatacgtaaccggtgctgtaacattctgatttaagaagccatagcaatacttctggtctcggattaggcgtcgttacgtatatatccaccaatccgagaccattgattgcataattcgtattcttggacggacgtatccgtttatccacaattaggtattttagcagacgtaagtcgatattatccgaagacatatacgaatacagatcgaaatcatttatattcgacttgagttcgttagaggaattcgaatagctggatatcagtagatgcacaatttgagattttacgtatctatgcttactgtatgctcctagcggagttaatccttcgttgtttctacaaagtctctcgactccgcgagagagtaacagtcgaacaatcttaatgtctgtatcgcatttattgaagacgtaacaatgtagcgcattgtttcctcgtctatctatatgttttgataagttgtgacacgtttcaatttctagttttatttttttgtacgtcacatcttcatccagtagacgacatagaatacatgtgcaatccatagctattctggtgctaattattcctatttcacgaaaaatgatgaaggcaatcattcctcataagatgataaaaagtgtagtgagagagcatgaaggagatttagtatttagcagtgcggatatgatccaagagggtgagatagtcgttctcgttcagaatctttcgcagcataagtagtatgtcgatatacttatcgttgaagactcttccagagacgatagctgattgagtacaaagtccaatgattgcacgaagttcttcggcggttttcatggagtcatttctgatgaaacatttaatgatctccacgcaattgtcgatattgtcccacggaagtgaatccttcaactcaccaccaaagagctccgttgcatcagttctgaaagagatgagaagcctgtagagagaccctgcgctttctctatgggtccatctatgagaaacccacaggatgtattcagtcagacaatgtctgacgtcggccacggtattcagggagtccttagtagcgtggcaatgacagggtctgaactgggcacaaggagaggccattgtaaaggtagacctgtagccgtttatgctaatagagggctttaatttccatttttttaatgggttgtggatgaggaatgagagtgatatcatattgagatacgtagttatgtagaggtgtatttcctatattatttactttcggtttcatattttaccaactctttaataaatttcttttcacgatgcatcttattaaatgacgttttctcataagtggacatatagatgcagaagtaatgaagaaaagtattacctctatcatctacataattagggtctgctcctttttttaacaacttatacagtacgtagtagtagtttatcggttttaaatcaagtctagaatatatagtggattaatatatttttatattagctaaagctatctatactatcagaaagcatatcattctcaacttcatcatgagttaaatatttgtgtaatggatgtcatgaacattaaacgtattcatgacatactcctttaataggttttttaaaacagatgattcaaatccttcattcattagataacagtgtaacggagtcgtaccttctactagtttgtttatatcacagcattctacaaacagtctaaacaatagagaagacggacagactttaacgtataaatgacacatgttatcgatattcgttgatgaattattattaaacgtagttatgataaatgattctaacgacatctctcgctagagataaaatctagtatcgtatcattaaacatctttgcatcatactcgcatagcatagtttttcataattaatacaatatttaaaagacttattcggaaagtattttaatacatgtatcatcgatggagatccatatgaggagtcacttgtagttcttcagtagtaataacagtgctatcatcgatagtataattatatgtagaaggttcatatgttgttgtaattggagtaactgttggtagttcttccgtggaatcaataattatactaacagcaatagtataattatataaatatgttccgttgatatcacatattttaatgaactcatttctaacaccctcagctatatctgtccaattaaatgtagccaacaatctactacgttctctttgattgactacttgtacggtagcgacgctacactatctttattgtcttctacatgctccaattgaatgtcatgatacaacgcagtttttcttatgcatgtttcataacaccacgaacatgtcgcagtaagatatatagccagagataatttctgtaaattcatgattgccggtcataaacaagcccgtcaataattgtggctatatattcagtttatagagcaaaataattaagcacaatagcgcttaatctcaaaatatgttatgtttatttttttcatattaaacatactggttaaaatcctctaaaggctgatcttcatctataaatcaagatcataattacatttagacagtggtttcatgtttataaaaatgttctttttgtgtgaataaggaatatactaatcaataatcaaccatcgaccccattacgatagtatgcaggcaaccccccattagagaggtacgtgtaatcagtctctccagttttagtatttttataagtcattgttacataaacggcttttaaacagtctcctcgataataagccatatctggaaatttattaaatactcgagtcattttacgcacggtcaaaaaagtaagtaatgtcgacgacttcttacattctatagaaacacctagaatactcattttcttttggaaaatatcctcagactctgatttgaacaatgcacgacctatagtaaaccgtgaccaataagttatattagtcaatggtatatccaaaccatcaggtgtggatagtacgccgatagtccagtctttggtatcgatagtgtagttattgaactgagaagttaccgtatagtctttttggtcatctctaaacaaggaaactaatacctctacactattgaacgatttatcttccgtaatgggtggaataacgggaatataaagtggactagcgatggatgaagtcacgaatataagacacgctattaatccgtatatcatcattttgatattacttataataacgatttgtttaatttttagtttatactattaattgtaaatgatattattatttttttaagtattatcagctttagtttatactattactatttgtaatatttagacatagataaacgtgataaaagtctatttgtttatatttattgcggatagcagtatttccctataaaaagtatacgtcctgtgttgtctttaatcatgtacatgaatggatggtttatgtagaccttcgtacgatataccatcgaaaagttagtcataaatactcctgtaacggccgatgcttctgtatactcctcattaacatctataaacgtcgtatgtagaaatttttctacagtgatagtttcattacacatcttgctaaaatctgcataatatccgaatatattagtaagtcctaaattttctaaaatcggtaccagattatacggttctgtcatttccactttaaactttggcatatacaagtctatacttttagtagataacataccacaccattttttaaatttttcatctgttatatttttttctatgttatatataccttctatgtcgtccggtagtataattaccatactagagtttccctcgtatggaatatcgataatagagaatcctccgaataattcattaatatgtacatattgcaagttattctcggtacccaccatcatatcaacactggtaactatattcttagaaatataaaacttgtctgtatatgtaagatgtttagaaaatggatatttccacattgctttaaaatggacggcgctaacaactgtcatacgagtattaatggatagcggactagtcaataaggaattaattttaccatttgtcatcgtcttaacccattcgttgattagttcctttgtttggttagcattattaaagtttacagtttgaaaatcgtcttttattttttgtaggaaggaggcgtggaactcgatactatcgctaccgtatattttatttgcggtagctagtgtcgcacaatacggaatatctacgtccatgtcattattgtcatccttcttatcatcgggtgtattctcattcatattctctatatattttgatagttgttcagctgtagaaccagctgctccatgatttagaatagataaagtagataaaatagaaactggagaaatcaaaacattttcatcagggtgttttaagattagttctttaaagatatccatggtatagaccaaacaataacgataacgatatatatcataaataaataatgttaaatttcagtttatgtttgtaccccgtattcatacttaacaaattggtattgcgtacacaatcaatcatattacataccattaataatgcaagcataaaaaatcgttagtagatgtttctaaatataggttccgtaagcaaagaatataagaatgaagcggtaatgataaaatcaatcgttatctaaaatgatcatactcatttattttattctattatattaacacatacatttttaacagcaacacattcaatattgtattgttatttttatattatttacacaattaacaatatattattagtttatattactgaattaataatataaaattcccaatcttgtcataaacacacactgagaaacagcataaacacaaaatccatcaaaaatgtcgatgaaatatctgatgttgttgttcgctgctatgataatcagatcattcgccgatagtggtaacgctatcgaaacgacattgccagaaattacaaacgctacaacagatattccagctatcagattatgcggtccagagggagatggatattgtttacacggtgactgtatccacgctagagatatcgacggtatgtattgtagatgctctcatggttatacaggcattagatgtcagcatgtagtattagtagactatcaacgttcagaaaaaccaaacactacaacgtcatatatcccatctcccggtattgtgcttgtattagtaggcattattattatgtgttgtctattatctgtttataggttcactcgaagaactaataaactacctctacaagatatggttgtgccataatttttataaatttttttatgagtatttttacaaaaaaaatgtataaagtgtatgtcttatgtatatttataaaaatgctaagtatgcgatgtatctatgttatttgtatttatctaaacaatacctctacctctagatattatacaaaaattttttatttcggcatattaaagtaaaatctagttaccttgaaaatgaatacagtgggtggttccgtatcaccagtaagaacataatagtcgaatacagtatccgattgagattttgcatacaatactagtctagaaagaaatttgtaatcattttctgtgacgggagtccatatatctgtatcatcgtctagtttatcagtgtcccatgctatatttctgttatcatcattagttaatgaaaataactctcgtgcttcagaaaagtcaaatattgtatccatacatacatctccaaaactatcgcttatacgtttatctttaacgatacctatacctagatggttatttactaacagacattttccagatctattgactataactcctatagtttccacatcaaccaagtaatgatcatctattgttatataacaataacataactcttttccatttttatcagtatgtatatctatatcaacgtcgtcgttgtagtgaatagtagtcattgatctattatatgaaacggatatgtctagaacggcaattgtcttacgtccagttaacactttcgttgatttaaagtctagagtctttgcaaacataatatccttatccgactttatatttcctgtagggtggtataattttattttgcctccacatatcggtgtttccaaatatattactagacaatattccatatagttattagttaagggtacccaattagaacacgtacgcttattatcatcatttggatcgtatttcataaaagttattgtactatcgatgtcaacacattctacattttttaatcgtctatatagtatttttctgatattttctataatatcagaattgtcttccatcggaagttgtatactatcggaatcagttacatgtttaaataattctctgatgtcattccttatacaatcaaattcattattaaacagtttaatagtctgtagacctttatcgtcgtaaatatccattgtcttattagttacgcttatttttatgtgttttacgttgctttattatattttataagaatgattgtttgacgaatcacgagaactattaagacacattattaggtatatattataaaaaagtttttgattacgatgttataagaggaaagaggacacattaacatcatacatcaattaactacattcttataacatcgtaatcaaaagaattgcaattttgatgtataacaactgtcaatgggttatggaattgtatattacatattatacggtatgttggtaacgacaaataccgatcggtaatcgtttgccggtgtaatagaattatatatatctatctattacaccggctgagtatacataataataagttgtggtagtatgatctccatatttataatttaggactttgtattcagtatttttggaatcataaaaaataaaaaaaagttttactaatttaaaatttaaaaagtatttacatttttttcactgtttagtcgcggatatggaattcgatcctgccaaaatcaatacatcatctatagatcatgtaacaatattacaatacatagatgaaccaaatgatataagactaacagtatgcattatccgaaatattaataacattacatattatatcaatatcacaaaaataaatacacatttggctaatcaatttcgggcttggaaaaaacgtatcgccggaagggactatatgactaacttatctagagatacaggaatacaacaatcaaaacttactgaaactatacgtaactgtcaaaaaaatagaaacatatatggtctatatatacactacaatttagttattaatgtggttattgattggataaccgatgtgattgttcaatcaatattaagagggttggtaaattggtacatagctaataatacctatactccaaatacacccaataatacaacaaccatttctgagttggatatcatcaaaatactaaataaatacgaggacgtgtatagagtaagtaaagaaaaagaatgtggaatttgctatgaagttgtttactcaaaacgattagaaaacgatagatactttggtttattggattcgtgtactcatatattttgcataacatgcatcaatatatggcataaaacacgaagagaaaccggtgcgtcggataattgtcctatatgtcgtacccgttttagaaacataacaatgagcaagttctataagctagttaactaataaataaaaagtttaatttgttgacgacgtatgtcgttattttttctcgtataaaagattaatttgattctaatataatctttagtattggataaatatcaattcaaattaattccattagattatatcataaataaaaatagtagcacgcactacttcagccaaatattcttttttgaaacgccatctatcgtagtgaggacacaagtgaacctataatgagcaaatttattagtatcggttacatgaaggactttacgtagagtggtgattccactatctgtggtacgaacggtttcatcttctttgatgccatcacccagatgttctataaacttggtatcctcgtccgatttcatatcctttgccaaccaatacatatagctaaactcaggcatatgttccacacatcctgaacaatgaaattctccagaagatgttacaatgtctagatttggacatttggtttcaaccgcgttaacatatgagtgaacacacccatacatgaaagcgatgagaaataggattttcatcttgccaaaatatcactagaaaaaatttatttatcaattttaaaggtataaaaaatacttattgttgctcgaatattttgtatttgatggtatacggaagattagaaatgtaggtattatcatcaactgattctatggttttatgtattctatcatgtttcactattgcgttggaaataatatcatatgcttccacatatattttattttgttttaactcataatactcacgtaattctggattattggcatatctgtgaataattttagctccatgatcagtaaatattaatgagaacatagtattaccacctaccattatttttttcatttcgttcaattcttgattgcaaagatctatataatcattatagcgttgacttatggactctggaatcttagacgatgtacagtcatctataatcatggcatatttaatacattgttttatagcatagtagttatctacgatgttagatatttctctcaatgaatcaatcacacaatctaatgtaggtttatgacataatagcattttcagcagttcaatgtttctagattcgttgatggcaatggctatacatgtatatccgttatttgatctaatgttgacatctgaaccggattctagcagtaaagatactagagattgtttattatatctaacagccttgtgaagaagtgtttctcctcgtttgtcaatcatgttaatgtctttaagataaggtaggcaaatgtttatagtactaagaattgggcaagcataagacatgtcacaaagaccctttttgtatgtataagtgtagaaattataacatccatagttggatttacataggtgtccaatcgggatctctccatcatcgagatgattgacggcatctcccccttccttttttagtagatatttcatcgtgtaagaatcaatattaatatttctaaagtatccgtgtatagcctctttatttaccacagctccatattccaacatgcattccactaaagggatatcgatatcgccgaatgtcatatactcaattagtatatgttggaggacatccgagttcattgttttcaatatcaaagagatggtttccttatcatttctccatagtggtacaatactacacattattccgtgaggctttccattctccaaaaacaatttgaccaaatctacatctttattgtatctataatcactatttagataatcagccataattcctcgagtgcaacatgttagatcgtctatatatgaataagccgtgttatctattcctttcattaacaatttaacgatgtctatatctatatgagatgacttaatataatattgaagagctgtacaatagtttttatctatagaagacggcttgattccgtgattaattagacatttaacaacttccggacgcacatatgctctcgtatccgactctgaatacagatgagagatgatatacagatgcaatacggtaccgcaatttcgtagttgataatcatcatacgcgtatccgtactcgtcctcataaagaacactgcagccattttctatgaacaaatcaataattttaggaacaggatcattgtcattacataattttctataactgaacgatggttttcacatttaacactcaagtcaaatccatgttctaccaacacctttatcaagtcaacgtctacatttttggatttcatatagctgaatatattaaagtcatttatgttgctaaatccagtggcttctagtagagccatcgctatatcctttaactttaacatgtctactatttgtgtattcttctaatggggtagctgtctccaatttttgcgtaatggattagtgccactgtctagtagtagtttgacgacctcgacattattacaatgctcattaaaaaggtatgcgtgtaaagcattattcttgaattggttcctggtatcattaggatctctgtctctcaacatctgtttaagttcatcgagagccacctcctcattttccaaatagtcaaacattttgactgaatagaagtgaatgagctactgtgaactctatacacccacacaactaatgtcattaaatattatttttttgaatgtatttataccatgtcaaaaacttgtacaattattaataaaaataatttagtgtttaaattttaccagttccagattttacacctccgttaaccccactttttacaccactggacgaccctcctccccacattccaccgccaccagatgtataagttttagatcctttattactaccatcatgtccatggataaagacactccacatgccgccactaccccctttagaagacatattaataagacttaagagttaaggacaagtttaacaataaaattaatcacgagtaccctactaccaacctacactattatatgattatagtttctatttttacagtaccttaactaaagtttctagtcacaagagcaatactaccaacctacactattatatgattatagtttctatttttataggaacgcgtacgagaaaatcaaatgtctaatttctaacggtagtgttgataaacgattatcgtcaatggatacctcctctatcatgtcgtctattttcttactttgttctattaacttattagcattatatattatttgattataaaacttatattgcttattagcccaatctgtaaatatcggattattaacatatcgtttctttgtaggtttatttaacttgtacatcactgtaagcatgtccgtaccatttattttaatttgacgcatatccgcaatttctttttcgcagtcggttataaattctatatatgatggatacatgctacatgtgtacttataatcgactaatatgaagtacttgatacatattttcagtaacgatttattattaccacctatgaataagtacctgtgatcgtctaggtaatcaactgttttcttaatacattcgatggttggtaatttactcagaataatttccaatatcttaatatataattctgctatttctggaatatatttatctgccagtataacacaaatagtaatacatgtaaacccatattttgttattatattaatgtctgcgccattatctattaaccattctactaggctgacactatgcgacttaatacaatgataaagtatactacatccatgtttatctattttgtttatatcatcaatatacggcttacaaagttttagtatcgataacacatccaactcacgcatagagaaggtagggaataatggcataatatttattaggttatcatcattgtcattatctacaactaagtttccattttttaaaatatactcgacaactttaggatctctattgccaaatttttgaaaatatttatttatatgcttaaatctatataatgtagctccttcatcaatcatacatttaataacattgatgtatactgtatgataagatacatattctaacaatagatcttgtatagaatctgtatatcttttaagaattgtggatattaggatattattacgtaaactattacacaattctaaaatataaaacgtatcacggtcgaataatagttgatcaactatataattatcgattttgtgatttttcttcctaaactgtttacgtaaatagttagatagaatattcattagttcatgaccactatagttactatcgaataacgcgtcaaatatttcccgtttaatatcgcatttgtcaagataataatagagtgtggtatgttcacgataagtataataacgcatctctttttcgtgtgaaattaaatagtttatcacgtccaaagatgtagcataaccatcttgtgacctagtaataatataataatagagaactgttttacccattctatcatcataatcagtggtgtagtcgtaatcgtaatcgtctaattcatcatcccaattataatattcaccagcacgtctaatctgttctattttgatcttgtatccatactgtatgttgctacatgtaggtattcctttatccaataatagtttaaacacatctacattgggatttgatgttgtagcgtatttctctacaatattaataccatttttgatactatttatttctatacctttcgaaattagtaatttcaataagtctatatcgatgttatcagaacatagatattcgaatatatcaaaatcattgatatttttatagtcgactgacgacaataacaaaatcacaacatcgtttttgatattattatttttcttggtaacgtatgcctttaatggagtttcaccatcatactcatataatggatttgcaccactttctatcaatgattgtgcactgctggcatcgatgttaaatgttttacaactatcatagagtatcttatcgttaaccatgattggttgttgatgctatcgcattttttggtttctttcatttcagttatgtatggatttagcacgtttgggaagcataagctcatatgatttcagtactgtagtgtcagtactattagtttcgatcagatcaatgtctagatctatagaatcaaaacacgataggtcagaagataatgaatatctgtaggcttcttgttgtactgtaacttctcgttttgttagatggttgcatcgtgctttaacatcaatggtacaaattttatcctcgctttgtgtatcatattcgtccctactataaaattgtatattcagattatcatgagatgtgtatacgctaacggtatcaataaacggagcacaccatttagtcataaccgtaatccaaaaatttttaaagtatatcttaacgaaagaagttgtgtcattgtctacggtgtatggtactagatcctcataagtgtatatatctagagtaatgtttaatttatcaaatggttgataatatggatcctcatggcaatttcctaagacgaaaataagacataaacacgcaataaatctaattgcggacatggttactccttaaaaaaatactaataatcaccttggctatttagtaagtgtcatttaacactatactcatattaatccatggactcataatctctatacgggattaacggatgttctatatacggggatgagtagttctcttctttaactttatactttttactaatcatatttagactgatgtatgggtaatagtgtttgaagagctcgttctcatcatcagaataaatcaatatctctgtttttttgttatacagatgtattacagcctcatatattacgtaatagaacgtgtcatctaccttattaactttcaccgcatagttgtttgcaaatacggttaatcctttgacctcgtcgatttccgaccaatctgggcgtataatgaatctaaactttaatttcttgtaatcattcgaaataatttttagtttgcatccgtagttatcccctttatgtaactgtaaatttctcaacgcgatatctccattaataatgatgtcgaattcgtgctgtatacccatactgaatggatgaacgaataccgacggcgttaatagtaatttactttttcatctttacatattgggtactagttttactatcataagtttataaattccacaagctactatggaataagccaaccatcttagtataacacacatgtcttaaagtttattaattaattacatgttgttttatatatcgctacgaatttaaacagagaaatcagtttaggaaaaaaaattatctatctacatcatcacgtctctgtattctacgatagagtgctactttaagatgagacatatccgtgtcatcaaaaatatactccattaaaatgattattccggcagcgaacttgatattggatatatcacaacctttgttaatatctacgacaatagacagcagtcccatggttccataaacagtgagtttatctttctttgaagagatattttgtagagatcttataaaactgtcgaatgacatcgcatttatatctttagctaaatcgtatatgttaccatcgtaatatctaaccgcgtctatcttaaacgtttccatcgctttaaagacgtttccgatagatggtctcatttcatcagtcatactgagccaacaaatataatcgtgtataacatctttgatagaatcagactctaaagaaaacgaatcggctttattatacgcattcatgataaacttaatgaaaaatgtttttcgttgtttaagttggatgaatagtatgtcttaataattgttattatttcattaattaatatttagtaacgagtacactctataaaaacgagaatgacataactaatcataactagttatcaaagtgtctaggacgcgtaattttcatatggtatagatcctgtaagcattgtctgtattctggagctattttctctatcgcattagtgagttcagaatatgttataaatttaaatcgaataacgaacataactttagtaaagtcgtctatattaactcttttattttctagccatcgtaataccatgtttaagatagtatattctctagttactacgatctcatcgttgtctagaatatcacatactgaatctacatccaattttagaaattggtctgtgttacatatctcttctatattattgttgatgtattgtcgtagaaaactattacgtagaccattttctttataaaacgaatatatagtactccaattatctttaccgatatatttgcacacataatccattctctcaatcactacatctttaagattttcgttgttaagatatttggctaaactatataattctattagatcatcaacagaatcagtatatatttttctagatccaaagacgaactctttggcgtcctctataatattcccagaaaagatattttcgtgttttagtttatcgagatctgatctgttcatatacgccatgattgtacggtacgttatgataaccgcataaaataaaaatccattttcatttttaaccaatactattcataattgagattgatgtaatactttgttactttgaacgtaaagacagtacacggatccgtatctccaacaagcacgtagtaatcaaatttggtgttgttaaacttcgcaatatttatcaatttagatagaaacttatactcatcatctgttttaggaatccatgtattattaccactttccaacttatcattatcccaggctatgtttcgtccatcatcgttgcgcagagtgaataattcttttgtattcggtagttcaaatatataatccatgcatagatcggtaaagctattgtagatgtgatttttcctaaatctaatataaaactcgtttactagcaaacactttcctgatttatcgaccaagacacatatggtttctaaatctatcaagtggtggggatccatagttatgacgcagtaacatagattattaccttcttaactgtcgctaatatctatatatttattgttatcgtattggattctgcatatagatggcttgtatgtcaaagatatagaacacataaccaatttatagtcgcgctttacattctcgaatctaaagttaagagatttagaaaacattatatcctcggatgatgttatcactgtttctggagtaggatatattaaagtctttacagatttcgtccgattcaaataaatcactaaataatatcccacattatcatctgttagagtagtatcattaaatctattatattttatgaaagatatatcactgctcacctctatatttcgtacatttttaaactgtttgtataatatctctctgatacaatcagatatatctattgtgtcggtagacgataccgttacatttgaattaatggtgttccattttacaacttttaacaagttgaccaattcatttctaatagtatcaaacgctccatgattaaatattttaatagtatccattttatatcactacggacacaaagtagctgacataaaccattgtataatttttatgttttatgtttattagcgtacacattttggaagttccggcttccatgtatttcctggagagcaagtagatgatgaggaaccagataggttatatccgtacttgcacttaaagtttacattgtcgttgtatgagtatgatcttttaaacccgctagacaagtatccgtttgatattgtaggatgtggacatttaacaatctgacacgtgggtggatcggaccattctcctcctgaacacaggacaccagagttaccaatcaacgaatatccactattgcaactataagttacaacgcttccatcggtataaaaatcctcgtatccgttatgtcttccgttggatatagatggaggggattggcatttaacagattcacaaataggtgcctcgggattccataccatagatccagtagatcctaattcacaatacgatttagattcaccgatcaaatgatatccgctattacaagagtacgttatactagagccaaagtctactccgccaatatcaagttggccattatcgatatctcgaggcgatgggcatctccgtttaatacattgattaaagagtgtccatccagtacctgtacatttagcatatataggtcccattttttgctttctgtatccaggtagacatagatattctatagtgtctcctatgttgtaattagcattagcatcagtctccacactattcttaaatttcatattaatgggtcgtgacggaatagtacagcatgatagaacgcatcctattcccaacaatgtcaggaacgtcacgctctccaccttcatatttatttatccgtaaaaatgttatcctggacatcgtacaaataataaaaagcccatatatgttcgctattgtagaaattgtttttcacagttgctcaaaaacgatggcagtgacttatgagttacgttacactttggagtctcatctttagtaaacatatcataatattcgatattacgagttgacatatcgaacaaattccaagtatttgattttggataatattcgtattttgcatctgctataattaagatataatcaccgcaagaacacacgaacatctttcctacatggttaaagtacatgtacaattctatccatttgtcttccttaactatatatttgtatagataattacgagtctcgtgagtaattccagtaattacatagatgtcgccgtcgtactctacagcataaactatactatgatgtctaggcatgggagacttttttatccaacgatttttagtgaaacattccacatcgtttaatactacatatttttcatacgtggtataaactccacccattacatatatatcatcgtttacgaataccgacgcgcctgaatatctaggagtaattaagtttggaagtcttatccatttcgaagtgccgtgtttcaaatattctgccacacccgttgaaatagaaaattctaatcctcctattacatataactttccattgttaacacaagtactaacttctgattttaacgacgacatattagtaaccgttttccattttttcgtttcaagatctacccgcgatacggaataaacatgtctattgttaatcatgccgccaataatgtatagacaattatgtaaaacatttgcattatagaattgtctatctgtattaccgactatcgtccaatattctgttctaggagagtaatgggttattgtggatatataatcagagtttttaatgactactatattatgttttataccatttcgtgtcactggctttgtagatttggatatagttaatcccaacaatgatatagcattgcgcatagtattagtcataaacttgggatgtaaaatgttgatgatatctacatcgtttggatttttatgtatccactttaataatatcatagctgtaacatcctcatgatttacgttaacgtcttcgtgggataagatagttgtcagttcatcctttgataattttccaaattctggatcggatgtcaccgcagtaatattgttgattatttctgacatcgacgcattatatagttttttaattccatatcttttagaaaagttaaacatccttatacaatttgtggaattaatattatgaatcatagtttttacacatagatctactacaggcggaacatcaattattatggcagcaactagtatcatttctacattgtttatggtgatgtttatcttcttccagcgcatatagtctaatagcgattcaaacgcgtgatagtttataccattcaatataatcgcttcatcctttagatggtgatcctgaatgcgtttaaaaaaattatacggagatgccgtaataatttccttattcacttgtataatttccccattgatagaaaatatcacgctttccattcttgaagtactataagtaattatagtataatgtaaaggtttatatattcaatattttttataaaaaaatcatttcgacattaattcctttttaaatttccgtctatcatctatagaaacatattctatgaatttataaaatgcttttacgtgtcctatcgtaggcgatagaaccgctaaaaagcctattgaatttctacaaaagaatctattatatggtatagggagagtataaaacattaaatgcccgtacttattaaagtattcagtagccaatcctaactctttcgaatacttattaatggctcttgttctgtacgaatctatttttttgaacaacggacctagtggtatatcttgttctatgtatctaaaataatgtctgactagatccgttagtttaatatcctcagtcatcttgtctagaatggcaaatctaactgcgggtttaggctttagtttagtttttatatctacatctatgtctttatctaacaccaaaaatataatagctaatattttattacaatcatccggatattcttctacgatctcactaactaatgtttctttggttatactagtatagtcactatcggacaaataaagaaaatcagatgatcgatgaataatacatttaaattcatcatctgtaagatttttgagatgtctcattaaaatattattagggtcagtactcattatcattaggcagctattacttattttattatttttcaccatatagatcaatcattagatcatcaaaatatgtttcaatcatcctaaagagtatggtgaatgactcttcccatctaatttctgaacgttcaccaatgtctctagccactttggcactaatagcgatcattcgcttagcgtcttctatattattaactggttgattcaatctatctagcaatggaccgtcggacagcgtcattctcatgttcttaatcaatgtacatacatcgccgtcatctaccaattcatccaacaacataagctttttaaaatcatcattataataggtttgatcgttgtcatttctccaaagaatatatctaataagtagagtcctcatgcttagtaatttaactattttagttaacaactattttttatgttaaatcaattagtacaccgctatgtttaatacttattcatattttagtttttaggattgagaatcaatacaaaaattaatgcatcattaattttagaaatacttagtttccacgtagttaatgaaacatttgaactcatcgtacaagacgttctcgtacaggacgtaactataaaccggtttatatttgttcaagatagatacaaatccgataactttttttacgaattctacgggatccactttaaaagtgtcataccgggttctttttatttttttaaacagatcaatggtgtgatgttgattaggtcttttacgaatttgatatagaatagcgtttacatattctccataatggtcaatcgccatttgttcgtatgtcataaattctttaattatatgacactgtgtattgtttagttcatccttgttcattgttaggaatctatccaaaatggcaattatactagaactataggtgcgttgtatacacatattgatgtgtctgtttatacaatccatgatatttggatccatgctactaccttcgggtaaaattgtagcatcatataccatttctagtactttaggttcattattatccattgcagaggacgtcatgatcgcatcctaaaaaaatatattatttttatgttattttgttaaaaataatcatcgaatacttcgtaagatactccttcatgaacataatcagttacaaaacgtttatatgaagtaaagtatctacgatttttacaaaagtccggatgcataagtacaaagtacgcgataaacggaataataatagatttatctagtctatctttttctatagctttcatagttagatacatggtctcagaagtaggattatgtaacatcagcttcgataaaatgactgggttatttagtcttacacattcgctcatacatgtatgaccgttaactacagagtctacactaaaatgattgaacaatagatagtctaccattgtttcgtattcagatagtacagcgtagtacatggcatcttcacaaattatatcattgtctaatagatatttgacgcatcttatggatcccacttcaacagccatcttaaaatcggtaaaatcatattgctttcctttatcattaataatttctaaaacatcatctctatcataaaagatacaaatattaactgtttgatccgtaataacattgctagtcgatagcaatttgttaataagatgcgctgggctcaatgtcttaataagaagtgtaagaggactatctccgaatttgttttgtttattaacatccgttgatggaagtaaaagatctataatgtctacattcttgactgttttagagcatacaatatggagaggtgtatttccatcatgatctggttttgagggactaattcctagtttcatcatccatgagattgtagaagcttttggattgtctgacataagatgtctatgaatatgatttttgccaaatttatccactatcctggcttcgaatccgatggacattatttttttaaacactctttctgaaggatctgtacacgccaacaacggaccacatccttcttcatcaaccgagttgttaatcttggctccatactgtaccaataaatttattctctctatgacttcatcatctgttcccgagagataatatagaggcgttttatgctgtttatcacacgcgtttggatctgcgccgtgcgtcagcagcatcgcgactattctattattattaattttagaagctatatgcaatggataatttccatcatcatccgtctcatttggagagtatcctctatgaagaagttcttcgacaaatcgttcatctagtcctttaattccacaatacgcatgtagaatgtgataattatttccagaaggttcgatagcttgtagcatattcctaaatacatctaaatttttactattatatttggcataaagagatagataatactcggccgacataatgttgtccattgtagtataaaaattaatatttctatttctatttctgtatatttgcaacaatttactctctataacaaatatcataacttagttcttttatgtcaagaaggcactggtttagttcatctataaatgtcacgccataactaccacgcatgctatactcagaattatgataaagatatttatccttggggtgtaggtaatggggattaatctttgttggatcagtctctaagttaacacatgtcacacatgatccatttatagttatatcacacgatgatgatttatgaattgattccggaagatcgctatcgtattttgtggttccacaattcatttccatacatgttattgtcacactaatattatgatgaactttatctagccgctgagtggtaaacaacagaacagatagtttattatctttaccaacaccctcagccgctgccacaaatctctgatccgtatccatgatggtcatgtttatttctagtccgtatccagtcaacactatgttagcatttctgtcgatatagctttcactcatatgacactcaccaataatagtagaattaatgtcgtaatttacaccaatagtgagttcggcggcaaagtaccaataccggtaatcttgtcgaggaggacatatagtattcttgtattctaccgaatacccgagagatgcgatacaaaagagcaagactaatttgtaaaccatcttactcaaaatatgtaacaatagtacgatgcaatgagtaagacaataggaaatctatcttatatacacataattattctatcaattttaccaattagttagtgtaatgttaacaaaaatgtgggagaatctaattagtttttctttacacaattgacgtacatgagtctgagttccttgtttttgctaattatttcatccaatttattattcttgactatatcgagatcttttgtataggagtcagacttgtattcaacatgcttttctataatcattttagctatttcggcatcatccaatagtacattttccagattagcagaatagatattaatgtcgtatttgaacagagcctgtaacatctcaatgtctttattatctatagccaatttaatgtccggaatgaagagaagggaattattggtgtttgtcgacgtcatatagtcgagcaagagaatcatcatatccacgtgtccattttttatagtggtgtgaatacaactaaggagaatagccagatcaaaagtagatggtatttctgaaagaaagtatgatacaatacttacatcattaagcatgacggcatgataaaatgaagttttccatccagttttcccatagaacatcagtctccaatttttcttaacaaacagttttaccgtttgcatgttaccactatcaaccgcataatacaatgcagtgtttcccttgtcatcaaattgtgaatcatccagtccactgaatagcaaaatctttactattttggtatcttccaatgtggctgcctgatgtaatggaaattcattctctagaagatttttcaatgctccagcgttcaacaacgtacatactagacgcacgttattatcagctattgcataatacaaggcactatgtccatggacatccgccttaaatgtatctttactagagagaaagcttttcagctgcttagacttccaagtattaattcgtgacagatccatgtctgaaacgagacgctaattagtgtatattttttcattttttataattttgtcatattgcaccagaattaataatatctctaatagatctgattagtagatacatggctatcgcaaaacaacatatacacatttaataaaaataatatttattaagaaaattcagatttcacgtacccatcaatataaataaaataatgattccttacaccgtacccatattaaggagattccaccttacccataaacaatataaatccagtaatatcatgtctaatgatgaacacaaatggtgtattaaattccagtttttcaggagatgatctcgccgtagctaccataatagtagatgcctctgctacagttccttgttcgtcgacatctatctttgcattctgaaacattttataaatatataatgggtccctagtcatatgtttaaacgacgcattatctggattaaacatactaggagccatcatttcggctatcgacttaatatccctcttattttcgatagaaaatttagggagtttaagattgtacactttattccctaattgaaacgaccaatagtctaattttgcagccgtaatagaatctgtgaaatgggtcatattatcacctattgccaggtacatactaatattagcatccttatacggaaggcgtaccatgtcatattctttgtcatcgattgtgattgtatttccttgcaatttagtaactacgttcatcatgggaaccgttttcgtaccgtacttattagtaaaactagcattgcgtgttttagtgatatcaaacggatattgccatgtacctttaaaatatatagtattaatgattgcccatagagtattattgtcgagcatattagaatctactacattagacataccggatctacgttctactatagaattaattttattaaccgcatctcgtctaaagtttaatctatataggccgaatctatgatattgttgataatacgacggtttaatacacacagtattatctacgaaactttgataagttagatcagtgtacgtatatttagatgttttcagcttagctaatcctgatattaattctgtaaatgctggacccagatctctttttctcaaatccatagtcttcaataattctattctagtattacctgatgcaggcaatagcgacataaacatagaaaacgaatagccaaacggcgagaagacaatattatcatcttgaatatttttatacgctactataccggcattggtaaatccttgcagacgataggtagacgctgaacacgttaacgatagtatcaataacgcaatcatgattttatggtattaataattaaccttatttttatgttcggtataaaaaaattattgatgtctacacatccttttgtaattgacatctatatatccttttgtataatcaactctaatcactttaacttttacagttttccctaccagtttatccctatattcaacatatctatccatatgcatcttaacactctctgccaagatagcttcagagtgaggatagtcaaaaagataaatatatagagcataatccttctcgtatactctgccctttattacatcgcccgcattgggcaacgaataacaaaatgcaagcatcttgttaacgggctcgtaaattgggataaaaattatgtttttatatctattttattcaagagaatattcaggaatttctttttccggttgtatctcgtcgcagtatatatcatttgtacattgtttcatattttttaatagtttacaccttttagtaggactagtatcgtacaattcatagctgtattttgaattccaatcacgcataaaaatatcttccaattgttgacgaagacctaatccatcatccggtgtaatattaatagatgctccacatgtatccgtaaagtaatttcctgtccaatttgaggtacctatataggccgttttatcggttaccatatatttggcatggtttaccctagaatacggaatgggaggatcagcatctggtacaataaatagctttacttctatatctatgtttttagattttagcatagcgatagatcttaaaaagtttctcatgataaacgaagatcgttgccagcaactaatcaatagcttaacggatacttgtctgtctatagcggatcttcttaattcatcttctatataaggccaaaacaaaattttacccgccttcgaataaataatagggataaagttcataacagatacataaacgaatttactcgcatttctaatacatgacaataaagcggttaaatcattggttctttccatagtacatagttgttgcggcgcagaagcaataaatacagagtgtggaacaccacttacgttaatactaagaggatgatctgtattataatacgacggataaaagtttttccaattatatggtagattgttaactccaagataccagtatacctcaaaaatttgagtgagatccgctgccaagttcctattattgaagatcgcaatacccaattctttgacctgagttagtgatctccaatccatgttagcgcttcctaaataaatatgtgtattatcagatatccaaaattttgtatgaagaactcctcctaggatatttgtaatatctatgtatcgtacttcaactccggccatttgtagtctttcaacatcctttaatggtttgttagatttattgacggctactctaactcttactcctcttttgggtaattgtacaatctcgtttaatattatcgtgccgaaattcgtacccacttcatccgataaactccaataaaaagatgatatatctagtgtttttgtggtattggatagaatttccctccacatgttaaatgtagacaaatatactttatcaaattgcatacctataggaatagtctctgtaatcactgcgattgtattatccggattcattttatttgttaaaaaataatcctatatcacttcactctattaaaaatccaagtttctatttctttcatgactgattttttaacttcatccgtttccttatgaagatgatgtttggcaccttcataaatttttatttctctattacaatttgcatgttgcatgaaataatatgcacctaaaacatcgctaatctcattgtttgttccctggagtatgagagtcgggggggtgttaatcttggaaattatttttctaaccttgttggtagccttcaagacctgactagcaaatccagccttaattttttcatgattgattaatgggtcgtattggtatttataaactttatccatatctctagatactgattctggacatagctttccgactggcgcatttggtgtgatggttcccataagtttggcagctagcagattcagttttgaaacagcatctgcattaactagaggagacattagaatcattgctgtaaacaagtttggattatcgtaagaggctagtatagaaattgttgctcccatggaatgacccaataagtagatttaatagttaccacgtgctgtaccaaagtcatcaatcatcattttttcaccattacttcttccatgtccaatatgatcatgtgagaatactaaaattcctaacgatgatatgttttcagctagttcgtcataacgtccagaatgtttaccagctccatgacttatgaatactaatgccttaggatatgtaataggtttccaatatttacaatatatgtaatcattgtccagattgaacatacagtttgcactcatgattcacgttatataactatcaatattaacagttcgtttgatgatcatattatttttatgttttattgataattgtaaaaacatacaattaaatcaatatagaggaaggagacggatactgtcttttgtgagatagtcatggcgactaaatcagattatgaggatgctgttttttactttgtggatgatgataaaatatgtagtcgcgactccatcatcgatctaatagatgaatatatcacgtggagaaatcatgttatagtgtttaacaaagatattaccagttgtggaagactgtacaaggaattgatgaagttcgatgatgccgctatacagtactatggtattgataaaattaatgagattgtcgaagctatgagcgaaggagaccactacatcaattttacaaaagtccatgatcaggaaagtttattcgctaccataggaatatgtgctaaaatcactgaacattggggatacaaaaagatttcagaatctagattccaatcattgggaaacattacagatctgatgaccgacgataatataaacatcttgatactttttctagaaaaaaaattgaattgatgatataggggtcttcataacgcataattattacgttagcattctatatccgtgttaaaaaaaattatcctatcatgtatttgagagttttatatgtagcaaacatgatagctgtgatgccaataagctttagatattcacgcgtgctagtgttagggatggtattatctggtggtgaaatgtccgttatataatctacaaaacaatcatcgcatatagtatgcgatagtagagtaaacatttttatcgtttctactgggttcatacatcgtctacccaattcggttatgaatgaaattgtcgccaatcttacacccaaacccttgttatccattagcatagtattaacttcgttatttatgtcataaactgtaaatgattctgtagatgccatatcatacatgatattcatgtccctattataatcattactaactttatcacaatatatgttgataatatctatatatgatctagtctttgtgggcaactgtctatacaagtcgtctaaacgttgtttactcatatagtatcgaacagccatcattacatggtcccgttccgttgatagataatcgagtatgttagtggacttgtcaaatctatataccatattttctggaagtggatatacatagtcgtgatcaacattattgctagcctcatcttctatatcctgtactataccattatctatatcatctacataatctacgatattattatacataaacatcgacaacatactattgtcaattatctaagtcctgttgatccaaacccttgatctcctctatctgtactatctagagattgtacttcttccagttctggataatatatacgttgatagattagctgggctattctatcccccgtatttacattaaacgtacattttccattattaataagaataactcctatgtttcccctataatcttcgtctattacaccgcctcctatatcaatgccttttagggacagaccagacctaggagctattctaccatagcagaacttaggcatggacatactaatatctgtcttaattaactgtcgttctccaggagggatagtataatcgtaagcgctatataaatcatatccggcggcgtaaggtgattgcctagtaggagatttagctctgttagtttccttaacaaatctaactggtgagttaatattcatgttgaacataaaactaatattttatttcaaaattatttaccatcccatatattccatgaataagtgtgatgattgtacacttctatagtatctatatacgattcacgataaaatcctcctatcaatagcagtttattatccactatgatcaattctggattatccctcggataaataggatcatctatcagagtccatgtattgctggattcacaataaaattccgcatttctaccaaccaagaataaccttctaccgaacactaacgcgcatgatttataatgaggataataagtggatggtccaaactgccactgatcatgattgggtagcaaatattctgtagttgtatcagtttcagaatgtcctcccattacgtatataacattgtttatagatgccactgctggattacatctaggtttcagaagactcggcatattaacccaagcagcatccccgtggaaccaacgctcaacagatgtgggatttggtagacctcctactacgtataatttattgttagcgggtatcccgctagcatacagtctggggctattcatcggaggaattggaatccaattgtttgatatataatttacagctatagcattgttatgtatttcattgttcatccatccaccgatgagatatactacttctccaacatgagtacttgtacacatatggaatatatctataatttgatccatgttcataggatactctatgaatggatacttgtatgatttgcgtggttgtttatcacaatgaaatattttggtacagtctagtatccattttacattatttatacctctgggagaaagataatttgacctgattacatttttgataaggagtagcagatttcctaatttatttcttcgctttatataccacttaatgacaaaatcaactacataatcctcatctggaacatttagttcatcgctttctagaataagtttcatagatagataatcaaaattgtctatgatgtcatcttccagttccaaaaagtgtttggcaataaagtttttagtatgacataagagattggatagtccgtattctatacccatcatgtaacactcgacacaatattcctttctaaaatctcgtaagataaagtttatacaagtgtagatgataaattctacagaggttaatatagaagcacgtaataaattgacgacgttatgactatctatatatacctttccagtatatgagtaaataactatagaagttaaactgtgaatgtcaaggtctagacaaacccttgtaactggatctttatttttcgtgtatttttgacgtaaatgtgtgcgaaagtaaggagataactttttcaatatcgtagaattgactattatattgccacctatagcatcaataattgttttgaatttcttagtcatagacaatgctaatatattcttacagtacacagtattaacaaatatcggcatttatgtttctttaaaagtcaacatctagagaaaaatgattatctttttgagacataactcccattttttggtattcacccacacgtttttcgaaaaaattagtttttccttccaatgatatattttccatgaaatcaaacggattggtaacattataaatttttttaaatcccaattcagaaatcaatctatccgcgacgaattctatatatgttttcatcatttcacaattcattcctataagtttaactggaagagccgcagtaagaaattcttgttcaatggatactgcatctgttataatagatctaacggtttcttcactcggtggatacaataaatgtttaaacatcaaacatgcgaagtcgcagtgtagaccctcgtctctactaattagttcgttggaaaacgtgagtccgggcattaggccacgctttttaagccaaaatatggaagcgaatgatccggaaaagaagattccttctactgcagcaaaggcaataagtctctctccataaccggcgctgtcatgtatccacttttgagcccaatcggccttcttttttacacaaggcattgtttctatggcattaaagagatagtttttttcattactatctttaacataagtatcgatcaaaagactatacatttccgaatgaatgttttcaatggccatctgaaatccgtagaaacatctagcctcggtaatctgtacttctgtacaaaatcgttccgccaaattttcattcactattccgtcactggctgcaaaaaacgccaatacatgttttataaaatatttttcgtctggtgttagtttattccaatcattgatatctttagatatatctacttcttccactgtccaaaatgatgcctctgcctttttatacatgttccagatgtcatgatattggattgggaaaataacaaatctatttggatttggtgcaaggatgggttccataactaaattaacaatatcaataaattttttttcagttatctatatgcctgtacttggattttttgtacatcgatatcgccgcaatcactacaataattacaagtattattgatagcattgttattagtactatcataattaaattatcgacattcatgggtgctgaataatcgttattatcatcattatcattttgtaattgtgacatcatactaaataaatcgtttgcgagattgttgtgggaagcgggcatggaggatgcattatcattattatttaacgccttccatttggattcacaaatatggcgcgcgttcaacattttatggaaactataattttgtgaaaacagataacaagaaaactcgtcatcgttcaaatttttaacgatagtaaaccgattaaacgtcgagctaatttctaacgctagcgactctgttggatatgggtttccagatatatatcttttcagttcccctacgtatctataatcatctgtaggaaatggaagatatttccatttatctactgttcctaatatcatatgtggtggtgtagtagaaccattaagcgcgaaagatgttatttcgcatcgtattttaacttcgcaataatttctggttagataacgcactctaccagtcaagtcaatgatattagcctttacagatatattcatagtagtcgtaacgatgactccatcttttagatgcgatactcctttgtatgtaccagaatcttcgtacctcaaactcgatatatttaaacaagttaatgagatattaacgcgttttatgaatgatgatatataaccagaagttttatcctcggtggctagcgctataaccttatcattataataccaactagtgtgattaatatgtgacacgtcagtgtgggtacaaatatgtacattatcgtctacgtcgtattcgatacatccgcatacagccaacaaatataaaatgacaaatactctaacgccgttcgtacccatcttgatgcggtttaataaatgttttgatttcaatttattgtaaaaaaagattcggttttatactgttcgatattctcattgcttatattctcatctatcatctccacacagtcaaatccgtggttagcatgcacctcatcaaccggtaaaagactatcggactcttctatcattataactctagaatatttaatttggtcattattaatcaagtcaattatcttatttttaacaaacgtgagtattttactcattttttataaaaacttttagaaatatacagactctatcgtgtgtctatatcttctttttatatccaatgtatttatgtctgatttttcttcatttatcatatataatggtccaaattctacacgtgcttcggattcatccagatcattaaggttcttataattgtaacatccttctcttccctcttctacatcttccttcttattcttattcttagcgtcacagaatctaccacagcaggatcccatgacgagcgtcatattaaactaatccattttcaattataatatatgattagtaatgaccattaaaataaaaaatattcttcataaccggcaagaaagtgaaaagttcacattgaaactatgtcagtagtatacatcatgaaatgatgatatatatatactctattttggtggaggattatatgatataattcgtggataatcattcttaagacacatttcttcattcgtaaatcttttcacgttaaatgagtgtccatattttgcaatttcttcatatgatggcggtgtacgtggacgaggctgctcctgttcttgttgtggtcgccgactgtcgtgtttgcgtttatccctccattatcgcgattgcgtagatggagtactattatataccttgtaattaaatttttttattaattaaacgtataaaaacgttccgtatctgtatttaagagccagatttcgtctaatagaacaaatagctacagtaaaaataactagaataattgctacacccactagaaaccacggatcgtaatacggcaatcggttttcgataataggtggaacgtatattttatttaaggacttaacaattgtctgtaaaccacaatttgcttccgcggatcctgtattaactatctgtaaaagcatatgttggccgggcggagccgaacattctccgatatccaatttctgtatatctataatattattaacctccgcatacgcattacagttcttttctagcttggataccgcactaggtacatcgtctagatctattcctatttcctcagcgatagctcttctatccttttccggaagcaatgaaatcacttcaataaatgattcaaccatgagtgtgaaactaagtcgagaattactcatgcatttgttagttattcggagcgcgcaatttttaaactgtcctataacctctcctatatgaatagcacaagtgacattagtagggatagaatgttgagctaatttttgtaaataactatctataaaaagattatacaaagttttaaactctttagtttccgccatttatccagtctgagaaaatgtctctcataataaatttttccaagaaactaattgggtgaagaatggaaacctttaatctatatttatcacagtctgttttggtacacatgatgaattcttctaatgccgtactaaattcgatatctttttcgatttctggatatgtttttaataaagtatgaacaaagaaatggaaatcgtaataccagttatgtttaactttgaaattgttttttattttcttgttaatgattccagccacttgggaaaagtcaaagtcgtttaatgccgatttaatacgttcattaaaaacaaactttttatcctttagatgaattattattggttcattggaatcaaaaagtaagatattatcgggtttaagatctgcgtgtaaaaagttgtcgcagcatggtagttcgtagattttaatgtataacagagccatctgtaaaaagataaactttatgtattgtaccaaagatttaaatcctaatttgatagctaactcggtatctactttatctgccgaatacagtgctaggggaaaaattataatgtttcctctttcgtattcgtagttagttctcttttcatgttcgaaaaagtgaaacatgcggttaaaatagtttataacattaatattactgttaataactgccgggtaaaagtgggatagtaatttcacgaatttgatactgtcctttctctcgttaaacgcctttagaaaaactttagaagaatatctcaatgatagttcctgaccatccatagtttgtatcaataatagcaacatatgaagaacacgtttatacagagtatgtaaaaatgttaatttatagtttaatcccatggcccacgcacacacgattaattttttttcatctccctttagattgttgtatagaaatttgggtactgtgaactccgccgtagtttccatgggactatataattttgtggcctcgaatacaaattttactacatagttatctatcttaaaaactataccatatcctcctgtagatatgtgataaaaatcgtcgtttataggataaaatcgtttatccttttgttggaaaaaggatgaattaatgtaatcattctcttctatctttagtagtgtttccttattaaaattcttaaaataatttaacaatctaactgacggagcccaattttggtgtaaatctaattgggacattatattgttaaaatacaaacagtctcctaatataacagtatctgataatctatggggagacatccattgatattcaggggatgaatcattggcaacacccatttattgtacaaaaagccccaatttacaaacgaaagtccaggtttgatagagacaaactattaactattttgtctctgtttttaacacctccacagtttttaatttctttagtaatgaaattattcacaatatcagtatcttctttatctaccagagattttactaacttgataaccttggctgtctcattcaatagggtagtaatatttgtatgtgtgatattgatatctttttgaattgtttcttttagaagtgattctttgatggtgccagcatacgaattacaataatgcagaaactcggttaacatgcaggaattatagtaagccaattccaattgttgcctgtgttgtattagagtgtcaatatgagcaatggtgtccttgcgtttctctgatagaatgcgagcagcgattttggcgttatcatttgacgatatttctggaatgacgaatcctgtttctactaactttttggtaggacaaagtgaaacaatcaagaagatagcttctcctcctatttgtggaagaaattgaactcctctagatgatctactgacgatagtatctccttgacagatattggaccgaattacagaagtacctggaatgtaaagccctgaaaccccctcattttttaagcagattgttgccgtaaatcctgcactgtgaccaagatagagagctcctttggtgaatccatctctatgtttcagtttaaccaagaaacagtcagctggtctaaaatttccatctctatctaatacagcatctaacttgatgtcaggaactatgaccggtttaatgttatatgtaacattgagtaaatccttaagttcataatcatcactgtcatcagttatgtacgatccaaacaatgtttctactggcatagtggatacgaagatgctatccatcagaatgtttccctgattagtattttctatatagctattcttctttaaacgattttccaaatcagtaactatgttcatttttttaggagtaggacgcctagccagtatggaagaggattttctagatcctctcttcaacatctttgatctcaatggaatgcaaaaccccatagtgaaacaaccaacgataaaaataatattgtttttcactttttataattttaccatctgactcatggattcattaatatctttataagagctactaacgtataattctttataactgaactgagatatatacaccggatctatggtttccataattgagtaaatgaatgctcggcaataactaatggcaaatgtataaaacaacgaaattatactagagttgttaaagttaatattttctatgagctgttccaataaattatttgttgtgactgcgttcaagtcataaatcatcttgatactatccagtaaacagtctttaagttctggaatattatcatcccattgtaaagcccctaattcgactatcgaatatcctgctctgatagcagtttcaatatcgacggacgtcaatactgtaataaaggtggtagtattgtcatcatcgtgataaactacgggaatatggtcgttagtaggtacggtgactttacacaacgcgatatataactttccttttgtaccatttttaacgtagttgggacgtcctgcagggtattgttttgaagaaatgatatcgagaacagatttgatacgatatttgttggattcctgattattcactataatataatctagacagatagatgattcgataaatagagaaggtatatcgttggtaggataatacatccccattccagtattctcggatactctattgatgacactagttaagaacatgtcttctattctagaaaacgaaaacatcctacatggactcattaaaacttctaacgctcctgattgtgtctcgaatgcctcgtacaaggatttcaaggatgccatagattctttgaccaacgatttagaattgcgtttagcatctgatttttttattaaatcgaatggtcggctctctggtttgctaccccaatgataacaatagtcttgtaaagataaaccgcaagaaaatttatacgcatccatccaaataaccctagcaccatcggatgatattaatgtattattatagattttccatccacaattattgggccagtatactgttagcaacggtatatcgaatagattactcatgtaacctactagaatgatagttcgtgtactagtcataatatctttaatccaatctaagaaatttaaaattagattttttacactgttaaagttaacaaaggtattacccggatacgtggatatcatatatggcattggtccattatcagtaatagctccataaactgatacggcgatggtttttatatgtgtttgatctaacgaggaagaaattcgcgcccacaattcatctctagatatgtatttaatatcaaacggtaacacatcaatttcgggacgcgtatatgtttctaaatttttaatccaaatataatgatgacctatatgccctattatcatactgtcaactatagtacacctagagaacttacgatacatctgtttcctataatcgttaaattttacaaatctataacatgctaaaccttttgacgacaaccattcattaatttctgatatggaatctgtattctcgataccgtattgttctaaagccagtgctatatctccctgttcgtgggaacgctttcgtataatatcgatcaacggataatctgaagtttttggagaataatatgactcatgatctatttcgtccataaacaatctagacataggaattggaggcgatgatcttaattttgtgcaatgagtcgtcaatcctataacttctaatattgtaatattcatcatcgacataacactatctatgttatcatcgtatattagtataccacggccttcttcatttcgtgccaaaataatatacagtcttaaataattacgcaatatctcaatagtttcataattgttagctgttttcatcaaggtttgtatcctgtttaacatgatggcgttctataacgtctctattttctatttttaattttttaaatttttaacgatttactgtggctagatacccaatctctctcaaatatttttttagcctcgcttacaagctgtttatctatactattaaaactgacgaatccgtgattttggtaatgggttccgtcgaaatttgccgaagtgatatgaacatattcgtcgtcgactatcaacaattttgtattattctgaatagtgaaaaccttcacagatagatcattttgaacacacaacgcgtctagacttctggcggttgccatagaatatacgtcgttcttatcccaattaccaactagaagtctgatcttaactcctctattaatggctgcttctataatggagttgtaaatgtcaggccaatagtagctattaccgtcgacacgtgtagtgggaactatggccaaatgttcaatatctatactagtcttagccgacttgagtttatcaataactacatcagtgtctagatctctagaatatcccaataggtgttctggagaatcagtaaagaacactccacctataggattcttaatatgatacgcagtgctaactggcagacaacaagccgcagagcataaattcaaccatgaattttttgcgctattaaaggctttaaaagtatcaaatcttctacgaagatctgtggccagcgggggataatcagaatatacacctaacgttttaatcgtatgtatagatcctccagtaaatgacgcgtttcctacataacatctttcatcatctgacacccaaaaacaaccgagtagtagtcccacattattttttttatctatattaacggttataaaatttatatccgggcagtgactttgtagctctcccagatttcttttccctcgttcatctagcaaaactattattttaatccctttttcagatgcctcttttagtttatcaaaaataagcgcgcccctagtcgtactcagaggattacaacaaaaagatgctatgtatatatatttcttagctagagtgataatttcgttaaaacattcaaatgttgttaaatgatcggatctaaaatccatattttctggtagtgtttctaccagcctacattttgctcccgcaggtaccggtgcaaatggccacatttagttaacataaaaacttatacatcctgttctatcaacgattctagaatatcatcggctatatcgctaaaattttcatcaaagtcgacatcacaacctaactcagtcaatatattaagaagttccatgatgtcatcttcgtttatttctatatccgtatccattgtagattgttgaccgattatcgagtttaaatcattactaatactcaatccttcagaatacaatctgtgtttcattgtaaatttataggcggtgtatttaagttggtagattttcaattatgtatcaatatagcaacagtagttcttgctcctccttgattctagcatcctcttcattattttcttctacgtacataagcatgtccaatacgttagacaacacaccgacgatggcggccgccacagacacgaatatgactagaccgatgaccatttaaaaacccctctctagctttcacttaaactgtatcgattattcttttagaacatgtataatataaaaacattattctatttcgaatttaggcttccaaaaatttttcatccgtaaaccgataataatatatatagacttgttaatagtcggaataaatagattaatgcttaaactatcatcatctccacgattagagatacaatatttacattctttttgctgtttcgaaactttatcaatacacgttaatacaaacccaggaaggagatattgaaactgaggctgttgaaaatgaaacggtgaatacaataattcagataatgtaaaatcatgattccgtattctgatgatattagaactgctaatggatgtcgatggtatgtatctaggagtatctattttaacaaagcatcgatttgctaatatacaattatcattttgattaattgttattttattcatattcttaaaaggtttcatatttatcaattcttctacattaaaaatttccatttttaatttatgtagccccgcaatactcctcattacgtttcattttttgtctataatatccattttgttcatctcggtacatagattatccaattgagaagcgcatttagtagttttgtacattttaagtttattgacgaatcgtcgaaaactagttatagttaacattttattatttgataccctgatattaatacccctgccgttactattatttataactgatgtaacccacgtaacattagaattaattatcgatagtaatgcatcgacgcttccaaaattgtctattataaactcaccgataatttttttattgcatgttttcatattcattaggattatcaaatctttaatcttattacgattgtatgcgttgatattacaagacgtcattctaaaagacggaggatctccatcaaatgccagacaatcacgtacaaagtacatggaaataggttttgttctattgcgcatcatagattcatatagaacacccatagaaatactaatttgttttactctataaaatactaatgcatctatttcatcgttttgtataacgtctttccaagtgccaaattccaaatttttttcattgatagtaccaaattcttctatctctttaactacttgcatagataggtaattacagtgatgcctacatgccgttttttgaaactgaatagatgcgtctagaagcgatgctacactagtcacaatcaccactttcatatttagaatatatgtatgtaaaaatatagtagaatttcattttgtttttttctatgctataaatgaattctcattttgcatctgctcatactccgttttatatcaataccaaagaaggaagatatctggttctaaaagccgttaaagtatgcgatgttagaactgtagaatgcgaaggaagtaaagcttcctgcgtactcaaagtagataaaccctcatcgcccgcgtgtgagagaagaccttcgtccccgtccagatgcgagagaatgaataaccctggaaaacaagtcccgtttatgaggacggacatgctacaaaatatgttcgcggctaatcgcgataatgtagcttctagacttttgtcctaaaatactattatatccttttcgatattaataaatccgtgtcgtccaggttttttatctctttcagtatgtgaatagataggtattttatctctattcatcatcgaatttaagagatccgataaacattgtttgtattctccagatgtcagcatctgatacaacaatatatgtgcacataaacctctggcacttatttcatgtaccttccccttatcactaaggagaatagtatttgagaaatatgtatacatgatattatcatgaattagatatacagaatttgtaacactctcgaaatcacacgatgtgtcggcgttaagatctaatatatcactcgataacacattttcatctagatacactagacattttttaaagctaaaatagtctttagtagtgacagtaactatgcgattattttcatcgatgatacatttcatcggcatattattacgcttaccatcaaagactataccatgtgtatatctaacgtattctagcatggttgccatacgtgcattaaacttttcaggatctttggatagatcttccaatctatctatttgagaaaacatttttatcatgttcaatagttgaaacgtcggatccactatatagatattatctataaagattttaggaactacgttcatggtatcctggcgaatattaaaactatcaatgatatgattatcgttttcatcttttatcaccatatagtttctaagatatgggattttacttaatataatattatttcccgtgataaattttattagaaaggccaaatctataagaaaagtcctagaattagtctgaagaatatctatatcgccgtaccgtatatttggattaattagatatagagaatatgatccgtaacatatacaacttttattatggcgtctaagatattcttccatcaacttattaacatttttgactagggaagatacattatgacgtcccattacttttgccttgtctattactgcgacgttcatagaatttagcatatctcttgccaattcttccattgatgttacattataagaaattttagatgaaattacatttggagctttaatagtaagaactcctaatatgtccgtgtatgtggtcactaatacagattgtagttctataatcgtaaataatttacctatattatatgtttgagtctgtttagaaaagtagctaagtatacgatcttttatttctgatgcagatgtatcaacatcggaaaaaaatctttttttattcttttttactaaagatacaaatatgtctttgttaaaaacagttattttctgaatatttctagcttgtaattttaacatatgatattcgttcacactaggtactctgcctaaataggtttctataatctttaatgtaatattaggaagagtattctgatcaggattcctattcattttgaggatttaaaactctgattattgtctaatatggtctcaacacaaactttttcacagagcgatagagtttttgataactcgtttttcttaagaaatataaaactactgtttccagagctcgctctatcttttattttatctaattcgatacaaactcctgatactggttcagaaagtaattcattaattttcagtcctttatagaagatatttaatatagataatacaaaattttcagttcttgatatcgatctgattgatcctagaactagatatattaataacgtgctcattaggcagtttatggcagcttgataattagatatagtatattccagttcatatttattagataccgcattgcccagattttgatattctatgaattcctctgaaaataaatccaaaataactagacattctattttttgtggattagtgtactctcttccctctatcatgttcactactggtgtccacgatgataaatatctagagggaatataatatagtccataggatgccaatctagcaatgtcgaataactgtaatttgattcttcgttcttcattatgaattgattcttgaggtataaacctaacacaaattatattattagacttttcgtatgtaatgtctttcatgttataagtttttaatcctggaatagaatctattttaatgaggcttttaaacgcagagttctccaacgagtcaaagcataatactctgttgtttttcttatatacgatgttacgattttcttctttgaatggaataggtttttgaattagtttataattacaacataatagataaggaagtgtgcaaatagtacgcggaaaaaacataatagctcccctgttttcatccatggttttaagtaaatgatcactggcttctttagtcaatggatattcgaacattaaccgtttcatcatcattggacagaatccatatttcttaatgtaaagagtgatcaaatcattgtgtttattgtaccatcttgttgtaaatgtgtattcggttatcggatctgctcctttttctattaaagtatcgatgtcgatctcgtctaagaattcaactatatcgacatatttcatttgtatacacataaccattactaacgtagaatgtataggaagagatgtaacgggaacagggtttgttgattcgcaaactattctaatacataattcttctgttaatacgtcttgcacgtaatctattatagatgccaagatatctatataattattttgtaagatgatgttaactatgtgatctatataagtagtgtaataattcatgtatttcgatatatgttccaactctgtctttgtgatgtctagtttcgtaatatctatagcatcctcaaaaaatatattcgcatatattcccaagtcttcagttctatcttctaaaaaatcttcaacgtatggaatataataatctattttacctcttctgatatcattaatgatatagtttttgacactatcttctgtcaattgattcttattcactatatctaagaaacggatagcgtccctaggacgaactactgccattaatatctctattatagcttctggacataattcatctattataccagaattaatgggaactattccgtatctatctaacatagttttaagaaagtcagaatctaagacctgatgttcatatattggttcatacatgaaatgatctctattgatgatagtgactatttcattctctgaaaattggtaactcattctatatatgctttccttgttgatgaaggatagaatatactcaatagaatttgtaccaacaaactgttctcttatgaatcgtatatcatcatctgaaataatcatgtaaggcatacatttaacaattagagacttgtctcctgttatcaatatactattcttgtgataatttatgtgtgaggcaaatttgtccacgttctttaattttgttatagtagatatcaaatccaatggagctacagttcttggcttaaacagatatagtttttctggaacgaattctacaacattattataaaggactttgggtagataagtgggatgaaatcctattttaattaatgcgatagccttgtcctcgtgcagatatccaaacgcttttgtgatagtatggcattcattgtctagaaacgctctacgaatatctgtgacagatatcatctttagagaatatactagtcgcgttaatagtactacaatttgtattttttaatctatctcaataaaaaaattaatatgtatgattcaatgtataactaaactactaactgttattgataactagaatcagaatctaatgatgacgtaaccaagaagtttatctactgccaatttagctgcattatttttagcatctcgtttagattttccatctgccttatcgaatactcttccgtcgatgtctacacaggcataaaatgtaggagagttactaggccccactgattcaatacgaaaagaccaatctctcctagtaatttggcagtactcattaataacggtgacagggttagcacctttccaatcaataatttttttagccggaataacatcatcaaaagacttatgatcctctctcattgatttttcgcgggatacatcatctattatggcgtcagccataacatcagcatccggcttatccgcctccgttgtcataaaccaacgaggaggaatatcgtcggagctgtacaccatagcactacgttgaagatcgtacagagctttattaacttctcgcttctccatattaagttgtctagttagttgtgcagcagtagctccttcgattccaatggttttaatagcctcacacacaatctctgcgttagaacgttcgtcgatatagattttagacatttttagagagaactaacacaaccagcaataaaactgaacctactttatcatttttttattcatcatcctctggtggttcgtcgttcctatcgaatgtggatctgattaacccgtcatctataggtgatgctggttctggagattctggaggagatggattattatctggaagaatctctgttatttccttgttttcatgtatcgattgcgttgtaacattaagattgcgaaatgctctaaatttgggaggcttaaagtgttgtttgcaatctctacacgcatgtctaactagtggaggttcgtcagcggctctagtttgaatcatcatcggcgtagtattcctacttttacagttaggacacggtgtattgtatttctcgtcgagaacgttaaaataatcgttgtaactcacatcctttattttatctatattgtattctactcctttcttaatgcattttataccgaataagagatagcgaaggaattctttttcggtgccgctagtacccttaatcatatcacatagtgttttatattccaaatttgtggcaatagacggtttatttctatacgatagtttgtttctggaatcctttgagtattctataccaatattattctttgattcgaatttagtttcttcgatattagattttgtattacctatattcttgatgtagtactttgatgatttttccatggcccattctattaagtcttccaagttggcatcatccacatattgtgatagtaattctcggatatcagtagcggctaccgccattgatgtttgttcattggatgagtaactactaatgtatacattttccatttataacacttatgtattaactttgttcatttatattttttcattattatgttgatattaacaaaagtgaatatatatgttaataattgtattgtggttatacggctacaatttcataatgagtggaagtcagtgtccgatgatcaatgacgatagctttactctgaaaagaaagtatcaaatcgatagtgcggagtcaacaataaaaatggataagaagaggataaagtttcagaatagagccaaaatggtaaaagaaataaatcagacaataagagcagcacaaactcattacgagacattgaaactaggatacataaaatttaagagaatgattaggactactactctagaagatatagcaccatctattccaaataatcagaaaacttataaactattctcggacatttcagccatcggcaaagcatcacagaatccgagtaagatggtatatgctctgctgctttacatgtttcccaatttgtttggagatgaccatagattcattcgttatagaatgcatccaatgagtaaaatcaaacacaagatcttctctcctttcaaacttaatcttattagaatattagtggaagaaagattctataataatgaatgcagatctaataaatggagaataattggaacacaagttgataaaatgttgatagctgaatctgataaatatacaatagatgcaaggtataacctaaaacccatgtatagaatcaagggaaaatctgaagaagataccctcttcatcaaacagatggtagaacaatgtgtgacatcccaggaattggtggaaaaagtgttgaagatactgtttagagatttgttcaagagtggagaatacaaagcatacagatacgatgatgatgtagaaaatggatttattggattggatacactaaaattaaacattgttcatgatatagttgaaccatgtatgcctgttcgtaggccagtggctaagatactgtgtaaagaaatggtaaataaatactttgagaatccgctacatattattggtaaaaatcttcaagagtgcattgactttgttagtgaataggcatttcatctttctccaatactaattcaaattgttaaattaataatggatagtataaatagttattagtgataaaatagtaaaaataattattagaataagagtgtagtatcatagataactctcttctataaaaatggattttattcgtagaaagtatcttatatacacagtagaaaataatatagattttttaaaggatgatacattaagtaaagtaaacaattttaccctcaatcatgtactagctctcaagtatctagttagcaattttcctcaacacgttattactaaggatgtattagctaataccaatttttttgttttcatacatatggtacgatgttgtaaagtgtacgaagcggttttacgacacgcatttgatgcacccacgttgtacgttaaagcattgactaagaattatttatcgtttagtaacgcaatacaatcgtacaaggaaaccgtgcataaactaacacaagatgaaaaatttttagaggttgccgaatacatggacgaattaggagaacttataggcgtaaattatgacttagttcttaatccattatttcacggaggggaacccatcaaagatatggaaatcatttttttaaaactgtttaagaaaacagacttcaaagttgttaaaaaattaagtgttataagattacttatttgggcatacctaagcaagaaagatacaggcatagagtttgcggataatgatagacaagatatatatactctatttcaacaaactggtagaatcgtccatagcaatctaacagaaacgtttagagattatatctttcccggagataagactagctattgggtgtggttaaacgaaagtatagctaatgatgcggatatcgttcttaatagacacgccattaccatgtatgataaaattcttagttatatatactctgagataaaacaaggacgcgttaataaaaacatgcttaagttagtttatatctttgagcctgaaaaagatatcagagaacttctgctagaaatcatatatgatattcctggagatatcctatctattattgatgcaaaaaacgacgattggaaaaaatattttattagtttttataaagctaattttattaacggtaatacatttattagtgatagaacgtttaacgaggacttattcagagttgttgttcaaatagatcccgaatatttcgataatgaacgaattatgtctttattctctacgagtgctgcggacattaaacgatttgatgagttagatattaataacagttatatatctaatataatttatgaggtgaacgatatcacattagatacaatggatgatatgaagaagtgtcaaatctttaacgaggatacgtcgtattatgttaaggaatacaatacatacctgtttttgcacgagtcggatcccatggtcatagagaacggaatactaaagaaactgtcatctataaaatccaagagtagacggctgaacttgtttagcaaaaacattttaaaatattatttagacggacaattggctcgtctaggtcttgtgttagatgattataaaggagacttgttagttaaaatgataaaccatcttaagtctgtggaggatgtatccgcattcgttcgattttctacagataaaaaccctagtattcttccatcgctaatcaaaactattttagctagttataatatttccatcatcgtcttatttcaaaggtttttgagagataatctatatcatgtagaagaattcttggataaaagcatccatctaaccaagacggataagaaatatatacttcaattgataagacacggtagatcatagaacagaccaaatatattattaataatttgtatatacatagatataattatcacatattaaaaattcacacatttttgataaatgggaactgctgcaacaattcagactcccaccaaattaatgaataaagaaaatgcagaaatgattttggaaaaaattgttgatcatatagttatgtatattagtgacgaatcaagtgattcagaaaataatcctgaatatattgattttcgtaacagatacgaagactatagatctctcattataaaaagtgatcacgagtttgtaaagctatgtaaaaatcatgcagagaaaagttctccagaaacgcaacaaatgattatcaaacacatatacgaacaatatcttattccagtatctgaagtactattaaaacctataatgtccatgggtgacataattacatataacggatgtaaagacaatgaatggatgctagaacaactctctaccctaaactttaacaatctccgcacatggaactcatgtagcataggcaatgtaacgcgtctgttttatacattttttagttatctgatgaaagataaactaaatatataagtataatcccattctaatactttaacctgatgtattacctgcatcttattagaatattaacctaactaaaagacataacataaaaactcattacatagttgataaaaagcggtaggatataaatattatggctgccaccgttccgcgttttgacgacgtgtacaaaaatgcacaaagaagaattctagatcaagaaacattttttagtagaggtctaagtagaccgttaatgaaaaacacatatctatttgataattacgcgtatggatggataccagaaactgcaatttggagtagtagatacgcaaacttagatgcaagtgactattatcccatttcgttgggattacttaaaaagttcgagtttctcatgtctctatataaaggtcctattccagtatacgaagaaaaagtaaatactgaattcatagccaatggatcgttctctggtagatacgtatcatatcttcgaaagttttctgctcttccaacaaacgagtttattagttttttgttactgacttccattccaatctataatatcttgttctggtttaaaaatactcagtttgatattactaaacacacattattcagatacgtctatacagataatgccaaacacctggcgttggctaggtatatgcatcaaacaggagactataagcctttgtttagtcgtctcaaagagaattatatatttaccggtcccgttccaataggtatcaaagatatagatcaccctaatcttagtagagcaagaagtccatccgattatgagacattagctaatattagtactatattgtactttaccaagtatgatccggtattaatgtttttattgttttacgtacctgggtattcaattactacaaaaattactccagccgtagaatatctaatggataaactgaatctaacaaagagcgacgtacaactgttgtaaattattttatgcttcgtaaaatgtaggttttgaaccaaacattctttcaaagaatgagatgcataaaactttattatccaatagattgactatttcggacgtcaatcgtttaaagtaaacttcgtaaaatattctttgatcactgccgagtttaaaacttctatcgataattgtctcatatgttttaatatttacaagttttttggtccatggtacattagccggacaaatatatgcaaaataatatcgttctccaagttctatagtttctggattatttttattatattcagtaaccaaatacatattagggttatctgcggatttataatttgagtgatgcattcgactcaacataaataattctagaggagacgatctactatcaaattcggatcgtaaatctgtttctaaagaacggagaatatctatacatacctgattagaattcatccgtccttcagacaacatctcagacagtctggttttgtacatcttaatcatattcttatgaaacttggaaacatctcttctagtttcactagtacctttattaattctctcaggtacagattttgaattcgacgatgccgagtatttcatcgttgtatatttcttcttcgattgcataatcagattcttatataccgcctcaaactctattttaaaattattaaacaatactctactattaatcagtcgttctaactctttcgctatttctatagacttatctacatcttgactgtctatctctgtaaacacggagtcggtatctccatacacgctacgaaaacgaaatctgtaatctataggcaacgatgttttcacaatcggattaatatctctatcgtccatataaaatggattacttaatggattggcaaaccgtaacataccgttagataactctgctccatttagtaccgattctagatacaagatcattctacgtcctatggatgtgcaactcttagccgaagcgtatgagtatagagcactatttctaaatcccatcagaccatatactgagttggctactatcttgtacgtatattgcatggaatcataaatggccttttcagttgaactggtagcctgttttaacatctttttatatctggctctctctgccaaaaatgttcttaatagtctaggaatggttccttctatcgatctatcgaaaattgctatttcagagatgaggttcggtagtctaggttcacaatgaaccgtaatatatctaggaggtggatatttctgaagcaatagctgattatttatttcttcttccaatctattggtactaacaacgacaccgactaatgtttccggagatagatttccaaagatacacacattaggatacagactgttataatcaaagattaatacattattactaaacattttttgttttggagcaaataccttaccgccttcataaggaaacttttgttttgtttctgatctaactaagatagttttagtttccaacaatagctttaacagtggacccttgatgactgtactcgctctatattcgaataccatggattgaggaagcacatatgttgacgcacccgcgtctgtttttgtttctactccataatactcccacaaatactgacacaaacaagcatcatgaatacagtatctagccatatctaaagctatgtttagattataatccttatacatctgagctaaatcaacgtcatcctttccgaaagataatttatatgtatcattaggtaaagtaggacataatagtacgactttaaatccattttcccaaatatctttacgaattactttacatataatatcctcatcaacagtcacataattacctgtggttaaaacctttgcaaatgcagcggctttgcctttcgcgtccgtagtatcgtcaccgatgaacgtcatttctctaactcctctatttaatactttacccatgcaactgaacgcgttcttggatatagaatccaatttgtacgaatccaatttttcagatttttgaatgaatgaatatagatcgaaaaatatagttccattattgttattaacgtgaaacgtagtattggccatgccgcctactcccttatgactagactgatttctctcataaatacagagatgtacagcttcctttttgtccggagatctaaagataatcttctctcctgttaataactctagacgattagtaatatatctcagatcaaagttatgtccgttaaaggtaacgacgtagtcgaacgttagttccaacaattgtttagctattcgtaacaaaactatttcagaacatagaactagttctcgttcgtaatccatttccattagtgactgtatcctcaaacatcctctatcgacggcttcttgtatttcctgttccgttaacatctcttcattaatgagcgtaaacaataatcgtttaccacttaaatcgatataacagtaacttgtatgcgagattgggttaataaatacagaaggaaacttcttatcgaagtgacactctatatctagaaataagtacgatcttgggatatcgaatctaggtatttttttagcgaaacagttacgtggatcgtcacaatgataacatccattgttaatctttgtcaaatattgctcgtccaacgagtaacatccgtctggagatatcccgttagaaatataaaaccaactaatattgagaaattcatccatggtggcattttgtatgctgcgtttctttggctcttctatcaaccacatatctgcgacggagcattttctatctttaatatctagattataacttattgtctcgtcaatgtctatagttctcatctttcccaacggcctcgcattaaatggaggaggagacaatgactgatatatttcgtccgtcactacgtaataaaagtaatgaggaaatcgtataaatacggtctcaccatttcgacatctggatttcagatataaaaatctgttttcaccgtgactttcaaaccaattaatgcaccgaacatccatttatagaatttagaaatatattttcatttaaatgaatcccaaacattggggaagagccgtatggaccattatttttatagtactttcgcaagcgggtttagacggcaacatagaagcgtgtaaacgaaaactatatactatagtcagcactcttccatgtcctgcatgtagacggcacgcgactatcgctatagaggacaataatgtcatgtctagcgatgatctgaattatatttattattttttcatcagattatttaacaatttggcatctgatcccaaatacgcgatcgatgtgacaaaggttaaccctttataaacttaacccattataaaacttatgattagtcacaactgaaataaccgcgtgattattttttggtataattctacacggcatggtttctgtaactatgaattcaacccccgttacattagtgaaatctttaacaaacagcaagggttcgtcaaagacataaaactcattgtttacaatcgaaatagaccccctatcacacttaaaataaaaaatatccttatcctttaccaccaaataaaattctgattggtcaatgtgaatgtattcacttaacagttccacaaatttatttattaactccgaggcacatacatcgtcggtattttttatggcaaactttactcttccagcatccgtttctaaaaaaatattaacgagttccatttatatcatccaatattattgaaatgacgttgatggacagatgatacaaataagaaggtacggtacctttgtccaccatctcctccaattcatgctctattttgtcattaactttaatgtatgaaaacagtacgccacatgcttccatgacagtgtgtaacactttggatacaaaatgtttgacattagtataattgttcaagactgtcaatctataatagatagtagctataatatattctatgatggtattgaagaagatgacaaccttggcatattgatcatttaacacagacatggtatcaacagatagcttgaatgaaagagaatcagtaattggaataagcgtcttctcgatagagtgtccgtataccaacatgtctgatattttgatgtattccattaaattatttagttttttctttttattttcgttaaacagcatttctgtcaacggaccccaacatcgttgaccgattaagttttgattgatttttccgtgtaatgcgtatctagtcagatcgtatagcctatccaataatccatcatctgtgcgtagatcacatcgtacactttttaattctctatagaagagcgacagacatctggagcaattacagacagcaatttctttattctctacagatgtaagatacttgaagacattcctatgatgatgcagaattttggataacacggtattgatggtatctgttaccataattcctttgatggctgatagtgtcagagcacaagatttccaatctttgacaatttttagcaccattatctttgttttgatatctatatcagacagcatggtgcgtctgacaacacagggattaagacggaaagatgaaatgattctctcaacatcttcaatggataccttgctattttttctggcattatctatatgtgcgagaatatcctctagagaatcagtatcctttttgatgatagtggatctcaatgacatgggacgtctaaaccttcttattttatcaccagattgcatggtgatttgtcttctttcttttatcataatgtaatctctaaattcatcggcaaattgtctatatctaaaatcataatatgagatgtttacctctacaaatatctgttcgtccaatgttagagtatctacatcagttttgtattccaaattaaacatggcaacggatttaattttatattcctctattaagtcctcgtcgataataacagaatgtagataatcatttaatccatcgtacatggttggaagatgcttgttgacaaaatctttaattgtcttgatgaaggtgggactatatctaacatcttgattaataaaatttataacattgtccataggatactttgtaactagttttatacacatctcttcatcggtaagtttagacagaatatcgtgaacaggtggtatattatattcatcagatatacgaagaacaatgtccaaatctatattgtttaatatattatatagatgtagcgtagctcctacaggaatatctttaactaagtcaatgatttcatcaaccgttagatctattttaaagttaatcatataggcattgatttttaaaaggtatgtagccttgactacattctcattaattaaccattccaagtcactgtgtgtaagaagattatattctatcataagcttgactacatttggtcccgataccattaaagaattcttatgatataaggaaacagcttttaggtactcatctactctacaagaattttggagagccttaacgatatcagtgacgtttattatttcaggaggaaaaaacctaacattgagaatgtcggagttaatagcttccagatacagtgattttggcaatagtccgtgtaatccataatccagtaacacgagctggtgcttgctagacaccttttcaatgtttaatttttttgaaataagctttgataaagccttcctcgcaaattccggatacatgaacatgtcggcgacatgattaagtattgttttttcattatttttatattttctcaacaagttctcaataccccaatagatgatagaatatcacccaatgcgtccatgttgtctatttccaacaggtcgctatatccaccaatagaagtttttccaaaaaagattctaggaacagttctaccaccagtaatttgttcaaaatagtcacgcaattcattttcgggtttaaattctttaatatcgacaatttcatacgctcctcttttgaaactaaacttatttagaatatccagtgcatttctacaaaaaggacatgtatacttgacaaaaattgtcactttgttattggccaacctttgttgtacaaattcctcggccattttaatatttaagtgatataaaactatctcgacttatttaactctttagtcgagatatatggacgcagatagctatatgatagccaactacagaaggcaaacgctataaaaaacataattacgacgagcatatttataaatatttttattcagcattacttgatatagtaatattaggcacagtcaaacattcaaccactctcgatacattaactctctcattttctttaacaaattctgcaatatcttcgtaaaaagattcttgaaactttttagaatatctatcgactctagatgaaatagcgttcgtcaacatactatgttttgtatacataaaggcgcccattttaacagtttctagtgacaaaatgctagcgatcctaggatcctttagaatcacatagattgacgattcgtctctcttagtaactctagtaaaataatcatacaatctagtacgcgaaataatattatccttgacttgaggagatctaaacaatctagttttgagaacatcgataagttcatcgggaatgacatacatactatctttaatagaactcttttcatccagttgaatggattcgtccttaaccaactgattaatgagatcttctattttatcattttccagatgatatgtatgtccattaaagttaaattgtgtagcgcttctttttagtctagcagccaatactttaacatcactaatatcgatatacaaaggagatgatttatctatggtattaagaattcgtttttcgacatctgtcaaaaccaattcctttttgcctgtatcatccagttttccatcctttgtaaagaaattattttctactagactattaataagactgataaggattcctccataattgcacaatccaaactttttaacaaaactagactttacaagatctacaggaatgcgtacttcaggtttcttagcttgtgattttttcttttgtggacattttcttgtgaccaactcatctaccatttcattgattttagcagtgaaataagctttcaatgcacgggcactgatactattgaaaacgagttgatcttcaaattccgccatttaagttcaccaaacaacttttaaatacaaatatatcaatagtagtagaataagaactataaaaaaaataataattaaccaataccaaccccaacaaccggtattattagttgatgtgactgttttctcatcacttagaacagatttaacaatttctataaagtctgtcaaatcatcttccggagaccccataaatacaccaaatatagcggcgtacaacttatccatttatacattgaatattggcttttctttatcgctatcttcatcatattcatcatcaatatcaacaagtcccagattacgagccagatcttcttctacattttcagtcattgatacacgttcactatctccagagagtccgataacgttagccaccacttctctatcaatgattagtttcttgagtgcgaatgtaatttttgtttccgttccggatctatagaaaactacaggtgtgataattgccttggccaattgtctttctcttttactgagtgattctagttcaccttctatagatctgagaatggatgattctccagtcgaaacatattctaccatggatccgtttaatttgttgatgaagatggattcatccttaaatgttttctctgtaatagtttccaccgaaagactatgcaaagaatttggaatgcgttccttgtgcttaatgtttccatagacggcttctagaagttgatacaacataggactagccgcggtaacttttatttttagaaagtatccatcgcttctatcttgtttagatttatttttataaagtttagtctctccttccaacataataaaagtggaagtcatttgactagataaactatcagtaagttttatagagatagacgaacaattagcgtattgagaagcatttagtgtaacgtattcgatacattttgcattagatttactaatcgattttgcatactctataacacccgcacaagtctgtagagaatcgctagatgcagtaggtcttggtgaagtttcaactctcttcttgattaccttactcatgattaaacctaaataattgtactttgtaatataatgatatatattttcactttatctcatttgagaataaaaatgtttttgtttaaccactgcatgatgtacagatttcggaatcgcaaaccaccagtggttttattttatccttgtccaatgtgaattgaatgggagcggatgcgggtttcgtacgtagatagtacattcccgtttttagaccgagactccatccgtaaaaatgcatactcgttagtttggaataactcggatctgctatatggatattcatagattgactttgatcgatgaaggctcccctgtctgcagccatttttatgatcgtcttttgtggaatttcccaaatagttttataaactcgcttaatatcttctggaaggtttgtattctgaatggatccaccatctgccataatcctattcttgatctcatcattccataattttctctcggttaaaactctaaggagatgcggattaactacttgaaattctccagacaatactctccgagtgtaaatattactggtatacggttccaccgactcattatttcccaaaatttgagcagttgatgcagtcggcataggtgccaccaataaactatttctaagaccgtatgttctgattttatcttttagaggttcccaattccaaagatccgacggtacaacattccaaagatcatattgtagaataccgttactggcgtacgatcctacatatgtatcgtatggtccttccttctcagctagttcacaactcgcctctaatgcaccgtaataaatggtttcgaagatcttcttatttagatcttgtgcttccaggctatcaaatggataatttaagagaataaacgcgtccgctaatccttgaacaccaataccgataggtctatgtctcttattagagatttcagcttctggaataggataataattaatatctataattttattgagatttctgacaattactttgaccacatccttcagtttgagaaaatcaaatcgcccatctattacaaacatgttcaaggcaacagatgccagattacaaacggctacctcattagcatccgcatattgtattatctcagtgcaaagattactacacttgatagttcctaaattttgttgattactctttttgttacacgcatccttataaagaatgaatggagtaccagtttcaatctgagattctataatcgctttccagacgactcgagcctttattatagatttgtatctcctttctctttcgtatagtgtatacaatcgttcgaactcgtctccccaaacattgtccaatccaggacattcatccggacacatcaacgaccactctccgtcatccttcactcgtttcataaagagatcaggaatccaaagagctataaatagatctctggttctatgttcctcgtttcctgtattctttttaagatcgaggaacgccataatatcagaatgccacggttccaagtatatggccataactccaggccgtttgtttcctccctgatctatgtatctagcggtgttattataaactctcaacattggaataataccgtttgatataccattggtaccggagatatagcttccactggcacgaatattactaattgatagacctattccccctgccattttagagattaatgcgcatcgttttaacgtgtcatagataccctctatgctatcatcgatcatgttaagtagaaaacagctagacatttggtgacgactagttcccgcattaaataaggtaggagaagcgtgcgtaaaccatttttcagaaagtagattgtacgtctcaatagctgagtctatatcccattgatgaattcctactgcgacacgcattaacatgtgctgaggtctttcaacgatcttgttgtttattttcaacaagtaggatttttccaaagttttaaaaccaaaatagttgtatgaaaagtctcgttcgtaaataataaccgagttgagtttatccttatatttgttaactatatccatggtgatacttgaaataatcggagaatgtttcccatttttaggattaacatagttgaataaatcctccatcacttcactaaatagtttttttgtttccttgtgtagatttgatacggctattctggcggctagaatggcataatccggatgttgtgtagtacaagtggctgctatttcggctgccagagtgtccaattctaccgttgttactccattatatattccttgaataaccttcatagctattttaataggatctatatgatccgtgtttaagccataacataattttctaatacgagacgtgattttatcaaacatgacattttccttgtatccatttcgtttaatgacaaacatttttgttggtgtaataaaaaaattatttaacttttcattaatagggatttgacgtatgtagcgtacaaaattatcgttcctggtatatagataaagagtcctatatatttgaaaatcgttacggctcgattaaactttaatgattgcatagtgaatatatcattaggatttaactccttgactatcagggcggcaccagaaattaccatcaaaagcattaatacagttatgccgatcgcagttagaacggttatagcatccaccatttatatctaaaaattagatcaaagaatatgtgacaaagtcctagttgtatactgagaattgacgaaacaatgtttcttacatatttttttcttattagtaactgacttaatagtaggaactggaaagctagacttgattattctataagtatagatacccttccaaataatattctctttgataaaagttccagaaaatgtagaattttttaaaaagttatcttttgctattaccaagattgtgtttagacgcttattattaatatgagtgatgaaatccacaccgcctctagatatcgcttttatttccacattagatggtaaatccaatagtgaaactatctttttaggaatgtatggactcgcgtttagaggagtgaacgtcttaggcgtcggaaaggatgattcatcaaacgaataaacaatttcacaaatggatgttaatgtattagtaggaaattttttgacgctagtggaattgaagattctaatggatgatgttctacctatttcatccgataacatgttaatttccgacaccaacggttttaatatttcgatgatatacggtagtctctctttcggacttatatagcttattccacaatacgagtcattatatactccaaaaaacaaaataactagtataaaatctgtatcgaatgggaaaaacgaaattatcgacataggtatagaatctggaacattgaacgtattaatacttaattctttttctgtggtaagtaccgataggttattgacattgtatggttttaaatattctataacttgagacttgatagatattagtgatgaattgaaaattatttttatcaccacgtgtgtttcaggatcatcgtcgacgcccgtcaaccaaccgaatggagtaaaataaatatcattaatatatgctctagatattagtatttttatcaatcctttgattatcatcttctcgtaggcgaatgattccatgatcaagagtgatttaagaacatcctccggagtattaatgggcttagtaaacagtccatcgttgcaataataaaagttatccaagttaaaggatattatgcattcgtttaaagatatcacctcatctgacggagacaattttttggtaggttttagagactttgaagctacttgtttaacaaagttattcatcgtcgtttactattctatttaattttgtagttaatttatcacatatcacattaattgactttttggtccatttttccatacgtttatattcttttaatcctgcgttatccgtttccgttatatccagggatagatcttgcaagttaaatagaatgctcttaaataatgtcatttttttatccgctaaaaatttaaagaatgtataaacttttttcaaagatttaaaacttttaggtggagttctagtacacaatatcataaacaaactaataaacatcccgcattcagattccaacagctgattaacttccacattaatacagcctattttcgctccaaatgtacattcgaaaaatctgaataaaacatcgatgtcacaatttgtattatccaatacagaatgtctgtgattcgtgttaaaaccatcggagaaggaatagaaataaaaattattatagtggtggaattcagttggaatattgcctccggagtcataaaaggatactaaacattgttttttatcataaattacacatttccaatgagacaaataacaaaatccaaacattacaaatctagaggtagaacttttaattttgtctttaagtatatacgataagatatgtttattcataaacgcgtcaaatttttcatgaatcgctaaggagtttaagaatctcatgtcaaattgtcctatataatccacttcggatccataagcaaactgagagactaagttcttaatacttcgattgctcatccaggctcctctctcaggctctattttcatcttgacgacctttggattttcaccagtatgtattcctttacgtgataaatcatcgattttcaaatccatttgtgagaagtctatcgccttagatactttttcccgtagtcgaggtttaaagaaatacgctaacggtatactagtaggtaactcaaagacatcatatatagaatggtaacgcgtctttaactcgtcggttaactctttcttttgatcgagttcgtcgctactattgggtctgctcaggtgccccgactctactagttccaacatcataccgataggaatacaagacactttgccagcggttgtagatttatcatatttctccactacatatccgttacaatttgttaaaaatttagatacatctatattgctacataatccagctagtgaatatatatgacataataaattggtaaatcctagttctggtattttactaattactaaatctgtatatctttccatttatcatggaaaagaatttaccagatatcttcttttttccaaactgcgttaatgtattctcttacaaatattcacaagatgaattcagtaatatgagtaaaacggaacgtgatagtttctcattggcggtgtttccagttataaaacatagatggcataacgcacacgttgtaaaacataaaggaatatacaaagttagtacagaagcacgtggaaaaaaagtatctcctccatcactaggaaaacccgcacacataaacctaaccgcgaagcaatatatatacagtgaacacacaataagctttgaatgttatagttttctaaaatgtataacaaatacagaaatcaattcgttcgatgagtatatattaagaggactattagaagctggtaatagtttacagatattttccaattccgtaggtaaacgaacagatactataggtgtactagggaataagtatccatttagcaaaattccattggcctcattaactcctaaagcacaacgagagatattttcagcgtggatttctcatagacctgtagttttaactggaggaactggagtgggtaagacgtcacaggtacccaagttattgctttggtttaattatttatttggtggattctctactctagataaaatcactgactttcacgaaagaccagtcattctatctcttcctaggatagctttagttagattgcatagcaataccattttaaaatcattgggatttaaggtactagatggatctcctatttctttacggtacggatctataccggaagaattaataaacaaacaaccaaaaaaatatggaattgtattttctacccataagttatctctaacaaaactatttagttatggcactcttattatagacgaagttcatgagcatgatcaaataggagatattattatagcagtagcgagaaagcatcatacgaaaatagattctatgtttttaatgactgccacgttagaggatgacagggaacggctaaaagtatttttacctaatcccgcatttatacatattcctggagatacactgtttaaaattagcgaggtatttattcataataagataaatccatcttccagaatggcatacatagaagaagaaaagagaaatttagttactgctatacagatgtatactcctcctgatggatcatccggtatagtctttgtggcatccgttgcacagtgtcacgaatataaatcatatttagaaaaaagattaccgtatgatatgtatattattcatggtaaggtcttagatatagacgaaatattagaaaaagtgtattcatcacctaatgtatcgataattatttctactccttatttggaatccagcgttactatacacaatgttacacacatttatgatatgggtagagtttttgtccccgctccttttggaggatcgcaacaatttatttctaaatctatgagagatcaacgaaaaggaagagtaggaagagttaatcctggtacatacgtctatttctatgatctgtcttatatgaagtctatacagcgaatagattcagaatttctacataattatatattgtacgctaataagtttaatctaacactccccgaagatttgtttataatccctacaaatttggatattctatggcgtacaaaggaatatatagactcgttcgatattagtacagaaacatggaataaattattatccaattattatatgaagatgatagagtatgctaaactttatgtactaagtcctattctcgctgaggagttggataactttgagaggacgggagaattaactagtattgtacgagaagccattttatctctaaatttacgaattaagattttaaattttaaacataaagatgatgatacgtatatacacttttgtaaaatattattcggtgtctataacggaacaaacgctactatatattatcatagacctctaacgggatatatgaatatgatttcagatactatatttgttcctgtagataataactaaaaatcaaactctaatgaccacatctttttttagagatgaaaaattttctacatctccttttgtagacacgactaaacattttgcagaaaaaagtttattagtgtttagataatcgtatacttcatcagtgtagatagtaaatgtgaacagataaaaggtattcttgctcaatagattggtaaattccatagaatatattaatcctttcttcttgagatcccacatcatttcaaccagagacgttttatccaatgatttacctcgtactataccacatacaaaactagattttgcagtgacgtcgtacctggtattcctaccaaacaaaattttacttttagttcttttagaaaattctaaggtagaatctctatttgccaatatgtcatctatggaattaccactagcaaaaaatgatagaaatatatattgatacatcgcagctggttttgatctactatactttaaaaacgaatcagattccataattgcctgtatatcatcagctgaaaaactatgttttacacgtattccttcggcatttctttttaatgatatatcttgtttagacaatgataaagttatcatgtccatgagagacgcgtctccgtatcgtataaatatttcattagatgttagacgcttcattaggggtatacttctataaggtttcttaatcagtccatcattggttgcgtcaagaactactatcggatgttgttgggtatctctagtgttacacatggccttactaaagtttgggtaaataactatgatatctctattaattatagatgcatatatttcattcgtcaaggatattagtatcgacttgctatcgtcattaatacgtgtaatgtaatcatataaatcatgcgatagccaaggaaaatttaaatagatgttcatcatataatcgtcgctataattcatattaatacgttgacattgactaatttgtaatatagcctcgccacgaagaaagctctcgtattcagtttcatcgataaaggataccgttaaatataactggttgccgatagtctcatagtctattaagtggtaagtttcgtacaaatacagaatccctaaaatattatctaatgttggattaatctttaccataactgtataaaatggagacggagtcataactattttaccgtttgtacttactggaatagatgaaggaataatctccggacatgctggtaaagacccaaatgtctgtttgaagaaatccaatgttccaggtcctaatctcttaacaaaaattacgatattcgatcccgatatcctttgcattctatttaccagcatatcacgaactatattaagattatctatcatgtctattctcccaccgttatataaatcgcctccgctaagaaacgttagtatatccatacaatggaatacttcatttctaaaatagtattcgttttctaattctttaatgtgaaatcgtatactagaaagggaaaaattatctttgagttttccgttagaaaagaaccacgaaactaatgttctgattgcgtccgattccgttgctgaattaatggatttacaccaaaaactcatataacttctagatgtagaagcattcgctaaaaaattagtagaatcaaaggatataagtagatgttccaacaagtgagcaattcccaagatttcatctatatcattctcgaatccgaaattagaaattcccaagtagatatcctttttcatccgatcgttgatgaaaatacgaactttattcggtaagacaatcatttactaaggagtaaaataggaagtaatgttcgtatgtcgttatcatcgtataaattaaaggtgtgttttttaccattaagtgacattataattttaccaatattggaattataatataggtgtatttgcgcactcgcgacggttgatgcatcggtaaatatagctgtatctaatgttctagtcggtatttcatcatttcgctgtctaataatagcgttttctctatctgtttccattacagctgcctgaagtttattggtcggataatatgtaaaataataagaaatacatacgaataacaaaaataaaataagatataataaagatgccatttagagatctaattttgttcaacttgtccaaattcctacttacagaagatgaggaatcgttggagatagtgtcttccttatgtagaggatttgaaatatcttatgatgacttgataacttactttccagataggaaataccataaatatatttataaagtatttgaacatgtagatttatcggaggaattaagtatggaattccatgatacaactttgcgagatttagtttatcttagattgtacaagtattccaagtgtatacggccgtgttataaattaggagataatctaaaaggcatagttgttataaaggacaggaatatttatattagggaagcaaatgatgacttgatagaatatctcctcaaggaatacactcctcagatttatacatattctaatgagcgcgtccccataactggttcaaaattaattctttgtggattttctcaagttacatttatggcgtatacaacgtcgcatataacaacaaataaaaaggtagatgttctcgtttccaaaaaatgtatagatgaactagtcgatccaataaattatcaaatacttcaaaatttatttgataaaggaagcggaacaataaacaaaatactcaggaagatattttattcggtaaccggtggccaaactccataggtagctttttctatttcggattttagaatttccaaattcaccagcgatttatcggttttggtgaaatccaaggatttattaatgtccacaaatgccatttgttttgtctgtggattgtatttgaaaatggaaacgatgtagttagatagatgcgctgcgaagtttcctattagggttccgcgcttcacgtcacccagcatacttgaatcaccatcctttaaaaaaaatgataagatatcaacatggagtatatcatactcggattttaattcttctactgcatcactgacattttcacaaatactacaatacggtttaccgaaaataatcagtacgttcttcatttatgggtatcaaaaacttaaaatcgttactgctggaaaataaatcactgacgatattagatgataatttatacaaagtatacaatggaatatttgtggatacaatgagtatttatatagccgtcgccaattgtgtcagaaacttagaagagttaactacggtattcataaaatacgtaaacggatgggtaaaaaagggagggcatgtaaccctttttatcgatagaggaagtataaaaattaaacaagacgttagagacaagagacgtaaatattctaaattaaccaaggacagaaaaatgctagaattagaaaagtgtacatccgaaatacaaaatgttaccggatttatggaagaagaaataaaggcaaaaatgcaattaaaaatcgataaacttacatttcaaatatatttatctgattctgataacataaaaatatcattgaatgagatactaacacatttcaacaataatgagaatgttacattattttattgtgatgaacgagacgcagaattcgttatgtgtctcgaggctaaaacacatttctctaccacaggagaatggccgttgataataagtaccgatcaggatactatgctatttgcatctactgataatcatcctaagatgataaaaaacttaactcaactgtttaaatttgttccctcggcagaggataactatttagcaaaattaacggcgttagtgaatggatgtgatttctttcctggactctatggggcatctataacacccaccaacttaaacaaaatacaattgtttagtgattttacaatcgataatatagtcactagtttggcaattaaaaattattatagaaagactaactctaccgtagacgtgcgtaatattgttacgtttataaacgattacgctaatttagacgatgtctactcgtatgttcctccttgtcaatgcactgttcaagaatttatattttccgcattagatgaaaaatggaatgaatttaaatcatcttatttagagaccgttccgttaccctgtcaattaatgtacgcgttagaaccacgtaaggagattgatgtttcagaagttaaaactttatcatcttatatagatttcgaaaatactaaatcagatatcgatgttataaaatctatatcctcgatttttggatattctaacgaaaactgtaacacgatagtattcggcatctataaggataatttactactgagtataaataattcattttactttaacgatagtctgttaataaccaatactaaaagtgataatataataaatataggttactagattaaaaatggtgttccaactcgtgtgctctacatgcggtaaagatatttctcacgaacgatataaattgattatacgaaaaaaatcattaaaggatgtactcgtcagtgtaaagaacgaatgttgtaggttaaaattatctacacaaatagaacctcaacgtaacttaacagtgcaacctctattggatataaactaatatggatccggttaattttatcaagacatatgcgcctagaggttctattatttttattaattataccatgtcattaacaagtcatttgaatccatcgatagaaaaacatgtgggtatttattatggtacgttattatcggaacacttggtagttgaatctacctatagaaaaggagttcgaatagtcccattggatagtttttttgaaggatatcttagtgcaaaagtatacatgttagagaatattcaagttatgaaaatagcagctgatacgtcattaactttattgggtattccgtatggatttggtcatgatagaatgtattgttttaaattggtagctgactgttataaaaatgccggtgttgaaacatcgtctaaacgaatattaggtaaagatatttttctgagccaaaacttcacagacgataatagatggataaagatatatgattctaataatttaacattttggcaaattgattaccttaaagggtgagttaatatgcataactactcctccgttgttttttccctcgttctttttcttaacgttgtttgccatcactctcataatgtaaagatattctaaaatggtaaacttttgcatatcggacgcagaaattggtataaatgttgtaattgtattatttcccgtcaatggactagtcacagctccatcagttttatatcctttagagtatttctcactcgtgtctaacattctagagcattccatgatctgtttatcgttgatattggccggaaagatagattttttattttttattatattactattggcaattgtagatataacttctggtaaatatttttctaccttttcaatctcttctattttcaagccggctatatattctgctatattgttgctagtatcaataccttttcttgctaagaagtcatatgtggtattcactatatcagttttaactggtagttccattagcctttccacttctgcagaataatcagaaattggttctttaccagaaaatccagctactataataggctcaccgatgatcattggcaaaatcctatattgtaccagattaatgagagcatatttcatttccaataattctgctagttcttgagacattgatttatttgatgaatctagttggttctctagatactctaccatttctgccgcatacaataacttgttagataaaatcagggttatcaaagtgtttagcgtggctagaatagtgggcttgcatgtattaaagaatgcggtagtatgagtaaaccgttttaacgaattatatagtctccagaaatctgtggcgttacatacatgagccgaatgacatcgaagattgtccaatatttttaatagctgctctttgtccattatttctatatttgactcgcaacaattgtagataccattaatcactgattcctttttcgatgccggacaatagcacaattgtttagctttggactctatgtattcagaattaatagatatatctcttaatacagattgcactatacattttgaaactatgtcaaaaattgtagaacgacgctgttctgcagccatttaactttaaataatttacaaaaatttaaaatgagcatccgtataaaaatcgataaactgcgccaaattgtggcatatttttcagagttcagtgaagaagtgtctataaatgtagactcgacggatgagttaatgtatatttttgccgccttgggcggatctgtaaacatttgggccattatacctctcagtgcatcagtgttctaccgcggagccgaaaatattgtgtttaatcttccggtgtccaaggtaaaatcgtgtttgtgtagttttcacaatgatgccatcatagatatagaacctgatctggaaaataatctagtaaaactttctagttatcatgtagtaagtgtcgattgtaacaaggaactgatgcctattaggacagatactactatttgtctaagtatagatcaaaagaaatcttacgtgtttaattttcacaagtatgaagaaaaatgttgtggtagaaccgtcattcatttagaatggttgttgggctttatcaagtgtattagtcagcatcagcatttggctattatgtttaaagatgacaatattattatgaagactcctggtaatactgatgcgttttccagggaatattctatgactgaatgttctcaagaactacaaaagttttctttcaaaatagctatctcgtctctcaacaaactacgaggattcaaaaagagagtcaatgtttttgaaactagaatcgtaatggataatgacgataacattctaggaatgttgttttcggatagagttcaatcctttaagatcaacatctttatggcgtttttagattaatactttcaatgagataaatatgggtggcggagtaagtgttgagctccctaaacgggatccgcctccgggagtacccactgatgagatgttattaaacgtggataaaatgcatgacgtgatagctcccgctaagcttttagaatatgtgcatataggaccactagcaaaagataaagaggataaagtaaagaaaagatatccagagtttagattagtcaacacaggacccggtggtctttcggcattgttaagacaatcgtataatggaaccgcacccaattgctgtcgcacttttaatcgtactcattattggaagaaggatggaaagatatcagataagtatgaagagggtgcagtattagaatcgtgttggccagacgttcacgacactggaaaatgcgatgttgatttattcgactggtgtcagggggatacgttcgatagaaacatatgccatcagtggatcggttcagcctttaataggagtgatagaactgtagagggtcaacaatcgttaataaatctgtataataagatgcaaacattatgtagtaaagatgctagtgtaccaatatgtgaatcatttttgcatcatttacgcgcacacaatacagaagatagcaaagagatgatcgattatattctaagacaacagtctgcggactttaaacagaaatatatgagatgtagttatcccactagagataagttagaagagtcattaaaatatgcggaacctcgagaatgttgggatccagagtgttcgaatgccaatgttaatttcttactaacacgtaattataataatttaggactttgcaatattgtacgatgtaatactagcgtgaacaacttacagatggataaaacttcctcattaagattgtcatgtggattaagcaatagtgatagattttctactgttcccgtcaatagagcaaaagtagttcaacataatattaaacattcgttcgacctaaaattgcatttgatcagtttattatctctcttggtaatatggatactaattgtagctatttaaatgggtgccgcggcaagcatacagacgacggtgaatacactcagcgaacgtatctcgtctaaattagaacaagaagcgaacgctagtgctcaaacaaaatgtgatatagaaatcggaaatttttatatccgacaaaaccatggatgtaacctcactgttaaaaatatgtgctctgcggacgcggatgctcagttggatgctgtgttatcagccgctacagaaacatatagtggattaacaccggaacaaaaagcatacgtgccagctatgtttactgctgcgttaaacattcagacaagtgtaaacactgttgttagagattttgaaaattatgtgaaacagacttgtaattctagcgcggtcgtcgataacaaattaaagatacaaaacgtaatcatagatgaatgttacggagccccaggatctccaacaaatttggaatttattaatacaggatctagcaaaggaaattgtgccattaaagcgttgatgcaattgacgactaaggccactactcaaatagcacctagacaagttgctggtacaggagttcagttttatatgattgttatcggtgttataatattggcagcgttgtttatgtactatgccaagcgtatgctgttcacatccaccaatgataaaatcaaacttattttagccaataaggaaaacgtccattggactacttacatggacacattctttagaacttctccgatggttattgctaccacggatatacaaaactgaaaatatattgataatattttaatagattaacatggaagttatcgctgatcgtctagacgatatagtgaaacaaaatatagcggatgaaaaatttgtagattttgttatacacggtctagagcatcaatgtcctgctatacttcgaccattaattaggttgtttattgatatactattatttgttatagtaatttatatttttacggtacgtctagtaagtagaaattatcaaatgttgttggtggcgctagtcatcacattaactattttttattactttatactataatagtactagactgacttctaacaaacatctcacctgccataaataaatgcttgatattaaagtcttctatttctaacactattccatctgtggaaaataatactctgacattatcgctaattgacacatcggtgagtgatatgcctataaagtaataatcttctttgggcacatataccagtgtaccaggttctaacaacctatttactggtgctcctgtagcatactttttctttaccttgagaatatccatcgtttgcttggtcaatagcgatatgtgattttttatcaaccactcgaaaaagtaattggagtgttcatatcctctacgggctattgtctcatggccgtgtatgaaatttaagtaacacgactgtggtagatttgttctatagagccggttgccgcaaatagatagaactaccaatatgtctgtacaaatgttaaacattaattgattaacagaaaaaacaatgttcgttctgggaatagaaaccagatcaaaacaaaattcgttagaatatatgccacgtttatacattgaatataaaataactacagtttgaaaaataacagtatcatttaaacatttaacttgcggggttaatctcacaactttactgtttttaaactgttcaaaatatagcatcgatccatgagaaatacgtttagccgcctttaatagaggaaatcccaccgcctttctggatctcaccaacgacgatagttctgaccagcaactcatttcttcatcatccacctgttttaacatataataggcaggagatagatatccgtcattgcaatattccttctcgtaggcacacaatctaatattgataaaatctccattctcttctctgcatttattatcttgtttcggtggctgattaggctgtagtcttggtttaggctttggtatatcgttgttgaatctattttggtcattaaatctttcatttcttcctggtatatttttatcacctcgtttggttggatttttgtctatattatcgtttgtaacatcggtacgggtattcatttatcacaaaaaaaacttctctaaatgagtctactgctagaaaacctcatcgaagaagataccatattttttgcaggaagtatatctgagtatgatgatttacaaatggttattgccggcgcaaaatccaaatttccaagatctatgctttctatttttaatatagtacctagaacgatgtcaaaatatgagttggagttgattcataacgaaaatatcacaggagcaatgtttaccacaatgtataatataagaaacaatttgggtctaggagatgataaactaactattgaagccattgaaaactatttcttggatcctaacaatgaagttatgcctcttattattaataatacggatatgactgccgtcattcctaaaaaaagtggtaggagaaagaataagaacatggttattttccgtcaaggatcatcacctatcttgtgtattttcgaaactcgtaaaaagattaatatttataaagaaaatatggaatccgcatcgactgagtatacacctatcggagacaacaaggctttgatatctaaatatgcgggaattaatatcctaaatgtgtattctccttccacatccataagattgaatgccatttacggattcaccaataaaaataaactagagaaacttagtactaataaggaactagaatcgtatagttctagccctcttcaagaacccattaggttaaatgattttctgggactattggaatgtgttaaaaagaatattcctctaacagatattccgacaaaggattgattactataaatggagaatgttcctaatgtatactttaatcctgtgtttatagagcccacgtttaaacattctttattaagtgtttataaacacagattaatagttttatttgaagtattcgttgtattcattctaatatatgtattttttagatctgaattaaatatgttcttcatgcctaaacgaaaaatacccgatcctattgatagattacgacgtgctaatctagcgtgtgaagacgataaattaatgatctatggattaccatggatgacaactcaaacatctgcgttatcaataaatagtaaaccgatagtgtataaagattgtgcaaagcttttgcgatcaataaatggatcacaaccagtatctcttaacgatgttcttcgcagatgatgattcattttttaagtatttggctagtcaagatgatgaatcttcattatctgatatattgcaaatcactcaatatctagactttctgttattattattgatccaatcaaaaaataaattagaagccgtgggtcattgttatgaatctctttcagaggaatacagacaattgacaaaattcacagactttcaagattttaaaaaactgtttaacaaggtccctattgttacagatggaagggtcaaacttaataaaggatatttgttcgactttgtgattagtttgatgcgattcaaaaaagaatcctctctagctaccaccgcaatagatcctattagatacatagatcctcgtcgcgatatcgcattttctaacgtgatggatatattaaagtcgaataaagtgaacaataattaattctttattgtcatcatgaacggcggacatattcagttgataatcggccccatgttttcaggtaaaagtacagaattaattagacgagttagacgttatcaaatagctcaatataaatgcgtgactataaaatattctaacgataatagatacggaacgggactatggacgcatgataagaataattttgaagcattggaagcaactaaactatgtgatgtcttggaatcaattacagatttctccgtgataggtatcgatgaaggacagttctttccagacattgttgaattctgtgagcgtatggcaaacgaaggaaaaatagttatagtagccgcactcgatgggacatttcaacgtaaaccgtttaataatattttgaatcttattccattatctgaaatggtggtaaaactaactgctgtgtgtatgaaatgctttaaggaggcttccttttctaaacgattgggtgaggaaaccgagatagaaataataggaggtaatgatatgtatcaatcggtgtgtagaaagtgttacatcgactcataatattatattttttatctaaaaaactaaaaataaacattgattaaattttaatataatacttaaaaatggatgttgtgtcgttagataaaccgtttatgtattttgaggaaattgataatgagttagattacgaaccagaaagtgcaaatgaggtcgcaaaaaaactaccgtatcaaggacagttaaaactattactaggagaattattttttcttagtaagttacagcgacacggtatattagatggtgccaccgtagtgtatataggatcggctcctggtacacatatacgttatttgagagatcatttctataatttaggagtgatcatcaaatggatgctaattgacggccgccatcatgatcctattttaaatggattgcgtgatgtgactctagtgactcggttcgttgatgaggaatatctacgatccatcaaaaaacaactgcatccttctaagattattttaatttctgatgtaagatccaaacgaggaggaaatgaacctagtacggcggatttactaagtaattacgctctacaaaatgtcatgattagtattttaaaccccgtggcatctagtcttaaatggagatgcccgtttccagatcaatggatcaaggacttttatatcccacacggtaataaaatgttacaaccttttgctccttcatattcagctgaaatgagattattaagtatttataccggtgagaacatgagactgactcgagttaccaaattagacgctgtaaattatgaaaaaaagatgtactaccttaataagatcgtccgtaacaaagtagttgttaactttgattatcctaatcaggaatatgactattttcacatgtactttatgctgaggaccgtgtactgcaataaaacatttcctactactaaagcaaaggtactatttctacaacaatctatatttcgtttcttaaatattccaacaacatcaactgaaaaagttagtcatgaaccaatacaacgtaaaatatctagcaaaaattctatgtctaaaaacagaaatagcaagagatccgtacgcggtaataaatagaaacgtgctactgagatatactaccgatatagagtataatgatttagttactttaataaccgttagacataaaattgattctatgaaaactgtgtttcaggtatttaacgaatcatccataaattatactccggttgatgatgattatggagaaccaatcattataacatcgtatcttcaaaaaggtcataacaagtttcctgtaaattttctatacatagatgtggtaatatctgacttatttcctagctttgttagactagatactacagaaactaatatagttaatagtgtactacaaacaggcgatggtaaaaagactcttcgtcttcccaaaatgttagagacggaaatagttgtcaagattctctatcgccctaatataccattaaaaattgttagatttttccgcaataacatggtaactggagtagagatagccgatagatctgttatttcagtcgctgattaatcaattagtagagatgagataagaacattataataatcaataatattatcttatatctcgtttagaaaaatgctaatattaaaatagctaacgctagtaatccaatcggaagccatttgatatctataatagggtatctaatttcctgattcagatagcggacagctatattctcggtagctactcgtttggaatcacaaacattatttacatctaatttactatctgtaatggaaacgtttcccaatgaaatggtacaatccgatacattgcattttgttatatttttttttaaagaggctggtaacaacgcatcgcttcgtttacatggctcgtaccaacaataatagggtaatcttgtatctattcctatccgtactatgcttttatcaggataaatacatttacatcgtatatcgtctttgttagcatcacagaatgcataaatttgttcgtccgtcatgataaaaatttaaagtgtaaatataactattatttttatagttgtaataaaaagggaaatttgattgtatactttcggttctttaaaagaaactgacttgataaaaatggctgtaatctctaaggttacgtatagtctatatgatcaaaaagagattaatgctacagatattatcattagtcatgttaaaaatgacgacgatatcggtaccgttaaagatggtagactaggtgctatggatggggcattatgtaaaacttgtgggaaaacggaattggaatgtttcggtcactggggtaaagtaagtatttataaaactcatatagttaagcctgaatttatttcagaaattattcgtttactgaatcatatatgtattcactgcggattattgcgttcacgagaaccgtattccgacgatattaacctaaaagagttatcgggacacgctcttaggagattaaaggataaaatattatccaagaaaaagtcatgttggaacagcgaatgtatgcaaccgtatcaaaaaattactttttcaaagaaaaaggtttgtttcgtcaacaagttggatgatattaacgttcctaattctctcatctatcaaaagttaatttctattcatgaaaagttttggccattattagaaattcatcaatatccagctaacttattttatacagactactttcccatccctccgctgattattagaccggctattagtttttggatagatagtatacccaaagagaccaatgaattaacttacttattaggtatgatcgttaagaattgtaacttgaatgctgatgaacaggttatccagaaggcggtaatagaatacgatgatattaaaattatttctaataacactaccagtatcaatttatcatatattacatccggcaaaaataatatgattagaagttatatcgtcgcccgacgaaaagatcagaccgctagatctgtaattggtcccagtacatctatcaccgttaatgaggtaggaatgcccgcatatattagaaatacacttacagaaaagatatttgttaatgcctttacagtggataaagttaaacaactattagcgtcaaaccaagttaaattttactttaataaacgattaaaccaattaacaagaatacgccaaggaaagtttatcaaaaataaaatacatttattgcctggtgattgggtagaagtagctgttcaagaatatacaagtattatttttggaagacagccgtctctacatagatacaacgtcatcgcttcatctatcagagctaccgaaggagatactatcaaaatatctcccggaattgccaactctcaaaatgctgatttcgacggagatgaagaatggatgatattggagcaaaatcctaaagccgtaattgaacaaagtattcttatgtatccgacgacgttactcaaacacgatattcatggagcccccgtttatggatctattcaagatgaaatcgtagcagcgtattcattgtttaggatacaagatctttgtttagatgaagtattgaacatcttggggaaatatggaagagagttcgatcctaaaggtaaatgtaaattcagcggtaaagatatctatacttacttgataggtgaaaagattaattatccgggtctcttaaaggatggtgaaattattgcaaacgacgtagatagtaattttgttgtggctatgaggcatctgtcattggctggactcttatccgatcataagtcgaacgtggaaggtatcaactttattatcaagtcatcttatgtttttaagagatatctatctatttacggttttggggtgacattcaaagatctgagaccaaattcgacgttcactaataaattggaggccatcaacgtagaaaaaatagaacttatcaaagaagcatacgccaaatatctcaacgatgtaagagacgggaaaatagttccattatctaaagctttagaggcggactatgtggaatccatgttatccaacttgacaaatcttaatatccgagagatagaagaacatatgagacaaacgctgatagatgatccagataataacctcctgaaaatggccaaagcgggttataaagtaaatcctacagaactaatgtatattctaggtacgtatggacaacaaaggattgatggtgaaccagcagagactcgagtattgggtagagtcttaccttactatcttccagactctaaggatccagaaggaagaggttacattcttaattctttaacaaaaggattaacgggttctcaatattacttttcgatgctggttgccagatctcaatctactgatatcgtctgtgaaacatcacgtaccggaacactggctagaaaaatcattaaaaagatggaggatatggtggtcgacggatacggacaagtagttataggtaatacgctcatcaagtacgccgccaattataccaaaattctaggctcagtatgtaaacctgtagatcttatctatccagatgagtccatgacttggtatttggaaattagtgctctgtggaataaaataaaacagggattcgtttactctcagaaacagaaacttgcaaagaagacattggcgccgtttaatttcctagtattcgtcaaacccaccactgaggataatgctattaaggttaaggatctgtacgatatgattcataacgtcattgatgatgtgagagagaaatacttctttacggtatctaatatagattttatggagtatatattcttgacgcatcttaatccttctagaattagaattacaaaagaaacggctatcactatctttgaaaagttctatgaaaaactcaattatactctaggtggtggaactcctattggaattatttctgcacaggtattgtctgagaagtttacacaacaagccctgtccagttttcacactactgaaaaaagtggtgccgtcaaacaaaaacttggtttcaacgagtttaataacttgactaatttgagtaagaataagaccgaaattatcactctggtatccgatgatatctctaaacttcaatctgttaagattaatttcgaatttgtatgtttgggagaattaaatccagacatcactcttcgaaaagaaacagataaatatgtagtagatataatagttaatagattatacatcaagagagcagaaataaccgaattagttgtcgaatatatgattgaacgatttatctcctttagcgtcattgtaaaggaatggggtatggagacattcattgaggacgaggataatattagatttactgtctacctaaatttcgttgaaccggaagaattgaatcttagtaagtttatgatggttcttccgggtgccgccaacaagggcaagattagtaaattcaagattcctatctctgattatacgggttatgacgacttcaatcaaacaaaaaagctcaataagatgactgtagaactcatgaatctaaaagaattgggttctttcgatttggaaaacgtcaacgtgtatcctggagtatggaatacatacgatatcttcggtatcgaggccgctcgtgaatacttgtgcgaagccatgttaaacacctatggagaagggttcgattatctgtatcagccttgtgatcttctcgctagtttactatgtgctagttacgaaccagaatcagttaataaattcaagttcggtgcagctagtactcttaagagagctacgttcggagacaataaagcattgttaaacgcggctcttcataaaaagtcagaacctattaacgataatagtagctgccacttttttagcaaggtccctaatataggaactggatattacaaatactttatcgacttgggtcttctcatgagaatggaaaggaaactatctgataagatatcttctcaaaagatcaaggaaatggaagaaacagaagacttttaattcttatcaataacatatttttctatgatctgtcttttaaacgatggattttccacaaatgcgcctctcaagtccctcatagaatgatacacgtataaaaaatatagcataggcaatgactccttatttttagacattagatatgccaaaatcatagccccgcttctatttactcccgcagcacaatgaaccaacacgggctcgtttcgttgatcacatttagataaaaaggcggttacgtcgtcaaaatatttactaatatcggtagttgtatcatctaccaacggtatatgaataatattaatattagagttaggtaatgtatatttatccatcgtcaaatttaaaacatatttgaacttaacttcagatgatggtgcatccatagcatttttataatttcccaaatacacattattggttacccttgtcattatagtgggagatttggctttgtgcatatctccagttgaacgtagtagtaagtatttatacaaacttttcttatccatttataacgtacaaatggataaaactactttatcggtaaacgcgtgtaatttagaatacgttagagaaaaggctatagtaggcgtacaagcagccaaaacatcaacacttatattctttgttattatattggcaattagtgcgctattactctggtttcagacgtctgataatccagtctttaatgaattaacgagatatatgcgaattaaaaatacggttaacgattggaaatcattaacggatagcaaaacaaaattagaaagtgatagaggtagacttctagccgctggtaaggatgatatattcgacttcaaatgtgtggatttcggcgcctattttatagctatgcgattggataagaaaacatatctgccgcaagctattaggcgaggtactggagacgcgtggatggttaaaaaggcggcaaaggtcgatccatctgctcaacaattttgtcagtatttgataaaacacaagtctaataatgttattacttgtggtaatgagatgttaaatgaattaggttatagcggttattttatgtcaccgcattggtgttccgattttagtaatatggaatagtgttagataaatgcggtaacgaatgttcctgtaaggaaccataacagtttagatttaacgttaaagatgagcataaacataataaacaaaattacaatcaaacctataacattaatatcaaacaatccaaaaaatgaaatcagtggagtagtaaacgcgtacataactcctggataacgtttagcagctgccgttcctattctagaccaaaaattcggtttcatgttttcgaagcggtgttctgcaacaagtcggggatcgtgttctacatatttggcggcgttatccagtatctgcctattgatcttcatttcgttttcgattctggctatttcaaaataaaatcccgatgatagacctccagactttataatttcatctacgatgttcagcgccgtagtaactctaataatataggctgataagctaacatcataccctcctgtatatgtgaatatggcatgatttttgtccattacaagctcggttttaactttattgcctgtaataatttctctcatctgtaggatatctatttttttgtcatgcattgccttcaagacgggacgaagaaacgtaatatcctcaataacgttatcgttttctacaataactacatattctacctttttattttctaactcggtaaaaaaattagaatcccatagggctaaatgtctagcgatatttcttttcgtttcctctgtacacatagtgttacaaaaccctgaaaagaagtgagtatacttgtcatcatttctaatgtttcctccagtccactgtataaacgcataatccttgtaatgatctggatcatccttgactaccacaacatttcttttttctggcataacttcgttgtcctttacatcatcgaacttctgatcattaatatgctcatgaacattaggaaatgtttctgatggaggtctatcaataactggcacaacaataacaggagttttcaccgccgccatttagttattgaaattaatcatatacaactctttaatacgagttatattttcgtctatccattgtttcacatttacatatttcgacaaaaagatataaaatgcgtattccaatgcttctctgtttaatgaattactaaaatatacaaacacgtcactgtctggcaataaatgatatcttagaatattgtaacaatttattttgtattgcacatgttcgtgatctatgagttcttcttcgaatggcataggatctccgaatctgaaaacgtataaataggagttagaataataatatttgagagtattggtaatatataaactctttagcggtataattagtttttttctctcaatttctatttttagatgtgatggaaaaatgactaattttgtagcattagtatcatgaactctaatcaaaatcttaatatcttcgtcacacgttagctctttgaagtttttaagagatgcatcagttggttctacagatggagtaggtgcaacaattttttgttctacacatgtatgtactggagccattgttttaactataatggtgcttgtatcgaaaaactttaatgcagatagcggaagctcttcgccgcgactttctacatcgtaattgggttctaacgccgatctctgaatggatactagttttctaagttctaatgtgattctctgaaaatgtaaatccaattcctccggcattatagatgtgtatacatcggtaaataaaactatagtatccaacgatcccttctcgcaaattctagtcttaaccaaaaaatcgtatataaccacggagatggcgtatttaagagtggattcttctaccgttttgttcttggatgtcatataggaaactataaagtccgcactactgttaagaatgattactaacgcaactatatagttcaaattaagcattttggaaacataaaataactctgtagacgatacttgactttcgaataagtttgcagacaaacgaagaaagaacagacctctcttaatttcagaagaaaactttttttcgtattcctgacgtctagagtttatatcaataagaaagttaagaattagtcggttaatgttgtatttcattacccaagtttgagatttcataatattatcaaaagacatgataatattaaagataaagcgctgactatgaacgaaatagctatatggttcgctcaagaatatagtcttgttaaacgtggaaacgataactgtatttttaatcacgtcagcggcatctaaattaaatataggtatatttattccacacactctacaatatgccacaccatcttcataataaataaattcgttagcaaaattattaattttagtgaaatagttagcgtcaactttcatagcttccttcaatctaatttgatgctcacacggtgcgaattccactctaacatcccttttccatgcctcaggttcatcgatctctataatatctagtttcttgcgtttcacaaacacgggctcgtctctcgcgatgagatctgtatagtaactatgtaaatgataactagatagaaagatgtagctatatagatgacgatcctttaagagaggtataataactttaccccaatcagataaactattgttatggtcttcggaaaaagaatttttataaatttttccagtattttccaaatatacgtacttgacatctaaaaaatccttaatgataataggaatggataatccgtctattttataaagaaatacatatcgcacattatacttttttttggaaatgggaataccgatgtgtctacataaatatgcaaagtctaaatattttttagagaatcttagttggtccaaattcttttccaagtacggtaatagatttttcatattgaacggtatcttcttaatctctggttctagttccgcattaaatgatgaaactaagtcactatttttataactaacgattacatcacctctaacatcatcatttaccagaatactgatcttcttttgtcgtaaatacatgtctaatgtgttaaaaaaaagatcatacaagttatacgtcatttcatctgtggtattcttgtcattgaaggataaactcgtactaatctcttctttaacagcctgttcaaatttatatcctatatacgaaaaaatagcaaccagtgtttgatcatccgcgtcaatattctgttctatcgtagtgtataacaatcgtatatcttcttctgtgatagtcgatacgttataaaggttgataacgaaaatatttttatttcgtgaaataaagtcatcgtaggattttggacttatattcgcgtctagtagatatgcttttatttttggaatgatctcaattagaatagtctctttagagtccatttaaagttacaaacaactaggaaattggtttatgatgtataatttttttagtttttatagattctttattctatacttaaaaaatgaaaataaatacaaaggttcttgagggttgtgttaaattgaaagcgagaaataatcataaattatttcattatcgcgatatccgttaagtttgtatcgtaatggcgtggtcaattacaaataaagcggatactagtagcttcacaaagatggctgaaatcagagctcatctaaaaaatagcgctgaaaataaagataaaaacgaggatattttcccggaagatgtaataattccatctactaagcccaaaaccaaacgagccactactcctcgtaaaccagcggctactaaaagatcaaccaaaaaggaggaagtggaagaagaagtagttatagaggaatatcatcaaacaactgaaaaaaattctccatctcctggagtcagcgacattgtagaaagcgtggccgctgtagagctcgatgatagcgacggggatgatgaacctatggtacaagttgaagctggtaaagtaaatcatagtgctagaagcgatctttctgacctaaaggtggctaccgacaatatcgttaaagatcttaagaaaattattactagaatctctgcagtatcgacggttctagaggatgttcaagcagctggtatctctagacaatttacttctatgactaaagctattacaacactatctgatctagtcaccgagggaaaatctaaagttgttcgtaaaaaagttaaaacttgtaagaagtaaatgcgtgcacttttttataaagatggtaaactctttaccgataataattttttaaatcctgtatcagacgataatccagcgtatgaggttttgcaacatgttaaaattcctactcatttaacagatgtagtagtatatgaacaaacgtgggaggaggcgttaactagattaatttttgtgggaagcgattcaaaaggacgtagacaatacttttacggaaaaatgcatgtacagaatcgcaacgctaaaagagatcgtatttttgttagagtatataacgttatgaaacgaattaattgttttataaacaaaaatataaagaaatcgtccacagattccaattatcagttggcggtttttatgttaatggaaactatgttttttattagatttggtaaaatgaaatatcttaaggagaatgaaacagtagggttattaacactaaaaaataaacacatagaaataagtcccgatgaaatagttatcaagtttgtaggaaaggacaaagtttcacatgaatttgttgttcataagtctaatagactatataagccgctattgaaactgacggatgattctagtcccgaagaatttctgttcaacaaactaagtgaacgaaaggtatacgaatgtatcaaacagtttggtattagaatcaaggatctccgaacgtatggagtcaattatacgtttttatataatttttggacaaatgtaaagtccatatctcctcttccatcaccaaaaaagttaatagcgttaactatcaaacaaactgctgaagtggtaggtcatactccatcaatttcaaaaagagcttacatggcaacgactattttagaaatggtaaaggataaaaattttttagatgtagtatctaaaactacgttcgatgaattcctatctatagtcgtagatcacgttaaatcatctacggatggatgatatagatctttacacaaataattacaagaccgataaatggaaatggataagcgtatgaaatctctcgcaatgacagctttcttcggagagctaaacacattagatattatggcattgataatgtctatatttaaacgccatccaaacaataccattttttcagtggataaggatggtcagtttatgattgatttcgaatacgataattataaggcttctcaatatttggatctgaccctcactccgatatctggagatgaatgcaagactcacgcatcgagtatagccgaacaattggcgtgtgtggatattattaaagaggatattagcgaatatatcaaaactactccccgtcttaaacgatttataaaaaaataccgcaatagatcagatactcgtatcagtcgagatacagaaaagcttaaaatagctctagctaaaggcatagattacgaatatataaaagacgcttgttaataagtaaatgaaaaaaaactagtcgtttataataaaacacaatatggatgccaacatagtatcatcttctactattgcaacgtatatagacgctttagcaaagaatgcttcagaattagaacagaggtctaccgcatacgaaataaataatgaattggaactagtatttattaagccgccattaattactttgacaaatgtagtgaatatctctacgattcaggaatcgtttattcgatttaccgttactaataaggaaggtgtcaaaattagaactaagattccattatctaaggtacatggtctagatgtaaaaaatgtacagttagtagatgctatagataacatagtttgggaaaagaaatcattagtgacggaaaatcgtcttcacaaagaatgcttgttgagactatcgacagaggaacgtcatatatttttggattacaagaaatatggatcctctatccgactagaattagtcaatcttattcaagcaaaaacaaaaaactttacgatagactttaagctaaaatattttctaggatccggtgcccaatctaaaagttctttgttgcacgctattaatcatccaaagtcaaggcctaatacatctctggaaatagaattcacacctagagacaatgaaaaagttccatatgatgaactaataaaggaattgacgactctatcacgtcatatatttatggcttctccagagaatgtaattctttctccgcctattaacgcacctataaagacttttatgttgcctaaacaagatatagtaggtctggatctggaaaatctatatgccgtaactaagactgacggcattcctataactatcagagttacatcaaacgggttgtattgttattttacacatcttgggtatattattagatatccagttaagagaataatagattccgaagtagtagtctttggtgaggcagttaaggataagaactggaccgtatatctcattaagctaatagagcctgtgaatgcaatcaatgatagactagaagaaagtaagtatgttgaatctaaactagtggatatttgtgatcggatagtattcaagtcaaagaaatatgaaggtccgtttactacaactagtgaagtcgtcgatatgttatctacatatttaccaaagcaaccagaaggtgttattctgttctattcaaagggacctaaatctaacattgattttaaaattaaaaaggaaaatactatagaccaaactgcaaatgtagtatttaggtacatgtccagtgaaccaattatctttggagaatcgtctatctttgtagagtataagaaatttagcaacgataaaggctttcctaaagaatatggttctggtaagattgtgttatataacggcgttaattatctaaataatatctattgtttggaatatattaatacacataatgaagtgggtattaagtccgtggttgtacctattaagtttatagcagaattcttagttaatggagaaatacttaaacctagaatcgataaaaccatgaaatatattaactcagaagattattatggaaatcaacataatatcatagtcgaacatttaagagatcaaagcatcaaaataggagatatctttaacgaggataaactatcggatgtgggacatcaatacgccaataatgataaatttagattaaatccagaagttagttattttacgaataaacgaactagaggaccgttgggaattttatcaaactacgtcaagactcttcttatttctatgtattgttccaaaacatttttagacgattccaacaaacgaaaggtattggcgattgattttggaaacggtgctgacctggaaaaatacttttatggagagattgcgttattggtagcgacggatccggatgctgatgctatagctagaggaaatgaaagatacaacaaattaaactctggaattaaaaccaagtactacaaatttgactacattcaggaaactattcgatccgatacatttgtctctagtgtcagagaagtattctattttggaaagtttaatatcatcgactggcagtttgctatccattattcttttcatccgagacattatgctaccgtcatgaataacttatccgaactaactgcttctggaggcaaggtattaatcactaccatggacggagacaaattatcaaaattaacagataaaaagacttttataattcataagaatttacctagtagcgaaaactatatgtctgtagaaaaaatagctgatgatagaatagtggtatataatccatcaacaatgtctactccaatgactgaatacattatcaaaaagaacgatatagtcagagtgtttaacgaatacggatttgttcttgtagataacgttgatttcgctacaattatagaacgaagtaaaaagtttattaatggcgcatctacaatggaagatagaccgtctacaaaaaactttttcgaactaaatagaggagccattaaatgtgaaggtttagatgtcgaagacttacttagttactatgttgtttatgtcttttctaagcggtaaataataatatggtatgggttctgatatccccgttctaaatgcattaaataattccaatagagcgatttttgttcctataggaccttccaactgtggatactctgtattgttaatagatatattaatacttttgtcgggtaacagaggttctacgtcttctaaaaataaaagtttgataacatctggcctgttcataaataaaaacttggcgattctatatatactcttattatcaaatctagccattgtcttatagatgtgagctactgtaggtgtaccatttgattttctttctaatactatatatttctctcgaagaagttcttgcacatcatctgggaataaaatactactgttgagtaaatcagttattttttttatatcgatattgatggacatttttatagttaaggataataagtatcccaaagtcgataacgacgataacgaagtatttatacttttaggaaatcacaatgactttatcagatcaaaattaacaaaattaaaggagcatgtatttttttctgaatatattgtgactccagatacatatggatctttatgcgtcgaattaaatgggtctagttttcagcacggtggtagatatatagaggtggaggaatttatagatgctggaagacaagttagatggtgttctacatccaatcatatatctgaagatatacccgaagatatacacactgataaatttgtcatttatgatatatacacttttgacgctttcaagaataaacgattggtattcgtacaggtacctccgtcgttaggagatgatagctatttgactaatccgttattgtctccgtattatcgtaattcagtagccagacaaatggtcaatgatatgatttttaatcaagattcatttttaaaatatttattagaacatctgattagaagccactatagagtttctaaacatataacaatagttagatacaaggataccgaagaattaaatctaacgagaatatgttataatagagataagtttaaggcgtttgtattcgcttggtttaacggcgtttcggaaaatgaaaaggtactagatacgtataaaaaggtatctaatttgatataatgaattcagtgactgtatcacacgcgccatatactattacttatcacgatgattgggaaccagtaatgagtcaattggtagagttttataacgaagtagccagttggctgctacgagacgagacgtcgcctattcctgataagttctttatacagttgaaacaaccgcttagaaataaacgagtatgtgtgtgcggtatagatccgtatccgaaagatggaactggtgtaccgttcgaatcaccaaattttacaaaaaaatcaattaaggagatagcttcatctatatctagattaaccggagtaattgattataaaggttataaccttaatataatagacggggttataccctggaattattacttaagttgtaaattaggagaaacaaaaagtcacgcgatctactgggataagatttccaagttactgctgcagcatataactaaacacgttagtgttctttattgtttgggtaaaacagatttctcgaatatacgggcaaagttagaatccccggtaactaccatagtgggatatcatccagcggctagagaccgtcaattcgagaaagatcgatcatttgaaattatcaacgttttactggaattagacaacaaggtacctataaattgggctcaagggtttatttattaatgctttagtgaaattttaacttgtgttctaaatggatgcggctattagaggtaatgatgttatctttgttcttaagactataggtgtcccgtcagcgtgcagacaaaatgaagatccaagatttgtagaagcatttaaatgcgacgagttagaaagatatattgagaataatccagaatgtacactattcgaaagtcttagggatgaggaagcatactctatagtcagaattttcatggatgtagatttagacgcgtgtctagacgaaatagattatttaacggctattcaagattttattatcgaggtgtcaaactgtgtagctagattcgcgtttacagaatgcggcgccattcatgaaaatgtaataaaatccatgagatctaatttttcattgactaagtctacaaatagagataaaacaagttttcatattatctttttagacacgtataccactatggatacattgatagctatgaaacgaacactattagaattaagtagatcatctgaaaatccactaacaagatcgatagacactgccgtatataggagaaaaacaactcttcgggttgtaggtactaggaaaaatccaaattgcgacactattcatgtaatgcaaccacctcatgataatatagaagattacctattcacttacgtggatatgaacaacaatagttattacttttctctacaacgacgattggaggatttagttcctgataagttatgggaaccagggtttatttcattcgaagacgctataaaaagagtttcaaaaatattcattaattctataataaactttaatgatctcgatgaaaataattttacaacggtaccactggtcatagattacgtaacaccttgtgcattatgtaaaaaacgatcgcataaacatccgcatcaactatcgttggaaaatggtgctattagaatttacaaaactggtaatccacatagttgtaaagttaaaattgttccgttggatggtaataaactgtttaatattgcacaaagaattttagacactaactctgttttattaaccgaacgaggagaccatatagtttggattaataattcatggaaatttaacagcgaagaacccttgataacaaaactaattttgtcaataagacatcaactacctaaggaatattcaagcgaattactctgtccaagaaaacgaaagactgtagaagctaacatacgagacatgttagtagattcagtggagaccgatacctatccggataaacttccgtttaaaaatggtgtattggacctggtagacggaatgttttactctggagatgatgctaaaaaatatatgtgtactgtatcaaccggatttaaatttgacgatacaaagttcgtcgaagacagtccagaaatggaagagttaatgaatatcattaacgatatccaaccattaacggatgaaaataagaaaaatagagagctatatgaaaaaacattatctagttgtttatgcggtgctaccaaaggatgtttaacattcttttttggagaaactgcaactggaaagtcgacaaccaaacgtttgttaaagtctgctatcggtgacctgtttgttgagacgggtcaaacaattttaacagatgtattggataaaggacctaatccatttatcgctaacatgcatttgaaaagatctgtattctgtagcgaactacctgattttgcatgtagtgggtcaaagaaaatcagatctgataatattaaaaagttgacagaaccttgtgtcattggaagaccgtgtttctccaataaaattaataatagaaaccatgcgacaatcattatcgatactaattacaaacctgtttttgataggatagataacgcattaatgagaagaattgccgtcgtgcgattcagaacacacttttctcaaccttctggtagagaggctgctgaaaataatgacgcgtacgataaagtcaaactattagacgaggggttagatggtaaaatacaaaataatagatatagattcgcatttctatacttgttggtgaaatggtacagaaaatatcatgttcctattatgaaactatatcctacacccgaagagattcctgactttgcattctatctcaaaataggtactctgttggtatctagctctgtaaagcatattccattaatgacggacctctccaaaaagggatatatattgtacgataatgtggtcactcttccgttgactactttccaacagaaaatatccaagtattttaattctagactatttggacacgatatagagagcttcatcaatagacataagaaatttgccaatgttagtgatgaatatctgcaatatatattcatagaggatatttcatctccgtaaatatatgctcatatatttatagaagatatcacatatctaaatgaataccggaattatagatttatttgataatcatgttgatagtataccaactatattacctcatcagttagctactctagattatctagttagaactatcatagatgagaacagaagcgtgttattgttccatattatgggatcaggtaaaacaataatcgctttgttgttcgccttggtagcttccagatttaaaaaggtttacattctagtgccgaacatcaacatcttaaaaattttcaattataatatgggtgtagctatgaacttgtttaatgacgaattcatagctgagaatatctttattcattccacaacaagtttttattctcttaattataacgataacgtcattaattataacggattatctcgctacaataactctatttttatcgttgatgaggcacataatatctttgggaataatactggagaacttatgaccgtgataaaaaataaaaacaagattccttttctactattgtctggatctcccattactaacacacctaatactctgggtcatattatagatttaatgtccgaagagacgatagattttggtgaaattattagtcgtggtaagaaagtaattcagacacttcttaacgaacgcggtgtgaatgtacttaaggatttgcttaaaggaagaatatcatattacgaaatgcctgataaagatctaccaacgataagatatcacggacgtaagtttctagatactagagtagtatattgtcacatgtctaaacttcaagagagagattatatgattactagacgacagctatgttatcatgaaatgtttgataaaaatatgtataacgtgtcaatggcagtattgggacaacttaatctgatgaataatttagatactttatttcaggaacaggataaggaattgtacccaaatctgaaaataaataatggcgtgttatacggagaagaattggtaacgttaaacattagttccaaatttaaatactttattaatcggatacagacactcaacggaaaacattttatatacttttctaattctacatatggcggattggtaattaaatatatcatgctcagtaatggatattctgaatataatggttctcagggaactaatccacatatgataaacggcaaaccaaaaacatttgctatcgttactagtaaaatgaaatcgtctttagaggatctattagatgtgtataattctcctgaaaacgatgatggtagtcaattgatgtttttgttttcatcaaacattatgtccgaatcctatactctaaaagaggtaaggcatatttggtttatgactatcccagatactttttctcaatacaaccaaattcttggacgatctattagaaaattctcttacgccgatatttctgaaccagttaatgtatatcttttagccgccgtatattccgatttcaatgacgaagtgacgtcattaaacgattacacacaggatgaattaattaatgttttaccatttgacatcaaaaagctgttatatctaaaatttaagacgaaagaaacgaatagaatatactctattcttcaagagatgtctgaaacgtattctcttccaccacatccatcaattgtaaaagttttattgggagaattggtcagacaatttttttataataattctcgtattaagtataacgataccaagttacttaaaatggttacatcagttataaaaaataaagaagacgctaggaattacatagatgatattgtaaacggtcacttctttgtatcgaataaagtatttgataaatctcttttatacaaatacgaaaacgatattattacagtaccgtttagactttcctacgaaccatttgtttggggagttaactttcgtaaagaatataacgtggtatcttctccataaaactgatgagatatataaagaaataaatgtcgagctttgttaccaatggataccttccagttacattggagccacacgagctgacgttagacataaaaactaatattaggaatgccgtatataagacgtatctccatagagaaattagtggtaaaatggccaagaaaatagaaattcgtgaagacgtggaattacctctcggcgaaatagttaataattctgtagttataaacgttccgtgtgtaataacctacgcgtattatcacgttggggatatagttagaggaacattaaacatcgaagatgaatcaaatgtaactattcaatgtggagatttaatctgtaaactaagtagagattcgggtactgtatcatttagcgattcaaagtactgcttttttcgaaatggtaatgcgtatgacaatggcagcgaagtcactgccgttctaatggaggctcaacaaggtatcgaatctagttttgtttttctcgcgaatatcgtcgactcataagaaagagaatagcggtaagtataaacacgaatactatggcaataattgcgaatgttttattcccttcgatatatttttgataatatgaaaaacatgtctctctcaaatcggacaaccatctcataaaatagttatctcgcgctggcgaggtggttgccgctcgtataatctccccagaataatatacttgcgtgtcgtcgttcaatttatacggatttctatagttctctgttatataatgcggttttccatcatgattagacgacgacaatagtgttctaaatttagatagttgatcagaatgaatgtttattggcgttggaaaaattatccatgctgcgtctgcagagtggttgatagttgttcctagatatgtaaaataatccaacgtactaggtagcaaattgtctagataaaatactgaatcaaacggcgcagacgtattagcggatctaatggaatccaattgattgactatcttttgaaaatatacatttttatgatccgatacttgtaagaatatagaaataatgataagtccatcatcgtgtttttttgcctcttcataagaactatattttttcttattccaatgaacaagattaatctctccagagtatttgtacacatctatcaagtgattggatccataatcgtcttcctttccccaatatatatgtagtgatgataacacatattcattggggagaaaccctccacttatatatcctcctttaaaattaatccttactagttttccagtgttctggatagtggttggtttcgactcattataatgtatgtctaacggcttcaatcgcgcgttagaaattgcttttttagtttctatattaataggagatagttgttgcggcatagtaaaaatgaaatgataactgtttaaaaatagctcttagtatgggaattacaatggatgaggaagtgatatttgaaactcctagagaattaatatctattaaacgaataaaagatattccaagatcaaaagacacgcatgtgtttgctgcgtgtataacaagtgacggatatccgttaataggagctagaagaacttcattcgcgttccaggcgatattatctcaacaaaattcagattctatctttagagtatccactaaactattacggtttatgtactacaatgaactaagagaaatctttagacggttgagaaaaggttctatcaacaatatcgatcctcactttgaagagttaatattattgggtggtaaactagataaaaaggaatctattaaagattgtttaagaagagaattaaaagaggaaagtgatgaacgtataacagtaaaagaatttggaaatgtaattctaaaacttacaacacgggataaattatttaataaagtatatataggttattgcatggcgtgttttattaatcaatcgttggaggatttatcgcatactagtatttacaatgtagaaattagaaagattaaatcattaaatgattgtattaacgacgataaatacgaatatctgtcttatatttataatatgctagttaatagtaaatgaacttttacagatctagtataattagtcagattattaagtataatagacgactagctaagtctattatttgcaaggatgactctcaaattattacactcacggcattcgttaaccaatgcctatggtgtcataaacgagtatccgtgtccgctattttattaactactgataacaaaatattagtatgtaacagacgagatagttttctctattctgaaataattagaactagaaacatgtttagaaagaaacgattatttctgaattattccaattatttgtccaaacaggaaagaagtatactatcgtcatttttttctctatatccagctactgctgataatgatagaatagacgctatttatccgggtggcatacccaaaaggggtgagaatgttccagagtgtctatccagggaaatcaaagaagaagttaatatagacaattcttttgtattcatagacactcggttttttattcatggtatcatagaagataccattatcaacaaattttttgaggtaattttctttgtcggaagaatatctctaacgagtgatcaaattattgatacctttaaaagtaatcatgaaatcaaggatctaatatttttagatccgaattcaggtaatggactccaatacgaaattgcaaaatatgctctagatactgcaaaacttaaatgttacggccatagaggatgttattatgaatcattaaaaaaattaactgaggatgattgattagaaaatataaattaatttaccatcgtgtatttttataacgggattgtccggcatatcatgtagatagttaccgtctacatcgtatactcgaccatctacgcctttaaatcctctatttattgacattaatctattagaattggaataccaaatattagtaccctcaattagtttattggtaatattttttttagacgatagatcgatggctcttgaaaccaaggttttccaaccggactcattgtcgatcggtgagaagtctttttcattagcatgaatccattctaatgatgtatgtttaaacactctaaacaattggacaaattcttttgatttgctttgaatgatttcaaataggtcttcgtctacagtaggcataccattagataatctagccattataaagtgcacgtttacatatctacgttctggaggagtaagaacgtgactattgagacgaatggctcttcctactatctgacgaagagacgcctcgttccatgtcatatctaaaatgaagatatcattaattgagaaaaaactaataccctcgcctccactagaagagaatacgcatgttttaatgcattctccgttagtgtttgattcttggttaaactcagccaccgccttgattctagtatcttttgttctagatgagaactctatattagagataccaaagactttgaaatatagtaataagatttctattcctgactgattaacaaatggttcaaagactagacatttaccatgggatgctaatattcccaaacatacatctataaatttgacgcttttctcttttaattcagtaaatagagagatatcagccgcactagcatcccctttcaatagttctccctttttaaaggtatttaatgcggatttagaaaactctctatctcttaatgaatttttaaaatcattatatagtgttgctatctcttgcgcgtattcgccgggatcacgattttgtctttcaggaaagctatcgaacgtaaacgtagtagccatacgtctcagaattctaaatgatgatataccagtttttatttctgcgagtttagccttttgataaatctcttcttgcttttttgacatattaacgtatcgcattaatactgttttcttagcgaatgatgcagacccttctacgttatcaaaaatagaaaactcgttattaactatgtacgaacataggcctcctagtttggagactaattctttttcatcgactagacgtttattctcaaatagtgattggtgttgtaaggatcctggtcgtagtaagttaaccaacatggtgaattcttgcacactattgacgataggtgtagccgataaacaaatcatcttatggttttttaatgcgatggtcttggataaaaaattatatactgaacgagtaggacggatcttaccatcttctttgattaatgatttagaaatgaagttatgacattcatcaataatgacgcatattctactcttggaattaatagttttgatattagtaaaaaatttatttctaaaattttgatcatcgtaattaataaaaatacaatccttcgttatctctggagcgtatctgagtatagtgttcatccaaggatcttctatcaaagcctttttcaccaataagataatagcccaattcgtataaatatccttaagatgtttgagaatatatacagtagtcattgttttaccgacacccgtttcatggaacaataaaagagaatgcatactgtctaatcctaagaaaactcttgctacaaaatgttgataatccttgaggcgtactacgtccgaccccatcatttcaacgggcatattagtagttctgcgtaaggcataatcgatataggccgcgtgtgatttactcatttatgagtgataagtaataactatgttttaaaaatcacagcagtagtttaactagtcttctctgatgtttgttttcgatactttttgaatcagaagtcatactagaataaagcaacgagtgaacgtaatagagagcttcgtatactctattcgaaaactctaagaacttattaatgaattccgtatccactggattgtttaaaatactaaattgaacactgttcacatccttccaagaagaagacttagtgacggacttaacatgagacataaataaatccaaattttttttacaaacatcactagccaccataatggcgctatctttcaaccagctatcgcttacgcattttagcagtctaacatttttaaagagactacaatatattctcatagtatcgattacacctctaccgaataaagttggaagtttaataatacaatatttttcgtttacaaaatcaaataatggtcgaaacacgtcgaaggttaacatcttataatcgctaatgtatagattgttttcagtgagatgattattagatttaatagcatctcgttcacgtttgaacagtttattgcgtgcgctgaggtcggcaactacggcgtccgctttagtactcctcccataatactttacgctattaatctttaaaatttcatagactttatctagatcgctttctggtaacatgatatcatgtgtaaaaagttttaacatgtcggtcggcattctatttagatcattaactctagaaatctgaagaaagtaattagctccgtattccagactaggtaatgggcttttacctagagacagattaagttctggcaatgtttcataaaatggaagaaggacatgcgttccctcccggatattttttacaatttcatccatttacaactctatagtttgttttcattattattagttattatctcccataatcttggtaatacttaccccttgatcgtaagataccttatacaggtcattacatacaactaccaattgtttttgtacataatagattggatggttgacatccatggtggaataaactactcgaacagatagtttatctttccccctagatacattggccgtaatagttgtcggcctaaagaatatctttggtgtaaagttaaaagttagggttcttgttccattattgctttttgtcagtagttcattataaattctcgagatgggtccgttctctgaatatagaacatcatttccaaatctaacttctagtctagaaataatatcggtcttattcttaaaatctattcccttgatgaagggatcgttaatgaacaaatccttggcctttgattcggctgatctattatctccgttatagacgttacgttgactagtccaaagacttacaggaatagatgtatcgatgatgttgatactatgtgatatgtgagcaaagattgttctcttagtggcatcactatatgttccagtaatggcggaaaactttttagaaatgttatatataaaagaattttttcgtgttccaaacattagcagattagtatgaagataaacactcatattatcaggaacattatcaatttttacatacacatcagcatcttgaatagaaacgataccatcttctggaacctcaacaatctcggcagactccggataaccagtcggtggaccatcgctaacaataactagatcatccaacaatctactcacatatgcatctatataatctttttcatcttgtgagtaccctggatacgaaataaatttattatccgtatttccataataaggtttagtataaacagagagcgatgttgccgcatgaacttcagttacagtcgccgttggttggtttatttgacctattactctcctaggtttctctataaacgatggtttaatttgtacattcttaaccatatatccaataaagctcaattcaggaacataaacaaattctttgttgaacgtttcaaagtcgaacgaagagtcacgaataacgatatcggatactggattgaaggttaccgttacggtaatttttgaatcggatagtttaagactgctgaatgtatcttccacatcaaacggagttttaatataaacgtatactgtagatggttctttaatagtgtcattaggagttaggccaatagaaatatcattaagttcactagaatatccagagtgtttcaaagcaattgtattattgatacaattattatataattcttcgccctcaatttcccaaataacaccgttacacgaagagatagatacgtgattaatacatttatatccaacatatggtacgtaaccgaatcttcccatacctttaacttctggaagttccaaactcagaaccaaatgattaagcgcagtaatatactgatccctaatttcgaagctagcgatagcctgattgtctggaccatcgtttgtcataactccggatagagaaatatattgcggcatatataaagttggaatttgactatcgactgcgaagacattagaccgtttaatagagtcatccccaccgatcaaagaattaatgatagtattattcattttctatttaaaatggaaaaagcttacaataaactccgtagagaaatatctataatttgtgagttttccttaaagtaacagcttccgtaaacgccgtctttatctcttagtaagtttattgtatttataaccttttccttatcttcatagaatactaaaggcaacaaagaaatttttggttcttctctaagagctacgtgagacttaaccatagaagccaacgaatccctacatattttagaacagaaataccctacttcaccacccttgtatgtctcaatactaataggtctaaaaaccaaatcttgattacaaaaccaacacttatcaattacactatttgtcttaatagacacatctgccatagatttataatactttggtagtatacaagcgagtgcttcttctttagcgggcttaaagactgctttaggtgctgaaataaccacatctggaaggcttactcgcttagccatttaattacggaactatttttttatacttctaatgagcaagtagaaaacctctcatctacaaaaacatactcgtgtccataatcctctaccatagttacacgttttttagatctcatatgtgctaaaaagttttcccatactaattggttactattatttttcgtataatttttaacagtttgaggttttagatttttagttacagaagtgatatcgaatattttatccaaaaagaatgaataattaattgtcttagaaggagtgttttcttggcaaaagaataccaagtgcttaaatatttctactacttcattaatcttttctgtactcagattcagtttctcatcttttacttgattgattatttcaaagactaacttataatcctttttatttattctctcgttagccttaagaaaactagatacaaaatttgcatctacatcatccgtggatatttgatttttttccatgatatccaagagttccgagataatttctccagaacattgatgagacaataatctccgcaatacatttctcaaatgaataagtttattagacacgtggaagtttgactttttttgtacctttgtacatttttgaaataccgactcgcaaaaaatacaatattcatatccttgttcagatactataccgttgtgtctacaaccgctacataatcgtagattcatgttaacactctacgtatctcgtcgtccaatattttatataaaaacattttatttctagacgttgccagaaaatcctgtaatacttttagttttttgggctgtgaataaagtatcgccctaatatggttaccgtcctccgccaatatagtagttaaattatccgcacatgcaaaagaacaccgcttaggcggattcagtacaatgttatatttttcgtaccaactcatttaaatatcataatctaaaatagttctgtaatatgtctagcgctaatatattgatcataatcctgtgcataaattaagatacaacaatgtctcgaaatcatcgacatggcttcttccatagttagaagatcgtcgtcaaagttagcaacgtgattcatcaacatttgctgttttgaggcagcaaatactgaaccgtcgccattcaaccattcataaaaaccatcgtctgaatccattgataatttcttgtactggtttttgagagctcgcatcaatctagcatttctagctcccggattgaaaacagaaagaggatcgtacatccagggtccattttctgtaaatagaatcgtataatgtcccttcaagaagatatcagacgatccacaatcaaagaattggtctccgagtttgtaacaaactgcggactttaacctatacatgataccgtttagcataatttctggtgatacgtcaatcggagtatcatctattagagatctaaagccggtgtaacattctccaccaaacatattcttattctgacgtcgttctacataaaacatcattgctccattaacgataacaggggaatgaacagcactacccatcacattagttcccaatggatcaatgtgtgtaactccagaacatcttccatagcctatgttaggaggagcgaacaccactcttccactattgccatcgaatgccatagaataaatatccttggaattgatagaaatcggactgtcggatgttgtgatcatcttcataggattaacaacgatgtatggtgccgcctgaagtttcatatcgtaactgatgccgttcataggtctagccacagaaaccaacgtaggtctaaatccaactatagacaaaatagaagccaatatctgttcctcatctgtcataacttgagagcatccagtatgaataatcttcattagatggggatctaccgcatcatcatcgttacaataaaaaattcccattctaatgttcataattgcttttctaatcatggtatgcatgtttgctctctgaatctctgtggaaattagatctgatacacctgtaatcactatcggattatcctccgtaagacgattaaccaacaacatataattataagactttacttttctaaattcataaagttgctggattaggctataggtgtctccatgtacatacgcgttctcgagcgcaggaagtttaataccgaatagtgccatcagaataggatgaatatagtaattagtttctggttttctataaataaaagacaaatcttgtgaactagacatatcggtaaaatgcatggattggaatcgtgtagtcgacagaagaatatgatgattagatggagagtatattttatctaactctttgagttggtcaccgattctaggactagctcgagaatgaataagtactaaaggatgagtacatttcacagaaacactagcattgttcaatgtgctctttacatgggtaaggagttgaaatagctcgtttctatttgttctgacaatatttagtttattcataatgttaagcatatcctgaatagtaaagttagatgtgtcatacttgttagtagttagatatttagcaattgcattcccatcatttctcaatctcgtactccaatcatgcgtggatgctacttcgtcgatggaaaccatacaatcctttttgataggctgttgagattgattatttcctgcacgtttaggtttggtacgttgatttctagcccctgcggatataaagtcatcgtctacaatttgggacaatgaattgcatacactacaagacaaagatttatcagaagtgtgaatatgatcttcatctaccaaagaaagagtttgattagtataactagattttagtcctgcgttagatgttaaaaaaacatcgctattgaccacggcttccattatttatattcgtagtttttactcgaaagcgtgattttaatatccaatcttattacttttggaatcgttcaaaacctttgactagttgtagaatttgatctattgccctacgcgtatactcccttgcatcatatacgttcgtcaccagatcgtttgtttcggcctgaagttggtgcatatctttttcaacactcgacatgagatccttaagggccatatcgtctagattttgttgagatgctgctcctggatttggattttgttgtgctgttgtacatactgtaccaccagtaggtgtaggagtacatacagtggccacaataggaggttgaggaggtgtaaccgttggagtagtacaagaaatatttccatccgattgttgtgtacatgtagttgttggtaacgtctgagaaggttgggtagatggcggtgtcgtcgtcttttgatctttattaaatttagagataatatcctgaacagcattgctcggcgtcaacgctggaaggagtgaactcgccggcgcatcagtatctgcagacagccaatcaaaaagattagacatatcagatgatgtattagtttgttgtcgtggttttggtgtaggagcagtactactaggtagaagaataggagccgatgtaggtgtcggaaccggctgtggagttatatgaatagttggttgtagcggttggataggctgtctgctggcggccatcatattatctctagctagttgttctcgcaactgtctttgataatacgactcttgagactttagtcctatttcaatcgcttcatcctttttcgtatccggatccttttcttcagaataatagattgacgactttggtgtagaggattctgccagcccctgtgagaacttgttaaagaagtccatttaaggctttaaaattgaattgcgattataagattaaatggcagacacagacgatattatcgactatgaatccgatgatctcactgaatacgaggatgatgaagaagaggaagaagatggagagtcactagaaactagtgatatagatcccaaatcttcttataagattgtagaatcagcatccactcatatagaagatgcgcattccaatcttaaacatatagggaatcatatatctgctcttaaacgacgctatactagacgtataagtctatttgaaatagcgggtataatagcagaaagctataacttgcttcaacgaggaagattacctctagtttcagaattttctgacgaaacgatgaagcaaaatatgctacatgtaattatacaagagatagaggagggttcttgtcctatagtcatcgaaaagaacggagaattgttgtcggtaaacgattttgacaaagatggtctaaaattccatctagactatattatcaaaatttggaaacttcaaaaacgatattagaatttatacgaatatcgttctctaaatgtcacaatcaagtctcgcatgttcagcaatttattgtcgtactttatatcgtgttcattaacgatatcttgcaaaatagtaatgattctatcttccttcgatagatattcttcagagattattgtcttatattctttcttgttatcagatatgaatttgataagactttgaacattattgatacccgtctgtttaattttttctacagatattttagttttggcagattctatcgtatctgtcaatagacatccaacatcgacattcgacgtcaattgtctataaatcaacgtataaattttagaaataacattagcgaattgttgtgcattgatgtcgttattctgaaacagtatgattttaggtagcattttcttaacaaagagaacgtatttattgttactcagttgaacagatgatatatccagattactaacgcatctgattccgtataccaaactttcagaagaaatggtatacaattgtttgtattcattcaatgtctctttttcagaaattagtttagagtcgaatactgcaataattttcaagagatagttttcatcagataagattttatttagtgtagatatgataaaactattgttttgttggagaacttgatacgccgcgttctctgtagtcgacgctctcaaatgggaaacgatctccattatttttttggaatcggatactatatcttcggtatcttgacgcagtctagtatacatagagttaagagagattagagtttgtacattaagcaacatgtctctaaatgtggctacaaacttttccttttccacatcatctagtttattatataccgatttcacaacggcaccagatttaaggaaccagaatgaaaaactctgataactacaatatttcatcatagttacgattttatcatcttctatagttggtgtaatagcgcatacctttttctccaagactggaaccaacgtcataaaaatgtttaaatcaaaatccatatcaacatctgatgcgctaagaccagtctcgcgttcaagattatctttactaatggtgacgaactcatcgtatagaactctaagtttgtccattatttatttacagatttagttgtttaatttatttgtgctcttccagagttgggatagtatttttctaacgtcggtattatattattaggatctacgttcatatgtatcataatattaatcatccacgttttgataaatctatctttagcttctgaaataacgtatttaaacaaaggagaaaaatatttagctacggcatcagacgcaataacattttttgtaaatgtaacgtatttagacgacagatcttcgttaaaaagttttccatctatgtagaatccatcagttgttaacaccattcccgcgtcagattgaataggagtttgaatagtttgttttggaaatagatccttcaataacttatagttgggtgggaaaaaatcgattttatcactagactctttcttttttactatcattacctcatgaactatttcttgaatgagtatatgtattttctttcctatatcggacgcgttcattggaaaatataccatgtcgttaactataagaatatttttatcctcgtttacaaactgaataatatcagatgtagttcgtaaacgaactatatcatcaccagcacaacatctaactatatgatatccactagtttcctttagtcgtttattatcttgttccatattagcagtcattccatcatttaagaaggcgtcaaagataatagggagaaatgacattttggattctgttacaactttaccaaaattaaggatatacggacttactatctttttctcaacgtcaatttgatgaacacacgatgaaaatgtacttcgatgagattgatcatgtagaaaacaacaagggatacaatatttccgcatatcatgaaatatattaagaaatcccaccttattatatttccccaaaggatccatgcacgtaaacattatgccgttatcattaataaagacttctttctcatcggatctgtaaaagttgttactgatttttttcattccaggatctagataattaataatgatgggttttctattcttattctttgtattttggcatatcctagaccagtaaacagtttccactttggtaaaatcagcagacttttgaacgctattaaacatggcattaatggcaataactaaaaatgtaaaatatttttctatgttaggaatatggtttttcactttaatagatatatggtttttggccaaaatgatagatatttttttatccgaggatagtaaaatattattagtcgccgtctctataaaaatgaagctagtctcgatatccaattttattctagaattgataggagtcgccaaatgtaccttatacgttatatctcccttgatgcgttccatttgtgtatctatatcggacacaagatctgtaaatagttttacgttattaatcatcacggtatcgccgtcgctagataatgctaatgtaccatccaagtcccaaatggagagatttaactgttcatcgtttagaataaaatgattaccggtcatattaataaagtgttcatcgtatctagataacaacgacttataattaatgtccaagtcttgaactcgctgaatgatcttttttaacccagttagttttagattggtacgaaatatattgttaaactttgattctacagtaatgtccaaatctagttgtggaaatacttccatcaacattgtttcaaacttgataatattattatctacatcttcatacgatccaaattccggaatagatgtatcacatgctcttgccacccagataaccaaaaagtcacacgctccaggatatacattgtataaaaagctatcgtttttaagtagggtttttttctgcgtgtatacgaagggattaaaaatagtattatcaacgtaactatattccaaattattcttatgagaatagataataatatcgtccttaatatctaacaaatttcctaaatatccctttaattgagtcattcgaagcgtcaatagaatatgtctcttaactatttccggctgttgtatatttaaatgacttcgtaaaaaataatatatgggcgacttctcatctatgtaatcatatggagtgagatatagggctcgttctacctcctgccccttacccacctgtaataccaattgcggacttactatatatcgcatatttatatcgtggggtaaagtgaaaatctactaccgatgatgtaagtcttacaatgttcgaaccagtaccagatcttaatttggaggcctccgtagaactaggggaggtaaatatagatcaaacaacacctatgataaaggaaaatagcggttttatatcccgtagtagacgtctattcgcccatagatctaaggatgatgagagaaaactagcactacgattctttttacaaagactttattttttagatcatagagagattcattatttgttcagatgcgttgacgctgtaaaagacgtcactattaccaaaaaaaataacattatcgtggcgccttatatagcacttttaactatcgcatcaaaaggatgcaaacttacagaaacaatgattgaagcattctttccagaactatataatgaacatagtaagaaatttaaattcaactctcaagtatccatcatccaagaaaaactcggataccagtttggaaactatcacgtttatgattttgaaccgtattactctacagtagctctggctattcgagatgaacattcatctggcatttttaatatccgtcaagagagttatctggtaagttcattatctgaaataacatatagattttatctaattaatctaaaatctgatcttgttcaatggagtgctagtacgggcgctgtaattaatcaaatggtaaatactgtattgattacagtgtatgaaaagttacaactggtcatagaaaatgattcacaatttacatgttcattggctgtggaatcagaacttccaataaaattacttaaagatagaaatgaattatttacaaaattcatcaacgagttaaaaaagaccagttcattcaagataagcaaacgcgataaggatacgctactaaaatattttacttaggactggagttagaatttatagacgactcatttcgtttatcattattactaccatcattattagtattcttcttgttatcttgttcagaaatatacagcaatgctatgcctaatactaaatacattatcatgcttgcaatggctctaacaacgacgaaccaaaatgaatttggtcgtagcttttgttcacaaaaatacataaagaaatgtctacataaatctatggcgccattggctacttgaaatagcgccagtcctcctacagattttaatatagctgtataacatgacatttattcatcatcaaaagagacagagtcaccatctgtcatatttagattttttttcatgtgttcaaagtatcctctactcatttcattataatagtttatcatacttagaattttaggacggatcaatgagtaagacttgactagatcgtcagtagtaatttgtgcatcgtctattctgcatccgcttcgtcgaataatgtatagcatcgctttgagattctccatagctatcaagtctttatacaatgacatggaaatatctgtgaatactttatacttctccaacatcgatgccttaacatcatcgcctactttagcattgaaaatacgttctattgtgtagatggatgtagcaagatttttaaacaacaatgccatcttacacgatgattgcctcaagtctccaatcgtttgtttagaacgattagctacagagttcaacgcttggctgactagcatattattatctttagaaattgtattcttcaatgaagcgtttatcatatctgtgatttcgttagtcatattacagtctgactgggttgtaatgttatccaacatatcacctatggatacggtacacgtaccagcatttgtaataatcctatctaagatgttgtatggcattgcgcagaaaatatcttctcctgtaatatctccactctcgataaatctactcagattattcttaaatgccttattctctggagaaaagatatcagtgtccatcatttcattaatagtatacgcagaaaagataccacgagtatcaattctatccaagatacttatcggttccgagtcacagataatggtttcctctccttcgggagatcctgcatagaaatatctaggacaatagtttctatactgtctgtaactctgataatctctaaagtcactaactgataccatgaaattgagaagatcaaacgctgaagtaatcaatttttctgcctcgtttttactacaactagttttcatcaatgtagtgacgatgtattgtttagttactcttggtctaatactgatgatagagatattattacttcccataatggatcttctagtagtcaccttaaagcccattgatgcaaatagcagatagataaagtcttggtatgactcctttctaatatagtacggactacctttgtcacccaactttatacccacataagccataacaacctctttaatagccgtttcatgaggtttatcagccatgagcctgagtagttggaagaatctcatgaatcccgtctcagaaagtcctatatgcatgatagatttatctttcctgggaaactctcgtatagtcatagatgaaatactcttcaaagtttctgaaataagattagtaacagtcttacctccgactactctgggtaacaaacatactctaataggtgttttctctgcggagataatatcagaaaggatagagcaataagtagtattattgtgattataaagaccgaatacataacaggtagaatttataaacatcatgtcctgaaggtttttagacttgtattcctcgtaatccataccgtcccaaaacatggatttggtaactttgatagccgtagatctttgttccttcgccaacaggttaaagaaattaataaagaatttgttgtttctatttatgtccacaaattgcacgtttggaagcgtaactgttacgttcactgcagcattttgaggatcgcgagtatgaagtacgatgttattgtttactggtatatctggaaagaaatctaccagtctaggaataagagattgatatcgcatagaaatagtaaagtttataatctcatcatcgaagagcattttgttaccattgtaataaatatccactctgtcatatgtataaatgaagtactgttcaaacatgatgagatgtttatatgttggcatagtagtgagatcgacgtttggtaatggcaatgtattaagattaactccataatgtctagcagcatctgcgatgttataagtgtcgtcaaagcggggtcgatcttgtgctgttatatattgtctaacacctataagattatcaaaatcttgtctgcttaatacaccgttaacaatttttgccttgaattcttttattggtgcattaataacatccttatagaggatgttaaacaaataagtgttatcaaagttaagatctggatatttcttttctgctagaacatccattgagtcggagccatctggtttaatataaccaccgataaatctagctctgtattctgtatccgtcaatctaatattaagaaggtgttgagtgaaaggtggaagatcgtaaaagctgtgagtattaatgataggattagtttccgaactaatgttaattggggtattaataatatctatatttccagcgttaagtgtaacattaaacagttttaattcacgtgacgtggtatcaattaaataattaatgcccaatttggatatagcagcctgaagctcatcttgtttagttacggatcctaatgagttattaagcaatatatcgaacggatgaacgaaggttgttttaagttggtcacatactttgtaatctagacatagatgcggaagaacggtagaaactatacgaaataaatattcagagtcctctaattgatcaagagtaactattgacttaataggcatcatttatttagtattaaatgacgaccgtaccagtgacggatatacaaaacgatttaattacagagttttcagaagataattatccatctaacaaaaattatgaaataactcttcgtcaaatgtctattctaactcacgttaacaacgtggtagatagagaacataatgccgccgtagtgtcatctccagaggaaatatcctcacaacttaatgaagatctatttccagatgatgattcaccggccactattatcgaacgagtacaacctcatactactattattgacgatactccacctcctacttttcgtagagagttattaatatcggaacaacgtcaacaacgagaaaaaagatttaatattacagtatcgaaaaatgctgaagcaataatggaatctagatctatgataacttctatgccaacacaaacaccatccttgggagtagtttatgataaagataaaagaattcagatgttagaggatgaagtggttaatcttagaaatcaacgatctaatacaaaatcatctgataatttagataattttaccaaaatactatttggtaagactccgtataaatcaacagaagttaataagcgtatagccatcgttaattatgcaaatttgaacgggtcccccttatcagttgaggacttggatgtttgttcggaggatgaaatagatagaatctataaaacgattaaacaatatcacgaaagtagaaaacgaaaaattatcgtcactaacgtgattattattgtcataaacattatcgagcaggcattgctaaaactcggatttgaagaaatcaaaggactgagtaccgatatcacttcagaaattatcgatgtggagatcggagatgactgcgatgctgtagcatctaaactaggaatcggtaacagtccggttcttaatattgtattgtttatactcaagatattcgttaaacgaattaaaattatttaatttaatacattcccatatccagacaacaatcgtctggattaatctgttcctgtcgtctcataccggacgacatattaatctttttattagtaggcatctttttagatggtttctttttcccagcattaactgagtcgatacctagaagatcgtgattgatctctccgaccattccacgaacttctaattggccgtctctgacggtaccataaactattttaccagcattagtaacagcttggacaatctgaccatccattgcgttgaatgatgtagttgctgttgttctacgtttaggagcaccagaagtatttttggagcccttggaggctgatgtagaagaagacgaggattttgatttacatgtaatacattttgtactctttgattttgtatcacatgcgccggcagtcacatttgtttgagaattaagattattgttgcctcctttgacggctgcatctccaccgatttgcgctagtagatttttaagctgtggtgtaatcttattaactgtttcgatataatcatcgtaactgcttctaacggctaaattttttttatccgccatttagaagctaaaaatatttttatttatgcagaagatttaactagattatacaatgaactaatatgatccttttccagattatttacaaacttggtattttttggttctggaggaggcgaatttaaattcggacttggattcggattttgtgagttcttgatcttattatacatcgagtataggatggcgacggtaactgctacgcaaataccgatcaacaaaagaataccaatcatttattgacaataacttcactattgatcaagtatgcaatatatcatcttttcactaaataagtagtaataatgattcaacaatgtcgagatatatggacgataataatttagttcatggaaatatcgctatgattggtatgaatgactccgctaactctgtggggtgcgcagtgctttccccacatagaataaattagcattccgactgtgataataataccaagtataaacgccataatactcaatactttccatgtacgagtgggactggtagacttactaaagtcaataaaggcgaagatacacgaaagaatcaaaagaatgattccagcgattagcacgccggaaaaataatttccaatcataagcatcatgtccatttaactaataaaaattttaaatcgccgaatgaacaaagtggaatataaaccatataaaaacaatagtttgtactgcaaaaataatatctatttttgttttcgaagatatggtaaaattaaatagtagtacacagcatgttataactaacagcagcaacggctcgtaattacttatcatttactagacgaaaaggtggtgggatattttcttgctcaaataatacgaatatatcacccatccattttatgcgatgtttatatactctaatctttaatagatctatagacgacgggtttaccaacaatatagattttatcgattcatctaatttaaacccttccttaaacgtgaatgatctattatctggcataacgatgactctacctgatgaatcggacaatgtactgggccatgtagaataaattatcaacgaattatcgtctacgaacatttatatcatttgttttaattttaggacgcgaataaatggatataaaatagaaaataacagatattacaaccaatgttatggccgcgcccaaccaggtaggcagttttattttatcttttactacaggttctcctggatgtacgtcaccaacggcggacgtagttctagtacaattagacgtaagttctgcttgggaattttttaacgctaaagagttaacgttaatcgtgcacccaacgtatttacatctagttctttgaacatcttgattataatataaccattttctatctctagattcgtcggtgcactcatgtaaccaacataccctaggtcctaaatatttatctccggaattagattttggataattcgcgcaccaacaatttctatttcctttatgatcgttacaaaagacgtataatgccgtatccccaaaagtaaaataatcaggacgaataattctaataaactcagaacaatatctcgcatccatatgtttggagcaaatatcggaataagtagacatagccggtttccgttttgcacgtaaccattctaaacaattggggtttccaggatcgtttctacaaaatccagtcatgaaatcatcacaatgttctgtcttgtaattattattaaatatttttggacagtgtttggtatttgtcttagaacaacattttgccacgctatcactatcgcccaggagataatccttttttataaaatgacatcgttgcccggatgctatataatcagtggcgtgttttaaatccttaatatattcaggagttacctcgttctgataatagattaatgatccaggacgaaatttgaaagaactacatggttctccatgaattaatacatattgtttagcaaattcaggaactataaaactactacaatgatctatcgacataccatctatcaaacaaaacttgggtttaatttctcccggagatgtttcataatagtacgtataactttcttctgcaaacttaacagctctattatattcaggataattaaaacctaattccatatatttgtctcgtatatctgctattcctggtgctattttaattctattaagagtaacggctgcccccattcttaataatcgtcagtatttaaactgttaaatgttggtatatcaacatctaccttatttcccgcagtataaggtttgttgcaggtatactgttcaggaatggttacatttatacttcttctatagtcctgtctttcgatgttcatcacatatgcaaagaacagaataaacaaaataatgtaagaaataatattaaatatctgtgaattcgtaaatacattgattgccataataattacagcagctacaatacatacaatagacattcccacagtgttgccattacctccacgatacatttgagttactaagcaataggtaataactaagctagtaagaggcaatagaaaagatgagataaatatcatcaatatagagattagaggagggctatatagagccaagacgaacaaaatcaaaccgagtaacgttctaacatcattatttttgaagattcccaaataatcattcattcctccataatcgttttgcattatacctccatctttaggcataaacgattgctgctgttcctctgtaaataaatctttatcaagcactccagcacccgcagagaagtcgtcaagcatattgtaatatcttaaataactcatttatatattaaaaaatgtcactattaaagatggagtataatctttatgccgaactaaaaaaaatgacttgtggtcaacccctaagtctttttaacgaagacggggatttcgtagaagttgaaccgggatcatcctttaagtttctgatacctaagggattttacgcctctccttccgtaaagacgagtctagtattcgagacattaacaacgaccgataataaaatcactagtatcaatccaacaaatgcgccaaagttatatcctcttcaacgcaaagtcgtatctgaagtagtttctaatatgaggaaaatgatcgaatcaaaacgtcctctatacattactcttcacttggcgtgtggatttggtaagactattaccacgtgttatcttatggctacacacggtagaaaaaccgtcatttgcgtacccaataaaatgttaatacatcaatggaagacacaggtagaggcagtcggattggaacataagatatctatagatggagtaagtagtctattaaaggaactaaagactcaaagtccggatgtattaatagtagtcagtagacatctgacaaacgatgccttttgtaaatatatcaataagcattatgatttgttcatcttggatgaatcacatacgtataatctgatgaacaatacagcagttacaagatttttagcgtattatcctccgatgatgtgttattttttaactgctacacctagaccagctaaccgaatttattgtaacagtattattaatattgccaagttatccgatctaaaaaaaactatctatgcggtagatagtttttttgagccatattccacagacaatattagacatatggtaaaacgactagatggaccatctaataaatatcatatatatactgagaagttattatctgtagacgagcctagaaatcaacttattcttgataccctggtagaagaattcaagtcaggaactattaatcgaattttagttattactaaactacgtgaacatatggtattcttctacaaacgattattagattttttcggatcagaggttgtatttataggagacgcccaaaatagacgtactccagatatggtcaaatcaatcaaggaactaaatagatttatattcgtatccaccttattttattccggtactggtttagatattcctagtttggattcgttgttcatttgctcggcagtaatcaacaatatgcaaatagagcaattactagggagggtatgtcgagaaacagaactattagataggacggtatatgtatttcctaacacatccatcaaagaaataaagtacatgataggaaatttcatgcaacgaattattagtctgtctgtagataaactaggatttaaacaaaaaagttatcggaaacatcaagaatccgatcccacttctgtatgtacaacatcctccagagaagaacgtgtattaaatagaatatttaactcgcaaaatcgttaagaagtttaagcgacgatccgcatgctgcgcaggccagtgtattacccctcatagtattaatataatccaatgatacttttgtgatgtcggaaatcttaaccaatttagactgacaggcagaacacgtcatgcaatcatcatcgtcatcgataactgtagtcttgggcttctttttgcggctcttcattccggaacgcacattggtgctatccatttaggtagtaaaaaataagtcagaatatgccctatagcacgatcgtgcaaaacctggtatatcgtctctatctttatcacaatatagtgtatcgacatttttattattattgacctcgtttatcttggaacatggaatgggaacatttttgttatcaacggccatctttgccttaattccagatgttgtaaaattataactaaacagtctatcatcgacacaaatgaaattcttgtttagacgtttgtagtttacgtatgcggctcgttcgcgtctcattttttcagatattgcaggtactataatattaaaaataagaatgaaataacataggattaaaaataaagttatcatgacttctagcgctgatttaactaacttaaaagaattacttagtctgtacaaaagtttgaaattttcagattctgcggctatagaaaagtataattctttggtagaatggggaacatctacttactggaaaataggcgtgcaaaaggtagctaatgtcgagacgtcaatatctgattattatgatgaggtaaaaaataaaccgtttaatattgatccgggatattacattttcttaccggtatattttggaagcgtctttatttattcgaagggtaaaaatatggtagaacttggatctggaaactcttttcaaataccagatgatatgcgaagtgcgtgtaacaaagtattagacagcgataacggaatagactttctgagatttgttttgttaaacaatagatggataatggaagatgctatatcaaaatatcagtctccagttaatatatttaaactagctagtgagtacggattaaacatacccaaatatttagaaattgaaatagaggaagacacattatttgacgacgagttatactctattatagaacgctctttcgatgataaatttccaaaaatatccatatcgtatattaagttgggagaacttagacggcaagttgtagactttttcaaattctcgttcatgtatattgagtccatcaaggtagatcgtataggagataatatttttattcctagcgttataacaaaatcaggaaaaaagatattagtaaaagatgtagaccatttaatacgatccaaggttagagaacatacatttgtaaaagtaaaaaagaaaaacacattttccattttatacgactatgatggaaacggaacagaaactagaggagaagtaataaaacgaattatagacactataggacgagactattatgttaacggaaagtatttctctaaggttggtagtgcaggcttaaagcaattgactaataaattagatattaatgagtgcgcaactgtcgatgagttagttgatgagattaataaatccggaactgtaaaacgaaaaataaaaaaccaatcagcatttgatttaagcagagaatgtttgggatatccagaagcggattttataacgttagttaataacatgcggttcaaaatagaaaattgtaaggttgtaaatttcaatattgaaaatactaattgtttaaataacccgagtattgaaactatatatggaaactttaaccagttcgtctcaatctttaatatcgtcaccgatgtcaaaaaaagattattcgagtgaaataatatgcgcctttgatataggtgcaaaaaatcctgccagaactgttttagaagtcaaggataactccgttagggtattggatatatcaaaattagactggagttctgattgggaaaggcgcatagctaaagatttgtcacaatatgaatacactacagttcttctagaacgtcagcctagaaggtcgccgtacgtcaaatttatctattttattaaaggctttttatatcatacatcggctgccaaagttatttgcgtctcgcctgtcatgtctggtaattcatatagagatcgaaaaaagagatcggtcgaagcatttcttgattggatggacacattcggattgcgagactccgttccggatagacgcaaattagacgatgtagcggatagtttcaatttggctatgagatacgtattagataaatggaatactaattatacaccttataataggtgtaaatctagaaattacataaaaaaaatgtaataacgttagtaacgccattatggataatctatttacctttctacatgaaatagaagatagatatgccagaactatttttaactttcatctaataagttgcgatgaaataggagatatatatggtcttatgaaagaacgcatttcctcagaggatatgtttgataatatagtgtataataaagatatacatcatgccattaagaaactagtgtattgcgacatccaacttactaaacacattattaatcagaatacgtatccggtatttaacgattcttcacaagtgaaatgttgtcattatttcgacataaactcagataatagcaatattagctctcgtacagtagagatatttgagagggaaaagtcatctcttgtatcatatattaaaactaccaataagaagagaaaggtcaattacggcgaaataaagaaaactgttcatggaggcactaatgcaaattacttttccggtaaaaagtctgacgagtatctgagtactacagttagatccaacattaatcaaccttggatcaaaaccatctctaagaggatgagagttgatatcattaatcactctatagtaacgcgtggaaaaagctctatattacaaactatagaaattatttttactaatagaacatgtgtgaaaatattcaaggattctactatgcacattattctatccaaggacaaggatgaaaaggggtgtatacacatgattgacaaattattctatgtctattataatttatttctgttgttcgaggatatcatccaaaacgagtactttaaagaagtagctaatgttgtaaaccacgtacttacggctacggcattagatgagaaattattcctaattaagaaaatggctgaacacgatgtttatggagttagcaatttcaaaatagggatgtttaacctgacatttattaagtcgttggatcataccgttttcccctctctgttagatgaggatagcaaaataaagttttttaaggggaaaaagctcaatattgtagcattacgatctctggaggattgtataaattacgtgactaaatccgagaatatgatagaaatgatgaaggaaagatcgactattttaaatagcatagatatagaaacggaatcggtagatcgtctaaaagaattgcttctaaaatgaaaaaaaacactgattcagaaatggatcaacgactcggatataagtttttggtgcctgatcctaaagccggagttttttatagaccgttacatttccaatatgtatcgtattctaattttatattgcatcgattgcatgaaatcttgaccgtcaagcggccactcttatcgtttaagaataatacagaacgaattatgatagaaattagcaatgttaaagtgactcctccagattactcacctataatcgcgagtattaaaggtaagagttatgacgcattagccacgttcactgtaaatatctttaaagaggtaatgaccaaagagggtatatccatcactaaaataagtagttatgagggaaaagattctcatttgataaaaattccgctactaataggatacgggaataaaaatccacttgatacagccaagtatcttgttcctaatgtcataggtggagtctttatcaataaacaatctgtcgaaaaagtaggaattaatctagtagaaaagattacaacatggccaaaatttagggttgttaagccaaactcattcactttctcgttttcctccgtatcccctcctaatgtattaccgacaagatatcgccattacaagatatctctggatatatcacaattggaagcgtcgaatatatcatcgacaaagacatttataacggtcaatattgttttgctgtctcaatatttatctagagtgagtctagaattcattagacgtagcttatcatacgatatgcctccagaagttgtctatctagtaaacgcgataatagatagtgctaaacgaattactgaatctattactgactttaatattgatacatacattaatgacctggtggaagctgaacacattaaacaaaaatctcagttaacgatcaacgagttcaaatatgaaatgctgcataactttttacctcatatgaactatacacccgatcaactaaagggattttatatgatatctttactaagaaagtttctctactgtatctaccacacttctagatatccagatagagattcgatggtttgtcatcgtatactaacatacggcaaatattttgagacgttggcacatgatgaattagagaattacataggcaacatccgaaacgatatcatgaacaatcacaagaacagaggcacttacgcggtaaacattcatgtactaacaactcctggacttaatcatgcattttctagtctattgagtggaaagttcaaaaagtcagacggtagttatcgaacacatcctcactattcatggatgcagaatatttctattcctaggagtgttggattttatccggatcaagtaaagatttcaaagatgttttctgtcagaaaataccatccaagtcaatatctttacttttgttcatcagacgttccggaaagaggtcctcaggtaggtttagtatctcaattgtctgtcttgagttccattacaaatatactaacgtctgagtatttggatttggaaaagaaaatttgtgagtatatcagatcatattataaagatgatataagttactttgaaacaggatttccaatcactatagaaaatgctctagtcgcatctcttaatccaaatatgatatgtgattttgtaactgactttagacgtagaaaacggatgggattcttcggtaacttggaggtaggtattactttagttagggatcacatgaatgaaattcgcattaatattggagcgggaagattagtcagaccattcttggttgtggataacggagagctcatgatggatgtgtgtccggagttagaaagcagattagacgacatgacattctctgacattcagaaagagtttccgcatgtcatcgaaatggtagatatagaacaatttacttttagtaacgtatgtgaatcggttcaaaaatttagaatgatgtcaaaggatgaaagaaagcaatacgatttatgtgactttcctgccgaatttagagatggatatgtggcatcttcattagtgggaatcaatcacaattctggacccagagctattcttggatgtgctcaagctaaacaagctatctcttgtctgagctcggatatacgaaataaaatagacaatggaattcatttgatgtatccagagaggccaatcgtgattagtaaggctttagaaacttcaaagattgcggctaattgcttcggccaacatgttactatagcattaatgtcgtacaaaggtatcaatcaagaggatggaattatcatcaaaaaacaatttattcagagaggcggtctcgatattgttacagccaagaaacatcaagtagaaattccattggaaaactttaataacaaagaaagagataggtctaacgcctattcaaaattagaaagtaatggattagttagactgaatgctttcttggaatccggagacgctatggcacgaaatatctcatcaagaactcttgaagatgattttgctagagataatcagattagcttcgatgtttccgagaaatataccgatatgtacaaatctcgcgttgaacgagtacaagtagaacttactgacaaagttaaggtacgagtattaaccatgaaagaaagaagacccattctaggagacaaatttaccactagaacgagtcaaaagggaacagtcgcgtatgtcgcggatgaaacggaacttccatacgacgaaaatggtatcacaccagatgtcattattaattctacatccatcttctctagaaaaactatatctatgttgatagaggttattttaacagccgcatattctgctaagccgtacaacaataagggagaaaaccgacctgtctgttttcctagtagtaacgaaacatccatcgatacatatatgcaattcgctaaacaatgttatgagcattcaaatccgaaattgtctgatgaagaattatcggataaaatcttttgtgaaaagattctctatgatcctgaaacggataagccttatgcatccaaagtattttttggaccaatttattacttgcgtctgagacatttaactcaggacaaggcaaccgttagatgtagaggtaaaaagacgaagctcattagacaggcgaatgagggacgaaaacgtggaggaggtatcaagttcggagaaatggagagagactgtttaatagcgcatggtgcagccaatactattacagaagttttgaaagattcggaagaagattatcaagatgtgtatgtttgtgaaaattgtggagacatagcagcacaaatcaagggtattaatacatgtcttagatgttcaaaacttaatctctctcctctcttaacaaaaattgataccacacacgtatctaaagtatttcttactcaaatgaacgccagaggcgtaaaagtcaaattagatttcgaacgaagacctccttcgttttataaaccattagataaagttgatctcaaaccgtcttttctggtctaatattgtttagtagatacttatcaacatcatcaagattatcaagattatcaagattatcaagataagctaattcactaaacacattatcgatttcggtatcgttactcgcagaataaagttcgttatgatcctgatattcggaaatctgtggagtttcaggttttggtggatgtgtaacagctacttgagataccgaagtctgatattcagaaagctgtggatgttctggttcggcatccaccgatggtgttacaccactactaattggttcagtaacgtctgtggacgatggaggcaccacttctacaggttctggttctttatcctcagtcatcaacggagctacttcaatgcgaggaaatgtataatttggtaatggtttctcatgtggatctgaagaagaggtaagatatctactagaaagataccgatcacgttctagttctcttttgtagaacttaactttttctttctcagcatctagttgatattccaacctcttcacgttactacgttcagatttcaattcacgttcgcatgggttacctccgcagtttttacgagcgatttcacgttcagccttcatgcgtctctccctctctctatcgagtttatcagagcagtctttctgaaggcgatcgaactccataaatttctccaacgctttgattgtttccatagatttccgaagttcagcttttaggactgtgattctttttctttcgaattcacagctggatgtacaaccgtttccattaccgccatctctaagtttcttttctagatcggcaacatttcatccccatgccttttacattcctcgagtctactgtcgtcgaaatatcgttccagctccttttcgacatcaataactttagcacgttgtctctcaagctctcttttgtagttatctgattccctggcacgtttaagatcttcatgcaattgagtcagctcttaacacaatctcttgcttcttcgtcatagtacgcgcaatcactgtgagatccattgttaccacgtctacactcggcgagctcgcgtttaagagattcaatttcccgtttgtattggtccatgtttccattgctaccaccattagatttacaggctgctagttgtcgttcgagatcagaaatacgggttttcttggaattgatttcgtcgatgtacttggcatcgaaacacttattaagttctttttccaattctacgattttatttctttcgcgagtcaattccctcctgtagtaactatctgttttgtcagattcacgctctctacgtagactttcttgcaagttactaatttgttccctagcacgtccgagtttagttttatatgctgaatagagttctgattcatcctttgagcagatctctagcgatcgtttaagattcctgattctagtctttagcctatttacctcctcagaagatgttccgttaccgttgcgtttacactcgttaagctgtctatcaagatccatgattctatctctaagacgttgcatctctctttccatatcagcattgctttcattattacgtctgcagtcactcaactgtctttcaatatctgagattctatctctaagacgtcgcatctctctctgtttcggcattggtttcattattacgtctacagtcgttcaactgtctttcaagatctgatattctagattggagtctgctaatctctgtagcattttcacggcattcactcagttgtctttcaagatctgaaattttagattggagtctgctaatctctgtaagatttcctcctccgctctcgatgcagtcggtcaacttattctctagttctctaatacgcgaacgcagtgcatcaacttcttgcgtgtcttcctggttgcgtgtacattcatcgagtctagattcgagatctctaacgcgtcgtcgttcttcctcaagttctctgcgtactacagaaagcgtgtccctatcttgttgatatttagcaatttctgattctagagtactgattttgcttacgtagttactaatatttgtcttggccttatcaagatcctccttgtatttgtcgcattccttgatatccctacgaagtctggacagttcccattcgacattacgacgtttatcgatttcagctcggagatcgtcatcgcgttgttttagccacatacgactgagttcaagttctcgttgacaagatccatctacttttccattcctaatagtatccagttccttttctagttctgaacgcatttctcgttccctatcaagcgattctctcaattctcggatagtcttcttatcaatttctaataaatctgaaccatcatctgtcccattttgaatatccctgtgttctttgatctcttttgtaagtcggtcgattctttcggttttataaacagaatccctttccaaagtcctaatcttactgagtttatcactaagttctgcattcaattcggtgagttttctcttggcttcttccaactctgttttaaactctccactatttccgcattcttcctcgcatttatctaaccattcaattagtttattaataactagttggtaatcagcgattcctatagccgttcttgtaattgtgggaacataattaggatcttctaatggattgtatggcttgatagcatcatctttatcattattagggggatggacaaccttaattggttggtcctcatctcctccagtagcgtgtggttcttcaatagccgtgttagtaataggcttaggcaaatgcttgtcgtacgcgggcacttcctcatccatcaagtatttataatcgggttctacgtctgaatattcttttctaagagacgcaacttctggagttagtagaagaactctgtttctatatctatcaacgctggaatcaatactcaagttaaggatagcgaatacctcatcgtcatcatccgtatcctctgaaacgccatcatatgacatttcatgaagtctaacgtattgataaacagaatcagatttagtattaaacagatccttaacctttttagtaaatgcatatgtatattttagatctccagatttcataatatggtcgcatgccttaaatgtcagtgcttccataatatagtctggaacactaattggtgatgaaaaagataccggaccatatgctacgttgataaataactctgagccactaactagataatgattaatgttaaggaagaggaaatattcagtgtataggtatgtcttggcgtcatatcttgtactaaacacgctaaacagtttgttaatgtgatcaatttccaatagattaattagagcagcaggaataccaacaaacatattaccacatccgtattttctatgaatatcacatatcatgttaaaaaatcttgatagaagagcgaatatctcgtctgacttaatgagtcgtagttcagcagcaacataagtcataactgtaaatagaacatactttcctgtagtgttgattctagactccacatcaacaccattattaaaaatagttttatatacatctttaatctgctctccgttaatcgtcgaacgttctagtatacggaaacactttgatttcttatctgtagttaatgacttagtgatatcacgaagaatattacgaattacatttcttgtttttcttgagagacctgattcagaactcaactcatcgttccatagtttttttacctcagtggcgaaatctttggagtgcttggtacatttttcaataaggttcgtgacctccatttattataaaaaaattttattcaaaacttaactacaatcgggtaattataaaatcgtagatctcccatgtggtggaatactaccatctatcgcatgtggatggacagtaggtaatggccatgggaacagtaatgtttgcatatttatctttcttgccagtattactgcatattgtcccaatgtttcgatgtgatgttctaacctatcaactgccgctgtatcacaacaatagtgtccgatgaaattaagattatgatccaatgtgtttaatatatgattatcaagtcttatacgatccgcgtcttttttgacaggatcaggttcttctacaggaagaagtttcggcctcttatgatattcatgtctgggaaacggtggtctagggtgaggctccggtatcggagtgggttttggattataatcatcatcgtctatgacatcatcttcgacttcgatatttattttgctatcttgatgatgtcctgtatcagttgcattttcagcactcgactgaatattagcgcattcattgtttattattaccatatttctaaacccaaaatgtatatgttgaacatcagtactatcgttgatgagtcttatagcatgaattcgcttatcgttatcgggtttagcttctgtcaccttagcaattccttttttattaaactctacataatcatatccatttctattgtttgttctaatataaacgagtatagcatcattgctaaatttttcaatagtatcgaaaacagaatatcctaaaccatataatatatattcaggaacactcaaactaaatgtccaggattctcctaaatacgtaaactttaatagtgcgaaatcattcaaaaatctaccacttatagatagatagtacataaatgcgtatagtagtctacctatctctttattatgaaaaccggcattacgatcatatatgtcgtgatatacctgtgatccgtttacgttaaaccataaatacatgggtgatcctataaacatgaatttatttctaattctcagagctatagttaattgaccgtgtaatatttgcttacatgcatacttgatacgctcattaataagatttttatcattgctcgttatctcagaatcgtatatataaggagtaccatcgtgattcttaccagatattatacaaaatactatatataaaatatattgaccaacgttagtaatcatataaatgtttaacgttttaaattttgtattcaatgatccattatcatacgctagcatggtcttatgatattcattctttaaaatataatattgtgttagccattgcattggggctcctaatggagattttttattctcatccattttaggataggctttcataaagtccctaataacttcgtgaataatgtttctatgttttctactgatgcatgtatttgcttcgatttttttatcccatgtttcatctatcatagatttaaacgcagtaatgctcgcaacattaacatcttgaaccgttggtacaattccgttccataaatttataatgttcgccatttatataactcattttttgaatatacttttaattaacaaaagagttaagttactcatatggacgccgtccagtctgaacatcaatctttttagccagagatatcatagccgctcttagagtttcagcgtgattttccaacctaaatagaacttcatcgttgcgtttacaacacttttctatttgttcaaactttgttgttacattagtaatctttttttccaaattagttagccgttgtttgagagtttcctcattgtcgtcttcatcggctttaacaattgcttcgcgtttagcctctggctttttagcagcctttgtagaaaaaaattcagttgctggaattgcaagatcgtcatctccggggaaaagagttccgtccatttaaagtacagattttagaaactgacactctgcgttatttatatttggtacaacacatggattataaatattgatgttaataacatcagaaaatgtaaagtctatacattgttgcatcgtgttaaattttctaatggatctagtattattgggtccaacttctgcctgaaatccaaatatggaagcggatacaaaaccgtttcctggataaaccacacatctccacttttgctttacatcagaaattgtgtcattgacatcttgaactctcctatctaatgccggtgttccacctatagattttgaatattcgaatgctgcatgagtagcattaaattccttaatattgccataattttcatatattgagtaaccctggataaaaagtaaacacaccgcagccgtcgctaccacaataaaaaaaattgatagagagttcatttataatctattagaagctgacaaaatttttttacacgcatcagacaatgctttaataaatagttcaacatctacttttgtcatatcgaaccgatggtatgattctaacctagaattacatccgaaaaagttgactatgttcatagtcattaagtcattaacaaacaacattccagactctggattataagacgatactgtttcgtcacaattacctaccttaatcatgtgattatgaatattggctattagagcaccttctaagaaatctataatatctttgaaacacgatttaaaatcaaaccacgaatatacttctacgaagaaagttagtttacccataggagaaataactataaatggagatctaaatacaaaatccggatctatgatagttttaacattattatattctctattaaatacctccacatctaaaaatgttaattttgaaactatgtcttcgtttattaccgtacctgaactaaacgctataagctctattgtttgagaactctttaaacgatattcttgaaatacatgtaacaaagtttcctttaactcggtcggtttatctaccatagttacagaatttgtatccttatctataatataataatcaaaatcgtataaagttatataattatcgcgttcagattgtgatcttttcaaatagactaaaaaccccatttctctagtaagtatcttatgtatatgtttgtaaaatatcttcatggtgggaatatgctctaccgcagttagccattcctcattgacagcggtagatgtattagacaaaactattccaatgtttaacaagggccattttacgagattattaaatccttgtttgataaatgtagccaatgagggttcgagttcaacgacgattgaattctcttcccgcggatgctgcatgatgaacgacgggatgttgttcgattgatttggaattctttttcgactttttgtttatattaaatattttaaaatttatagctgatagcaattcatgtactacggataatgtagacgcgtattgcgcatcgatatctttattattagataaatttatcaataaatgtgagaagtttgcctcgttaaggtcttccatttaaatattatataaacatttgtgtttgtatcttattcgtcttttatggaatagttttttactagtaaagctgcaattacacactttgtccgtaaaacataaatataaacaccagcttttatcaatcgttccaaaaagtcgacggcggacatttttaacatggcatctattttaaatacacttaggtttttggaaaaaacatcattttataattgtaacgattcaataactaaagaaaagattaagattaaacataagggaatgtcatttgtattttataagccaaagcattctaccgttgttaaatacttgtctggaggaggtatatatcatgatgatttggttgtattggggaaggtaacaattaatgatctaaagatgatgctattttacatggatttatcatatcatggagtgacaagtagtggagcaatttacaaattgggatcgtctatcgatagactttctctaaataggactattgttacaaaagttaataattatgatgatacattttttgacgacgatgattgatcgctattgcacaattttgtttttttactttctaatatagcgtttagattctttttcatgtgcgaatattgatttactaaaatatcgatgtttaacttttgttctatgacgtccttatcagcggtatcggtacatatacgtaattcaccttcacaaaatacggagtcttcgataataatagccaatcgattattggatctagcggtctgtatcatattcaacatgtttaatatatcctttcgtttcccctttacaggcatcgatcgtagcatattttccgcgtctgagatggaaatgttaaaactacaaaaatgcgtaatgttagcccgtcctaatattggtacgtgtctataagtttggcatagtagaataatagacgtgtttaaatgccttccaaagtttaagaattctattagagtattgcattttgatagtttatcgcctacatcatcaaaaataagtaaaaagtgtgctgattttttatgattttgtgcgacagcaatacatttttctatgttacttttagttcgtatcagattatattctagagattcctgactactaacgaaattaatatgatttggccaaatgtatccatcataatctggattataaacgggtgtaaacaagaatatatgtttatattttttaactagtgtagaaaacagagatagtaaatagatagtttttccagatccagatcctcccgttaaaaccattctaaacggcatttttaataaattttctcttgaaaattgtttttcttggaaacaattcataattatatttacagttactaaattaatttgataataaatcaaaatatggaaaactaaggtcgttagtagggaggagaacaaagaaggcatatcgtgatataaataacatttattatcatgatgacaccagaaaacgacgaagagcagacatctgtgttctccgctactgtttacggagacaaaattcagggaaagaataaacgcaaacgcgtgattggtctatgtattagaatatctatggttatttcactactatctatgattaccatgtccgcgtttctcatagtgcgcctaaatcaatgcatgtctgctaacgaggctgctattactgacgccgctgttgccgttgctgctgcatcatctactcatagaaaggttgcgtctagcactacgcaatatgatcacaaagaaagctgtaatggtttatattaccagggttcttgttatatattacattcagactaccagttattctcggatgctaaagcaaattgcactgcggaatcatcaacactacccaataaatccgatgtcttgattacctggctcattgattatgttgaggatacatggggatctgatggtaatccaattacaaaaactacatccgattatcaagattctgatatatcacaagaagttagaaagtatttttgtgttaaaacaatgaactaatatttatttttgtacattaataaatgaaatcgcttaatagacaaactgtaagtaggtttaagaagttgtcggtgccggccgctataatgatgatactctcaaccattattagtggcataggaacatttctgcattacaaagaagaactgatgcctagtgcttgcgccaatggatggatacaatacgataaacattgttatctagataccaacattaaaatgtctacagataatgcggtttatcagtgtcgtaaattacgagctagattgcctagacctgatactagacatctgagagtattgtttagtattttttataaagattattgggtaagtttaaaaaagaccaataataaatggttagatattaataatgataaagatatagatattagtaaattaacaaattttaaacaactaaacagtacgacggatgctgaagcgtgttatatatacaagtctggaaaactggttgaaacagtatgtaaaagtactcaatctgtactatgtgttaaaaaattctacaagtgacaacaaaaactgcagcggccgctcgagagctcagacggcaatggatggatcataattgatgggaaatgcaatagtaattttttatcataaaagttgtaaagtaaataataaaacaataaatattgaactagtagtacgtatattgagcaatcagaaatgatgctggtacctcttatcacggtgaccgtagttgcgggaacaatattagtatgttatatattatatatttgtaggaaaaagatacgtactgtctataatgacaataaaattatcatgacaaaattaaaaaagataaagagttctaattccagcaaatctagtaaatcaactgatagcgaatcagactgggaggatcactgtagtgctatggaacaaaacaatgacgtagataatatttctaggaatgagatattggacgatgatagcttcgctggtagtttaatatgggataacgaatccaatgttatggcgcctagcacagaacacatttacgatagtgttgctggaagcacgctgctaataaataatgatcgtaatgaacagactatttatcagaacactacagtagtaattaatgaaacggagactgttaaagtacttaatgaagataccaaacagaatcctaactattcatccaatcctttcgtaaattataataaaaccagtatttgtagcaagtcaaatccgtttattacagaacttaacaataaatttagtgagaataatccgtttagacgagcacatagcgatgattatcttaataagcaagaacaagatcatgaacacgatgatatagaatcatcggtcgtatcattggtgtgattagtttcctttttataaaattgaagtaatatttagtattattgctgccgtcacgttgtacaaatggagatattccctgtattcggcatttctaaaattagcaattttattgctaataatgactgtagatattatatagatacagaacatcaaaaaattatatctgatgagatcaatagacagatggatgaaacggtacttcttaccaacatcttaagcgtagaagttgtaaatgacaatgagatgtaccatcttattcctcatagattatcgacgattatactctgtattagttctgtcggaggatgtgttatctctatagataatgacgtcaatggcaaaaatattctaacctttcccattgatcatgctgtaatcatatccccactgagtaaatgtgtcgtagttagcaagggccctacaaccatactggttgctaaagcggatatacccagcaaacgattggtaacatcgtttacaaacgacatactgtatgtaaacaatctatcactgattaattatttgccgttgtctgtattcattattagacgagtcaccgactatttggatagacacatatgcgatcagatatttgctaataataagtggtattcccttataaccatcgacgataagcaatatcctattccatcaaattgtataggtatgtcttctgccaagtacataaattctagcatcgagcaagatactttaatacatgtttgtaacctcgagcatccattcgacttagtatacaaaaaaatgcagtcgtacaattctgtacctatcaaggaacaaatattgtacggtagaattgataatataaatatgagcattagtatttctgtggattaatagatttctagtatggggatcattaatcatctctaatctctaaatacctcataaaacgaaaaaaaagctattatcaaatactgtacggaatagattcattctcttctctttttatgaaactctgttgtatatctactgataaaactggaagcaaaaaatctgataaaaagaataagatcaagatcaaggattatatggaacacgattattataaaataacaatagttcctggttcctcttccacgtctactagctcgtggtattatacacatgcctagtaatagtctctttgcgttgatggaaagcagactagaaataacaggctaaaatgttcagacaccataatagttcccaacccagataataacagagtaccatcaacacattcctttaaactcaatcccaaacccaaaaccgttaaaatgtatccggccaattgatagtagataatgaggtgtacagcgcatgataatttacacagtaaccaaaatgaaaatactttagtaattataagaaatatagatggtaacgtcatcatcaacaatccaataatatgccggagagtaaacattgacggataaaacaaaaatgctccgcataactctatcatggcaataacacaaccaaatacttgtaagattcctaaattagtagaaaatacaacggatatcgatgtataagtgatctcgagaaataataagaataaagtaatgcccgtaaagataaacatcaacattgtttggtaatcattaaaccaattagtatgacgttgaactaatttcacagtaaattttattccagtattatccccgcatgtataagtacctggtaagatatctttatattccataatcaatgagacatcactatctgataacgaatgaagtctagcactagtatgccatttacttaatattgtcgtcttggaagttttattataagttaaaatatcatggttatccaatttccatctaatatactttgtcggattatctatagtacacggaataatgatggtatcattacatgctgtatactctatggtctttgtagttgttataacaaccaacgtatagaggtatatcaacgatattctaactcttgacattttttatttatttaaaatgatacctttgttatttattttattctattttgctaacggtattgaatggcataagtttgaaacgagtgaagaaataatttctacttacttattagacgacgtattatacacgggtgttaatggggcggtatacacattttcaaataataaactaaacaaaactggtttaactaataataattatataacaacatctataaaagtagaggatgcggataaggatacattagtatgcggaaccaataacggaaatcccaaatgttggaaaatagacggttcagacgacccaaaacatagaggtagaggatacgctccttatcaaaatagcaaagtaacgataatcagtcacaacggatgtgtactatctgacataaacatatcaaaagaaggaattaaacgatggagaagatttgacggaccatgtggttatgatttattcacggcggataacgtaattccaaaagatggtttacgaggagcattcgtcgataaagacggtacttatgacaaagtttacattcttttcactgatactatcggctcaaagagaattgttaaaattccgtatatagcacaaatgtgcctaaacgacgaaggtggtccatcatcgttgtctagtcatagatggtcgacgtttctcaaagtcgaattagaatgtgatatcgacggaagaagttatagataaattattcattctaaaactataaaaacagataatgatacgatactatatgtattcttcgatagtccgcattatgtacctattctatgaataccattaaacaatctttttctacgtcaaaattggaaggatatacaaagcaattgccgtctccagctcctggtatatgtctaccagctggaaaagttgttccacataccacgtttgaagtcatagaaaaatataatgtactagatgatattataaagcctttatctaaccaacctatcttcgaaggaccgtctggtgttaaatggttcgatataaaggagaaggaaaatgaacatcgggaatatagaatatacttcataaaagaaaattctatatattcgttcgatacaaaatctaaacaaactcgtagctcgcaagtcgatgcgcgactattttcagtaatggtaacttcgaaaccgttatttatagcagatatagggataggagtaggaatgccacaaatgaaaaaaatacttaaaatgtaatcttaatcgagtacaccacacgacaatgaacaaacataagacagattatgctggttatgcttgctgcgtaatatgcggtctaattgttggaattatttttacagcgacactattaaaagttgtagaacgtaaattagttcatacaccatcaatagataaaacgataaaagatgcatatattagagaagattgtcctactgactggataagctataataataaatgtatccatttatctactgatcgaaaaaacctgggaggaaggacgtaatgcatgcaaagctctaaatccaaattcggatctaattaagatagagactccaaacgagttaagttttttaagaagccttagacgaggctattgggtaggagaatccgaaatattaaaccagacaaccccatataattttatagctaaaaatgccacgaagaatggaactaaaaaacggaaatatatttgtagtacaacgaatactcccaaactgcattcgtgttacactatataacaattacactacatttttatcataacactacttcggttagatgttttagaaaaaaataaatatcgccgtaccgttcttgtttttataaaaataacaattaacaattatcaaattttttctttaatattttacgtggttgaccattcttggtggtaaaataatctcttagtgttggaatggaatgctgtttaatgtttccgcactcatcgtatattttgacgtatgcagtcacatcgtttacgcaatagtcagactgtagttctatcatgcttcctacatcagaaggaggaacagttttaaagtctcttggttttaatctattgccattagttttcatgaaatcctttgttttatccacttcacattttaaataaatgtccactatacattcttctgttaattttactagatcgtcatgggtcatagaatttataggttccgtagtccatggatccaaactagcaaacttcgcgtatacggtatcgcgattagtgtatacaccaactgtatgaaaattaagaaaacagtttaataaatcaacagaaatatttaatcctccgtttgatacagatgcgccatatttatggatttcggattcacacgttgtttgtctgaggtgttcgtctagtgttgcttctacgtaaacttcgattcccatatattctttattgtcagaatcgcataccgatttatcatcatacactgtttgaaaactaaatggtatacacatcaaaataataaataataacgagtacattctgcaatattgttatcgtaattggaaaattagtgttcgagtgagtcggattatgtgagtactggattgtatattttattttatattttgtaataagaataaaatgctaatgtcaagtttattccaatagatgtcttattaaaaaacatatataataaataacaatggctgaatggcataaaattatcgaggatatctcaaaaaataataagttcgaggatgccgccatcgttgattacaagactacaaagaatgttctagctgctattcctaacagaacatttgccaagattaatccgggtgaaattattcctctcatcactaatcgtaatattctaaaacctcttattggtcagaaatattgtattgtatatactaactctctaatggatgagaacacgtatgctatggagttgcttactgggtacgcccctgtatctccgatcgttatagcgagaactcataccgcacttatatttttgatgggtaagccaacaacatccagacgtgatgtgtatagaacgtgtagagatcacgctacccgtgtacgcgcaactggtaattaaaataaaaagtaatattcatatgtagtgtcaattttaaatgatgatgatgaaatggataatatccatattgacgatgtcaataatgccggtattggcatacagctcatcgatttttagatttcattcagaggatgtggaattatgttatgggcatttgtattttgataggatctataatgtagtaaatataaaatataatccgcatattccatatagatataattttattaatcgcacgttaaccgtagatgaactagacgataatgtcttttttacacatggttattttttaaaacacaaatatggttcacttaatcctagtttgattgtctcattatcaggaaacttaaaatataatgatatacaatgctcagtaaatgtatcgtgtctcattaaaaatttggcaacgagtacatctactatattaacatctaaacataagacttattctctacatcggtccacgtgtattactataataggatacgattctattatatggtataaagatataaatgacaagtataatgacatctatgattttactgcaatatgtatgctaatagcgtctacattgatagtgaccatatacgtgtttaaaaaaataaaaatgaactcttaattatgctatgctattagaaatggataaaatcaaaattacggttgattcaaaaattggtaatgttgttaccatatcgtataacttggaaaagataactattgatgttacacctaaaaagaaaaaagaaaaggatgtattattagcgcaatcagttgctgtcgaagaggcaaaagatgtcaaggtagaagaaaaaaatattatcgatattgaagatgacgatgatatggatgtagaaagcgcataatacgatctataaaaataagtatataataaatactttttatttacggtactcttgtagtggtgataccctactcaattatttttttaaaaaaatacttattctgattcttctagccatttccgtgttcgttcgaatgccacatcgacgttaaagataggggagtagttgaaatctagttctgcattgttggtacgcacctcaaatgtagtgttggatatcttcaacgtatagttgttgagtagtgatggttttctaaatagaattctcttcatatcattcttgcacgcgtacatttttagcatccatcttggaattctagatccttgttctattcccaatggtttcatcaatagaagattaaacatatcgtacgaacacgatggagagtaatcgtagcaaaagtaagcatttcctttaatcttagatcccggatactggatatattttgcagccaacacgtgcatccatgcagcatttcctacatatacccggctatgcaccgcgtcatcatcgactgtacgatacataatgttaccgtgttgcttacattgctcgtaaaagactttcgtcaatttgtctccttctccgtaaattccagtgggtcttaggcaacaagtatacaattttgctccattcatgattacggaattattggctttcataaccagttgctcggccatacgtttactttttgcgtatacatgtcctggtgatatatcataaagggtatgctcatggccgatgaatggatcaccgtgtttattgggtcctattgcttccatgctactagtatagatcaaatacttgattcctaggtccacacaagctgccaatatagtctgtgttccataatagtttactttcatgatttcattatcggtgtattttccaaatacatccactagagcagccgtatgaataatcagatttaccccatctagcgcttctctcaccttatcaaagtcgtttatatcacattgtatatagtttataaccttaactttcgaggttattggttgtggatcttctacaatatctatgactctgatttcttgaacatcatctgcactaattaacagttttactatatacctgcctagaaatccggcaccaccagtaaccgcgtacacggccattgctgccactcataatatcagactacttattctattttactaaataatggctgtttgtataatagaccacgataatatcagaggagttatttactttgaaccagtccatggaaaagataaagttttaggatcagttattggattaaaatccggaacgtatagtttgataattcatcgttacggagatattagtcaaggatgtgattccataggcagtccagaaatatttatcggtaacatctttgtaaacagatatggtgtagcatatgtttatttagatacagatgtaaatatatttacaattattggaaaggcgttatctatttcaaaaaatgatcagagattagcgtgtggagttattggtatttcttacataaatgaaaagataatacattttcttacaattaacgagaatggcgtttgatatatcagttaatgcgtctaaaacaataaatgcattagtttacttttctactcagcaaaataaattagtcatacgtaatgaagttaatgatacacactacactgtcgaatttgatagggacaaagtagttgacacgtttatttcatataatagacataatgacaccatagagataagaggggtgcttccagaggaaactaatattggttgcgcggttaatacgccggttagtatgacttacttgtataataagtatagttttaaactgattttagcagaatatataagacacagaaatactatatccggcaatatttattcggcattgatgacactagatgatttggctattaaacagtatggagacattgatctattatttaatgagaaacttaaagtagactccgattcgggactatttgactttgtcaactttgtaaaggatatgatatgttgtgattctagaatagtagtagctctatctagtctagtatctaaacattgggaattgacaaataaaaagtataggtgtatggcattagccgaacatatatctgatagtattccaatatctgagctatctagactacgatacaatctatgtaagtatctacgcggacacactgagagcatagaggatgaatttgattattttgaagacgatgattcgtctacatgttctgccgtaaccgacagggaaacggatgtataattttttttatagcgtgaaggatatgataaaaaatataattgttgtatttatcccattccaatcaccttatatgattctgtaaaaaaattatactgtaacacaataaaggagtcttatagatgtatagaggtcagatactggtttgataaactgtttattccacataagtatgtttgactttatggttagacccgcatactttaacaaatcactgaaaattggagttaggtattgacctctcagaatcagttgccgttctggaacattaaatgtattttttatgatatactccaacgcatttatgtgggcatacaacaagtcattactaatggagtattccaagagttttagttgtctagtatttaacaagagaagagatttcaacagactgtttatgaactcgaacgccgcctcattgtcgcttatattgatgatgtcgaattctcccaatatcatcactgatgagtagctcatcttgttatcgggatccaagttttctaaagatgtcattaaaccctcgatcatgaatggatttatcatcatcgtttttatgttggacatgagcttagtccgtttgtccacatctatagacgacgatttctgaattatttcatatatccctctctttaactccaggaacttgtcaggatggtctactttaatatgttctcgtctaagagatgaaaatctttggatggttgcacgcgacttttctttaaaggatgacgttgcccaagatcctctcttaaatgaatccatcttatccttggacaagatggacagtctattttccttagatggtttaatatttttgttacccatgatctataaaggtagacctaatcgtctcggatgaccatatatttattttcagttttattatacgcataaattgtaaaaaatatgttaggtttacaaaaatgtctcgtggggcattaatcgtttttgaaggattggacaaatctggaaaaacaacacaatgtatgaacatcatggaatctataccggcaaacacgataaaatatcttaactttcctcagagatccactgtcactggaaagatgatagatgactatctaactcgtaaaaaaacctataatgatcatatagttaatctattattttgtgcaaatagatgggagtttgcatcttttatacaagaacaactagaacagggaattactttaatagttgatagatacgcattttctggagtagcgtatgccgccgctaaaggcgcgtcaatgactctcagtaagagttatgaatctggattgcctaaacccgacttagttatattcttggaatctggtagcaaagaaattaatagaaacgtcggcgaggaaatttatgaagatgttacattccaacaaaaggtattacaagaatataaaaaaatgattgaagaaggagatattcattggcaaattatttcttctgaattcgaggaagatgtaaagaaggagttgattaagaatatagttatagaggctatacacacggttactggaccagtggggcaactgtggatgtaatagtgaaattacattttttataaatagatgttagtacagtgttataaatggatgaagcatattactctggcaacttggaatcagtactcggatacgtgtccgatatgcataccgaactcgcatcaatatctcaattagttattgccaagatagaaactatagataatgatatattaaacaaggacattgtaaattttatcatgtgtagatcaaacttggataatccatttatctctttcctagatactgtatatactattatagatcaagagatctatcagaccgaattgattaattcattagacgacaatgaaattatcgattgtatagttaacaagtttatgagcttttataaggataacctagaaaatatagtagatgctatcattactctaaaatatataatgaataatccagattttaaaactacgtatgccgaagtactcggttccagaatagccgatatagatattaaacaagtgatacgtaagaatatactacaattgtctaatgatatccgcgaacgatatttgtgaaaaatattaaaaaaaaatactttttttattaaatgacgtcgcttcgcgaatttagaaaattatgctgtgatatatatcacgcatcaggatataaagaaaaatctaaattaattagagactttataacagatagggatgataaatatttgatcattaagctattgcttcccggattagacgatagaatttataacatgaacgataaacaaattataaaattatatagtataatatttaaacaatctcaggaagatatgctacaagatttaggatacggatatataggagacactattaggactttcttcaaagagaacacagaaatccgtccacgagataaaagcattttaactttagaagaagtggatagttttttaactacgttatcatccgtaactaaagaatcgcatcaaataaaattattgactgatgtagcatctgtttgtacatgtaatgatttaaaatgtgtagtcatgcttattgataaagatctaaaaattaaagcgggccctcggtacgtacttaacgctattagtcctcatgcctatgatgtgtttagaaaatctaataacttgaaagagataatagaaaatgcatctaaacaaaatctagactctatatctatttctgttatgactccaattaatcccatgttagcggaatcgtgtgattctgtcaataaggcgtttaaaaaatttccatcaggaatgtttgcggaagtcaaatacgatggtgaaagagtacaagttcataaaaataataacgagtttgccttctttagtagaaacatgaaaccagtactctctcataaagtggattatctcaaagaatacataccgaaagcatttaaaaaagctacgtctatcgtattggattctgaaattgttcttgtagacgaacataatgtaccgctaccgtttggaagtttaggaatacacaaaaagaaagaatataaaaactctaacatgtgtttgttcgtgtttgactgtttgtactttgatggattcgatatgacggacattccattgtacgaacgaagatcttttctcaaagatgttatggttgaaatacccaatagaatagtattctcagagttgacgaatattagtaacgagtctcagttaactgacgtattggatgatgcactaacgagaaaattagaaggattggtcttaaaagatattaatggagtatacgaaccgggaaagagaagatggttaaaaataaagcgagactatttgaacgagggttccatggcagattctgccgatttagtagtactaggtgcctactatggtaaaggagcaaagggtggtatcatggcagtctttctaatgggttgttacgacgatgaatccggtaaatggaagacggttaccaagtgttcaggacacgatgataatacgttaagggagttgcaagaccaattaaagatgattaaaattaacaaggatcccaaaaaaattccagagtggttagtagttaataaaatctatattcccgattttgtagtagaggatccgaaacaatctcagatatgggaaatttcaggagcagagtttacatcttccaagtcccataccgcaaatggaatatccattagatttcctagatttactaggataagagaggataaaacgtggaaagaatctactcatctaaacgatttagtaaacttgactaaatcttaatagttacatacaaactgaaaattaaaataacaccatttagttggtggtcgccatggatggtgttattgtatactgtctaaacgcgttagtaaaacatggcgaggaaataaatcatataaaaaatgatttcatgattaaaccatgttgtgaaagagtttgtgaaaaagtcaagaacgttcacattggcggacaatctaaaaacaatacagtgattgcagatttgccatatatggataatgcggtatccgatgtatgcaattcactgtataaaaagaatgtatcaagaatatccagatttgctaatttgataaagatagatgacgatgacaagactcctactggtgtatataattattttaaacctaaagatgttattcctgttatcatatctataggaaaggataaagatgtctgtgaactattaatctcatcagacatatcgtgtgcatgcgtggagttaaattcatatcacgtagccattcttcccatgaatgtttccttttttaccaaaggaaatgcctcgttgattattctcctgtttgatttctctatcgatgcagcacctctcttaagaagtgtaaccgataataatgttattatatctagacaccagcgtctacatgacgagcttccgagttccaattggttcaagttttacataagtataaagtccgactattgttctatattatatatggttgttgatggatctgtgatgcatgcgatagctgataatagaactcacgcaattattagcaaaaatatattagacaatactacaattaacgatgagtgtagatgctgttattttgaaccacagattaggattcttgatagagatgagatgctcaatggatcatcgtgtgatatgaacagacattgtattatgatgaatttacctgatgtaggcgaatttggatctagtatgttggggaaatatgaacctgacatgattaagattgctctttcggtggctggtaatttaataagaaatcgagactacattcccgggagacgaggctatagctactacgtttacggtatagcctctagataatttttttaagcacgaaataaaaaacataattttaaaccaatctatttcatactattttgtgtgatcaccatggacataaagatagatattagtatttctggtgataaatttacggtgactactaggagggaaaatgaagaaagaaaaaaatatctacctctccaaaaagaaaaaactactgatgttatcaaacctgattatcttgagtacgatgacttgttagatagagatgagatgtttactattctagaggaatattttatgtacagaggtctattaggcctcagaataaaatatggacgactctttaacgaaattaaaaaattcgacaatgatgcggaagaacaattcggtactatagaagaactcaagcagaaacttagattaaattctgaagagggagcagataactttatagattatataaaggtacaaaaacaggatatcgtcaaacttactgtatacgattgcatatctatgataggattgtgtgcatgcgtggtagatgtttggagaaatgagaaactgttttctagatggaaatattgtttacgagcgattaaactgtttattaatgatcacatgcttgataagataaaatctatactgcagaatagactagtatatgtggaaatgtcatagaaagttaatgagagcaaaaatatataaggttgtattccatatttgttattttttctgtaatagttaaaaaaatacattcgatggtctatctatcagattattatgtgttataaggtactttttctcataataaactagagtatgagtaagatagtgtttttcaaaacatataaatctaaaattgatggatgagatatacagctattaatttcgaaaatatataaatctaaaattgatggataagatatacagctattaatttcgaaaatatattttaatctgataactttaaacatggatttttgatggtggtttaacgttttaaaaaaagattttgttattgtagtatatgataatattaaaagatggatataaagaatttgctgactgcatgtactattttttacattactacattggctacggcagatatacctactccgccaccaacgggtcatgtgacaagggagaatatcttgataagaggcataatcaatgttgtaatcggtgtccacctggagaatttgccaaggttagatgtaatggtaacgataacacaaaatgtgaacgctgcccacctcatacatataccacaatccccaattattctaatggatgtcatcaatgtagaaaatgcccaaccggatcatttgataaggtaaagtgtaccggaacacagaacagtaaatgttcgtgtcttcctggttggtattgcgctactgattcttcacagactgaagattgttgaaattgtgtaccaaaaaggagatgtccatgcggatactttggtggaatagatgaacaaggaaatcctatttgtaaatcgtgctgtattggtgaatattgcaactacctacgtaattatagacttgatccattttctccatgcaaactatctaaatgtaattaattatgattttgatgataatgttaccatacattatatcgctacttggttagtgtattattcagtatgaagacctattaataattacttatcttttgacgatcttgttataattataatataaaaacttatggcatagtaactcataattgctgacgcgataaattcgtaataatctgttttgttcaaatttttataaggaatctacaggcataaaaataaaaatataatttataatatactcttacagcgcgccatcatgaatagcagcagtaaattaattgctgttattaatggatttagaaatagtggacgattttgtgatattaatatagttattaatgatgaaaggataaacgctcacagactcatcctatctggagcctccgaatatttttccattctgttttccaataattttatcgattctaatgaatacgaagttaatctaagtcatttagattatcaaagtgttaacgatttgatcgattacatttatgggatacctttgagcctaactaacgataacgtgaaatatattctttcaaccgctgattttttacaaattggatctgccattactgagtgcgaaaaatacatacttaaaaatctttgttctagaaactgtatcgatttctacatatacgctgataaatataataacaagaaaatagaatcagcgtcgtttaacacaatattacgaaatattttgagactcatcaacgatgaaaactttaaatacttaacagaggaatcaatgataaaaattttaagcgatgatatgttaaatataaaaaatgaggattttgcaccactaattctcattaaatggttagagagtactcaacaatcatgcaccgtcgagttacttagatgcctcagaatatcattgctttccccacaagttataaaatcactttatagtcatcaactggttagttcaatctacgaatgtataacattcttaaacaatatagcattcttggatgaatcatttcctagataccatagcatcgagttgatatctatcggtataagtaattcgcatgataagatttccataaactgctacaatcataaaaaaaatacatgggaaatgatatcttcacgtagatataggtgtagtttcgcagtggccgtcctggataatattatctatatgatgggtggatatgatcagtccccgtatagaagttcaaaggttatagcgtacaatacatgtacaaattcttggatatatgatataccagagctaaaatatcctcgttctaattgtgggggactggctgatgacgaatacatttattgtataggcggcatacgcgatcaggattcatcgttgacatctagtattgatagatggaagccatcaaaaccatattggcagaagtatgctaaaatgcgcgaaccaaaatgtgatatgggggttgcgatgttaaacggattaatatatgtcatgggtggaatcgttaaaggtgacacgtgtaccgacgcactagagagtttatcagaagatggatggatgaagcatcaacgtcttccaataaaaatgtccaatatgtcgacgattgttcatgatggcaagatttatatatctggaggttacaacaatagtagtgtagttaatgtaatatcgaatctagtccttagctataatccgatatatgatgaatggaccaaattatcatcattaaacattcctagaattaatcccgctctatggtcagcgcataataaattatatgtaggaggaggaatatctgatgatgttcgaactaatacatctgaaacatacgataaagaaaaagattgttggacattggataatggtcacgtgttaccacgcaattatataatgtataaatgcgaaccgattaaacataaatatccattggaaaaaacacagtacacgaatgattttctaaagtatttggaaagttttataggtagttgatagaacaaaatacataattttgtaaaaataaatcactttttatactaatatgacacgattaccaatacttttgttactaatatcattagtatacgctacaccttttcctcagacatctaaaaaaataggtgatgatgcaactctatcatgtaatcgaaataatacaaatgactacgttgttatgagtgcttggtataaggagcccaattccattattcttttagctgctaaaagcgacgtcttgtattttgataattataccaaggataaaatatcttacgactctccatacgatgatctagttacaactatcacaattaaatcattgactgctagagatgccggtacttatgtatgtgcattctttatgacatcaactacaaatgacactgataaagtagattatgaagaatactccacagagttgattgtaaatacagatagtgaatcgactatagacataatactatctggatctacacattcaccagaaactagttctgagaaaccagaggatatagataattttaattgctcgtcggtattcgaaatcgcgactccggaaccaattactgataatgtagaagatcatacagacaccgtcacatacactagtgatagcattaatacagtaagtgcatcatctggagaatccacaacagacgagactccggaaccaattactgataaagaagaagatcatacagtcacagacactgtctcatacactacagtaagtacatcatctggaattgtcactactaaatcaaccaccgatgatgcggatctttatgatacgtacaatgataatgatacagtaccaccaactactgtaggcggtagtacaacctctattagcaattataaaaccaaggactttgtagaaatatttggtattaccgcattaattatattgtcggccgtggcaatattctgtattacatattatatatataataaacgttcacgtaaatacaaaacagagaacaaagtctagatttttgacttacataaatgtctgggatagtaaaatctatcatattgagcggaccatctggttcaggaaagacagccatagccaaaagactatgggaatatatttggatttgtggtgtcccataccactagatttcctcgtcctatggaacgagaaggtgtcgattaccattacgttaacagagaggccatctggaagggaatagccgccggaaactttctagaacatactgagtttttaggaaatatttacggaacttctaaaactgctgtgaatacagcggctattaataatcgtatttgtgtgatggatctaaacatcgatggcgttagaagtcttaaaaatacgtacctaatgccttactcggtgtatataagacctacctctcttaaaatggttgagaccaagcttcgttgtagaaacactgaagcggatgatgagattcatcgtcgtgtgatgttggcaaaaactgacatggatgaggcaggtgaagccggtctattcgacactattatcattgaagatgatgtgaatttagcatatagtaagttaattcagatactacaggaccgtattagaatgtattttaacactaattagagacttaagacttaaaacttgataattaataatataactcgtttttatatgtggctatttcaacgtctaatgtattagttaaatattaaaacttaccacgtaaaacttaaaatttaaaatgatatttcattgacagatagatcacacattatgaactttcaaggacttgtgttaactgacaattgcaaaaatcaatgggtcgttggaccattaataggaaaaggtggattcggtagtatttatactactaatgacaataattatgtagtaaaaatagagcccaaagctaacggatcattatttaccgaacaggcattttatactagagtacttaaaccatccgttatcgaagaatggaaaaaatctcacaatataaagcacgtaggtcttatcacgtgcaaggcatttggtctatacaaatccattaatgtggaatatcgattcttggtaattaatagattaggtgcagatctagatgcggtgatcagagccaataataatagattaccaaaaaggtcggtgatgttgatcggaatcgaaatcttaaataccatacaatttatgcacgagcaaggatattctcacggagatattaaagcgagtaatatagtcttggatcaaatagataagaataaattatatctagtggattacggattggtttctaaattcatgtctaatggcgaacatgttccatttataagaaatccaaataaaatggataacggtactctagaatttacacctatagattcgcataaaggatacgttgtatctagacgtggagatctagaaacacttggatattgtatgattagatggttgggaggtatcttgccatggactaagatatctgaaacaaagaattgtgcattagtaagtgccacaaaacagaaatatgttaacaatactgcgactttgttaatgaccagtttgcaatatgcacctagagaattgctgcaatatattaccatggtaaactctttgacatattttgaggaacccaattacgacgagtttcggcacatattaatgcagggtgtatattattaagtgtggtgtttggtcgatgtaaaatttttgtcgataaaaattaaaaaataacttaatttattattgatctcgtgtgtacaaccgaaatcatggcgatgttttacgcacacgctctcggtgggtacgacgagaatcttcatgcctttcctggaatatcatcgactgttgccaatgatgtcaggaaatattctgttgtgtcagtttataataacaagtatgacattgtaaaagacaaatatatgtggtgttacagtcaggtgaacaagagatatattggagcactgctgcctatgtttgagtgcaatgaatatctacaaattggagatccgatccatgatcaagaaggaaatcaaatctctatcatcacatatcgccacaaaaactactatgctctaagcggaatcgggtacgagagtctagacttgtgtttggaaggagtagggattcatcatcacgtacttgaaacaggaaacgctgtatatggaaaagttcaacatgattattctactatcaaagagaaggccaaagaaatgaatgcactcagttcaggacctatcatcgattaccacgtctggataggagattgtatctgtcaagttactgctgtggacgtacatggaaaggaaattatgagaatgagattcaaaaagggtgcggtgctacagatcccaaatctggtaaaagttaaacttggggagaatgatacagaaaatctttcttctactatatcggcggcaccatcgaggtaaccacctctcaagaagaccgcgtgaataatgtactcatgaaacgtttggaaactatacgccatatgtggtctgttgtatatgatcattttgatattgtgaatggtaaagaatgctgttatgtgcatacgcattcatctaatcaaaatcctataccgagtactgtaaaaacaaatttgtacatgaagactatgggatcatgcattcaaatggattccatggaagctctagagtatcttagcgaactgaaggaatcaggtggatggagtcccagaccagaaatgcaggaatttgaatatccagatggagtggaagacactgaatcaattgagagattggtagaggagttcttcaatagatcagaacttcaggctggtaaattagtcaaatttggtaattctattaattgttaaacatacatctgtttcagctaagcaactaagaacacgtatacggcagcagcttccttttatactctcatcttttaccaacacaaagggtggatatttgttcattggagttgataataatacacacaaagtatttggattcacggtgggttacgactacctcagactgatagagaatgatatagaaaagcatatcaaaagactttgtgttgtgcatttctgtgagaagaaagaggacatcaagtacacgtgtcgattcatcaaggtatataaacctggggatgaggctacctcgacatacgtgtgcgctatcaaagtggaaagatgctgttgtgctgtgtttgcagattggccagaatcatggtatatggatactaatggtatcaagaagtattctccagatgaatgggtgtcacatataaaattttaattaatgtaactatagagaacaaataataggttgtaatatcatatagacaataactaacaattaattagtaactgttatctcttttttaactaaccaactaactatatacctattaatacatcgtaattatagttcttaacatctattaatcattgattcgcttctttaattttttataaactaacattgttaattgaaaagggataacatgttacagaatataaattatatatggatttttttaaaaaggaaatacttgactggagtgtatatttatctcttcattatatagcacgcgtgtgttccaattcttccacatcccatataatacaggattataatctcgttcgaacatacgagaaagtggataaaacaatagttgattttttatctaggttgccaaatttattccatattttagaatatggggaaaatattctacatatttattctatggatgatgctaatacgaatattataattttttttctagatagagtattaaatattaataagaacgggtcatttatacacaatctcaggttatcatcatccattaatataaaagaatatgtatatcaattagttaataatgatcatccagataataggataagactaatgcttgaaaatggacgtagaacaagacattttttgtcctatatatcagatacagttaatatctatatatgtattttaataaatcatggattttatatagatgcagaagacagttacggttgtacattattacatagatgtatatatcactataagaaatcagaatcagaatcatacaatgaattaattaagatattgttaaataatggatccgatgtagataaaaaagatacgtacggaaacacaccttttatcctattatgtaaacacgatatcaacaacgtggaattgtttgagatatgtttagagaatgctaatatagactctgtagactttaatagatatacacctcttcattatgtctcatgtcgtaataaatatgattttgtaaagttattaatttctaaaggagcaaatgttaatgcgcgtaataaattcggaactactccattttattgtggaattatacacggtatctcgcttataaaactatatttggaatcagacacagagttagaaatagataatgaacatatagttcgtcatttaataatttttgatgctgttgaatctttagattatctattatccagaggagttattgatattaactatcgtactatatacaacgaaacatctatttacgacgctgtcagttataatgcgtataatacgttggtctatctattaaacagaaatggtgattttgagacgattactactagtggatgtacatgtatttcggaagcagtcgcaaacaacaacaaaataataatggaagtactattgtctaaacgaccatctttgaaaattatgatacagtctatgatagcaattactaaaaataaacaacataatgcagatttattgaaaatgtgtataaaatatactgcgtgtatgaccgattatgatactcttatagatgtacagtcgctacagcaatataaatggtatattttaaaatgtttcgatgaaatagatatcatgaagagatgttatataaaaaataaaactgtattccaattagttttttgtatcaaagacattaatactttaatgagatatggtaaacatccttctttcgtgaagtgcactagtctcgacgtatacggaagtcgtgtacgtaatatcatagcatctattagatatcgtcagagattaattagtctattatccaagaagctggatgcgggagataaatggtcgtgttttcctaacgaaataaaatataaaatattggaaaactttaacgataacgaactatccacatatctaaaaatcttataaacactattaaaatataaaatctaagtaggataaaatcacactacatcattgtttccttttagtgctcgacagtgtatactatttttaacactcataaataaaaatgaaaacgatttccgttgttacgttgttatgcgtactacctgctgttgtttattcaacatgtactgtacccactatgaataacgctaaattaacgtctaccgaaacatcgtttaatgataaacagaaagttacatttacatgtgatcagggatatcattctttggatccaaatgctgtctgcgaaacagataaatggaaatacgaaaatccatgcaagaaaatgtgcacagtttctgattatgtctctgaattatatgataagccattatacgaagtgaattccaccatgacactaagttgcaacggcgaaacaaaatattttcgttgcgaagaaaaaaatggaaatacttcttggaatgatactgttacgtgtcctaatgcggaatgtcaacctcttcaattagaacacggatcgtgtcaaccagttaaagaaaaatactcatttggggaatatatgactatcaactgtgatgttggatatgaggttattggtgcttcgtacataagttgtacagctaattcttggaatgttattccatcatgtcaacaaaaatgtgatataccgtctctatctaatggattaatttccggatctacattttctatcggtggcgttatacatcttagttgtaaaagtggttttatactaacgggatctccatcatccacatgtatcgacggtaaatggaatcccatactcccaacatgtgtacgatctaacgaaaaatttgatccagtggatgatggtcccgacgatgagacagatttgagcaaactctcgaaagacgttgtacaatatgaacaagaaatagaatcgttagaagcaacttatcatataatcatagtggcgttaacaattatgggcgtcatatttttaatctccgttatagtattagtttgttcctgtgacaaaaataatgaccaatataagttccataaattgctaccgtaaatataaatccgttaaaataattaataatttaataacaaacaagtatcaaaagattaaagacttatagctagaatcaattgagatgtcttcttcagtggatgttgatatctacgatgccgttagagcatttttactcaggcactattataacaagagatttattgtgtatggaagaagtaacgccatattacataatatatacaggctatttacaagatgcgccgttataccgttcgatgatatagtacgtactatgccaaatgaatcacgtgttaaacaatgggtgatggatacacttaatggtataatgatgaatgaacgcgatgtttctgtaagcgttggcaccggaatactattcatggaaatgtttttcgattacaataaaaatagtatcaacaatcaactaatgtatgatataattaatagcgtatctataattctagctaatgagagatatagaagcgcttttaacgacgatggtatatacatccgtagaaatatgattaacaagttgtacggatacgcatctctaactactattggcacgatcgctggaggtgtttgttattatctgttgatgcatctagttagtttgtataaataattatttcaatatactagttaaaattttaagattttaaatgtataaaaaactaataacgtttttatttgtaataggtgcattagcatcctattcgaataatgagtacactccgtttaataaactgagtgtaaaactctatatagatggagtagataatatagaaaattcatatactgatgataataatgaattggtgttaaattttaaagagtacacaatttctattattacagagtcatgcgacgtcggatttgattccatagatatagatgttataaacgactataaaattattgatatgtataccattgactcgtctactattcaacgcagaggtcacacgtgtagaatatctaccaaattatcatgccattatgataagtacccttatattcacaaatatgatggtgatgagcaacaatattctattactgcagagggaaaatgctataaaggaataaaatatgaaataagtatgatcaacgatgatactctattgagaaaacatactcttaaaattggatctacttatatatttgatcgtcatggacatagtaatacatattattcaaaatatgatttttaaaaatttaaaatatattatcacttcagtgacagtagtcaaataacaaacaacaccatgagatatattataattctcgcagttttgttcattaatagtatacacgctaaaataactagttataagtttgaatccgtcaattttgattccaaaattgaatggactggggatggtctatacaatatatcccttaaaaattatggcatcaagacgtggcaaacaatgtatacaaatgtaccagaaggaacatacgacatatccgcatttccaaagaatgatttcgtatctttctgggttaaatttgaacaaggcgattataaagtggaagagtattgtacgggactatgcgtcgaagtaaaaattggaccaccgactgtaacattgactgaatacgacgaccatatcaatttgtacatcgagcatccgtatgctactagaggtagcaaaaagattcctatttacaaacgcggtgacatgtgtgatatctacttgttgtatacggctaacttcacattcggagattctaaagaaccagtaccatatgatatcgatgactacgattgcacgtctacaggttgcagcatagactttgtcacaacagaaaaagtgtgcgtgacagcacagggagccacagaagggtttctcgaaaaaattactccatggagttcgaaagtatgtctgacacctaaaaagagtgtatatacatgcgcaattagatccaaagaagatgttcccaatttcaaggacaaaatggccagagttatcaagagaaaatttaataaacagtctcaatcttatttaactaaatttctcggtagcacatcaaatgatgttaccacttttcttagcatgcttaacttgactaaatattcataactaatttttattaatgatacaaaaacgaaataaaactgcatattatacactggttaacgcccttataggctctaaccattttcaagatgaggtccctgattatagtccttctgttcccctctatcatctactccatgtctattagacgatgtgagaagactgaagaggaaacatggggattgaaaatagggttgtgtataattgccaaagatttctatcccgaaagaactgattgcagtgttcatctcccaactgcaagtgaaggattgataactgaaggcaatggattcagggatatacgaaacaccgataaattataaaaaaagcaatgtgtccgctgtttccgttaataatactattttcgtaactggcggattattcataaataactctaatagcacgatcgtggttaacaatatggaaaaacttgacatttataaagacaaacaatggtcgattatagaaatgcctatggctagggtatatcacggcatcgactcgacatttggaatgttatattttgccggaggtctatccgttaccgaacaatatggtaatttagagaaaaacaacgagatatcttgttacaatcctagaacgaataagtggtttgatatttcatatactatttataagatatccatatcatcattgtgtaaactaaataacgtcttctatgtatttagtaaggacattggatatgtggaaaagtatgatggtgcatggaagttagtacatgatcgtctccccgctataaaggcattatcaacttctccttattgattgaaaatgaaaatataaatagtttttatgtatagcagtattaccctatagttttattgcttactactaacatggatacagatgttacaaatgtagaagatatcataaatgaaatagatagagagaaagaagaaatactaaaaaatgtagaaattgaaaataataaaaacattaacaagaatcatccaagtggatatattagagaagcactcgttattaatacaagtagtaatagtgattccattgataaagaagttatagaatgtatcagtcacgatgtaggaatatagatcatatctactaatttttataatcgatacaaaacataaaaaacaactcgttattacatagcaggcatggaatccttcaagtattgttttgataacgatggcaagaaatggattatcggaaatactttatattctggtaattcaatactatataaggtcagaaaaaatttcactagttcgttctacaattacgtaatgaaaatagatcacaaatcacacaagccattgttgtctgaaatacgattctatatatctgtattggatcctttgactatcgacaactggacacgggaacgtggtataaagtatttggctattccagatctgtatggaattggagaaaccgatgattatatgttcttcgttataaagaattcgggaagagtattcgccccaaaggatactgaatcagtcttcgaagcatgcgtcactatgataaacacgttagagtttatacactctcgaggatttacccatggaaaaatagaaccgaggaatatactgattagaaataaacgtctttcactaattgactattctagaactaacaaactatacaagagtggaaactcacatatagattacaacgaggacatgataacttcaggaaatatcaattatatgtgtgtagacaatcatcttggagcaacagtttcaaaacgaggagatttagaaatgttgggatattgcatgatagaatggttcggtggcaaacttccatggaaaaacgaaagtagtataaaagtaataaaacaaaaaaaagaatataaaaaatttatagctactttctttgaggactgttttcctgaaggaaatgaacctctggaattagttagatatatagaattagtatacacgttagattattctcaaactcctaattatgacagactacgtaaactgtttatacaagattgaaattatattctttttttatagagtgtggtagtgttacggatatctaatattaatattagactatctctatcgcgctacacgaccaatatcgattactatggatatcttcagggaaatcgcatcttctatgaaaggagagaatgtattcatttctccagcgtcaatctcgtcagtattgacaatactgtattatggagctaatggatccactgctgaacagctatcaaaatatgtagaaacggaggagaacacggataaggttagcgctcagaatatctcattcaaatccatgaataaagtatatgggcgatattctgccgtgtttaaagattcctttttgagaaaaattggcgataagtttcaaactgttgacttcactgattgtcgcactatagatgcaatcaacaagtgtgtagatatctttactgaggggaaaatcaatccactattggatgaaccattgtctcctgatacctgtctcctagcaattagtgccgtatactttaaagcaaaatggttgatgccattcgaaaaggaatttaccagtgattatcccttttacgtatctccgacggaaatggtagatgtaagtatgatgtctatgtacggcaaggcatttaatcacgcatctgtaaaggaatcattcggcaacttttcaatcatagaactgccatatgttggagatactagtatgatggtcattcttccagacaagattgatggattagaatccatagaacaaaatctaacagatacaaattttaagaaatggtgtaactctctggaagctacgtttatcgatgttcacattcccaagtttaaggtaacaggttcgtataatcttgtggatactctagtaaagtcaggactgacagaggtgttcggttcaactggagattatagcaatatgtgtaattcagatgtgagtgtcgacgctatgattcacaaaacgtatatagatgtcaatgaagagtatacagaagcagctgcagcaacttgtgcactggtgtcagactgtgcatcaacaattacaaatgagttctgtgtagatcatccgttcatctatgtgattaggcatgttgatggaaaaattcttttcgttggtagatattgctctccgacaactaattgttaaccattttttttaaaaaaatagaaaaaacatgtggtattagtgcaggtcgttgttcttccaattgcaattggtaagatgacggccaactttagtacccacgtcttttcaccacagcactgtggatgtgacagactgaccagtattgatgacgtcagacaatgtttgactgaatatatttattggtcgtcctatgcataccgcaacaggcaatgcgctggacagttgtattccacactcctctcttttagagatgatgcggaatcagtgttcatcgacattcgcgagctggtaaaaaatatgccgtgggatgatgtcaaagattgtacagaaatcatccgttgttatataccggatgagcaaaaaaccatcagagagatttcggccatcatcggactttgtgcatatgctgctacttactggggaggtgaagaccatcccactagtaacagtctgaacgcattgtttgtgatgcttgagatgctcaattacgtggattataacatcatattccggcgtatgaattgatgagttgtacatcttgacattttctttcttctcttctccctttcttctcttctcccttcctccctcttctccctttcccagaaacaaacttttttacccactataaaataaaatgagtatactacctattatatttcttcctatatttttttattcttcattcgttcagacttttaacgcgcctgaatgtatcgacaaagggcaatattttgcatcattcatggagttagaaaacgagccagtaatcttaccatgtcctcaaataaatacgctatcatccggatataatatattagatattttatgggaaaaacgaggagcggataatgatagaattataccgatagataatggtagcaatatgctaattctgaacccgacacaatcagactctggtatttatatatgcattaccacgaacgaaacctactgtgacatgatgtcgttaaatttgacaatcgtgtctgtctcagaatcaaatatagatcttatctcgtatccacaaatagtaaatgagagatctactggcgaaatggtatgtcccaatattaatgcatttattgctagtaacgtaaacgcagatattatatggagcggacatcgacgccttagaaataagagacttaaacaacggacacctggaattattaccatagaagatgttagaaaaaatgatgctggttattatacatgtgttttagaatatatatacagaggtaaaacatataacgtaaccagaattgtaaaattagaggtacgggataaaataataccttctactatgcaattaccagatggcattgtaacttcaataggtagtaatttgactattgcgtgtagagtatcgttgagacctcccacaacggatgcagacgtcttttggataagtaatggtatgtattacgaagaagatgatggggacggagacggtagaataagtgtagcaaataaaatctatatgaccgataagagacgtgttattacatcccggttaaacattaatcctgtcaaggaagaagatgctacaacgtttacgtgtatggcgtttactattcctagcatcagcaaaacagttactgttagtataacgtgaatgtatgttgttacatttccatgtcaattgagtttataagaatttttatacattatcttccaacaaacaattgacgaacgtattgctatgattaactcccacgatactatgcatattattaatcattaacttgcagactatacctagtgctattttgacatactcatgttcttgtgtaattgcggtatctatattattaaagtacgtaaatctagctatagttttattatttaattttagataatataccgtctccttatttttaaaaattgccacatcctttattaaatcatgaatgggaatttctatgtcatcgttagtatattgtgaacaacaagagcagatatctataggaaagggtggaatgcgatacattgatctatgtagttttaaaacacacgcgaactttgaagaatttatataaatcattccatcgatacatccttctatgttgacatgtatatatccaggaattcttttattaatgtcaggaaatgtataaactaaaacattgcccgaaagcggtgcctctatctgcgttatatccgttcttaacttacaaaatgtaaccaatacctttgcatgacttgttttgttcggcaacgttagtttaaacttgacgaatggattaattacaatagcatgatccgcgcatctattaagtttttttactttaacgcccttgtatgtttttacagagactttatctaaatttctagtacttgtatgtgttataaatataacgggatatagaactgaatcacctaccttagatacccaattacattttatcagatccagataataaacaaattttgtcgccctaactaattctatattgttatatattttacaattggttatgatatcatgtaataacttggagtctaacgcgcatcgtcgtacgtttatacaattgtgatttagtgtagtatatctacacatgtatttttccgcactatagtattctggactagtgataaaactatcgttatatctgtcttcaatgaactcatcgagatattgctctctgtcatattcatacacctgcataaactttctagacatcttacaatccgtgttattttaggatcatatttacatatttacgggtatatcaaagatgttagattagttaatgggaatcgtctataataatgaatattaaacaattatatgaggacttttaccacaaagcatcataaaaatgagtcgtcgtctgatttatgttttaaatatcaaccgcaaatcaactcataaaatacaagagaatgaaatatatacatattttagtcattgcaatatagaccatacttctacagaacttgattttgtagttaaaaactatgatctaaacagacgacaacatgtaactgggtatactgcactacactgctatttgtataataattactttacaaacgatgtactgaagatattattaaatcatgacgtaaatgtaacgatgaaaaccagtagcggacgtatgcctgtttatatattgcttactagatgttgcaatatttcacatgatgtagtgatagatatgatagacaaagataaaaaccacttattacatagagactattccaacctattactagagtatataaaatctcgttacatgttattaaaggaagaggatatcgatgagaacatagtatccactttattagataagggaatcgatcctaactttaaacaagacggatatacagcgttacattattattatttgtgtctcgcacacgtttataaaccaggtgagtgtagaaaaccgataacgataaaaaaggccaagcgaattatttctttgtttatacaacatggagctaatctaaacgcgttagataattgtggtaatacaccattccatttgtatcttagtattgaaatgtgtaataatattcatatgactaaaatgctgttgacttttaatccgaatttcaaaatatgtaataatcatggattaacgcctatactatgttatataacttccgactacatacaacacgatattcttgttatgttaatacatcactatgaaacaaatgttggagaaatgccgatagatgagcgtcgtatgatcgtattcgagtttatcaaaacatattctacacgtccggcagattcgataacttatttgatgaataggtttaaaaatataaatatttatacccgctatgaaggaaagacattattacacgtagcatgtgaatataataatacacacgtaatagattatcttatacgtatcaacggagatataaatgcgttaaccgacaataacaaacacgctacacaactcattatagataacaaagaaaattccccgtataccatcgattgtttactgtatatacttagatatattgtagataagaatgtgataagatcgttggtggatcaacttccatctctacctatcttcgatataaaatcatttgagaaattcatatcctactgtatacttttagatgacacattttacgataggcacgttaagaatcgcgattctaaaacgtatcgatacgcattttcaaaatacatgtcgtttgataaatacgatggtataataactaaatgtcacgacgaaacaatgttactcaaactgtccactgttctagacactacactatatgcagttttaagatgccataattcgaaaaagttaagaagatacctcaacgagttaaaaaaatataataacgataagtcctttaaaatatattctaatattatgaatgagagataccttaatgtatattataaagatatgtacgtgtcaaaggtatatgataaactatttcctgttttcacagataaaaattgtctactaacattactaccttcagaaattatatacgaaatattatacatgctgacaattaacgatctttataatatatcgtatccacctaccaaagtatagttgtatttttctcatgcgatgtgtgtaaaaaaactgatattatataaatattttagtgccgtataataaagatgacgatgaaaatgatggtacatatatatttcgtatcattattgttattgctattccacagttacgccatagacatcgaaaatgaaatcacagaattcttcaataaaatgagagatactctaccagctaaagactctaaatggttgaatccagcatgtatgttcggaggcacaatgaatgatatagccgctctaggagagccattcagcgcaaagtgtcctcctattgaagacagtcttttatcgcacagatataaagactatgtggttaaatgggagaggctagaaaagaatagacggcgacaggtttctaataaacgtgttaaacatggtgatttatggatagccaactatacatctaaattcagtaaccgtaggtatttgtgtaccgtaactacaaagaatggtgactgtgttcagggtatagttagatctcatattaaaaaacctccttcatgcattccaaaaacatatgaactaggtactcatgataagtatggcatagacttatactgtggaattctttacgcaaaacattataataatataacttggtataaagataataaggaaattaatatcgacgacattaagtattcacaaacgggaaagaaattaattattcataatccagagttagaagatagtggaagatacaactgttacgttcattacgacgacgttagaatcaagaatgatatcgtagtatcaagatgtaaaatacttacggttataccgtcgcaagaccacaggtttaaactaatactagatccaaaaatcaacgtaacgataggagaacctgccaatataacatgcactgctgtgtcaacgtcattattgattgacgatgtactgattgaatgggaaaatccatccggatggcttataggattcgattttgatgtatactctgttttaactagtagaggcggtattaccgaggcgaccttgtactttgaaaatgttactgaagaatatataggtaatacatataaatgtcgtggacacaactattattttgaaaaaacccttacaactacagtagtattggagtaaatacacaatgcatttttatatacattactgaataattattattattatttatatcgtatttgtgctataacgcgactatctaggtatttgtatctcactgatagagaacatataaatatagactctattaaacagttgtgtaaaatatcaaatcctaatagatgtggatgtacggctttacatgagtacttttataattatagatcagtcaacggaaaatacaagtatagatacaacggttactatcaatattatttatctagcgattatgaaaattataatgaatattattatgatgattatgatagaactggtatgaacagtgagagtgataatatatcaatcaaaacagaatatgaattctatgatgaaacacaagatcaaagtacacaactagtaggttacgacattaaactcaaaaccaatgaggatgattttatggctatgatagatcagtgggtgtccatgattatatagatgaatcaattaataaagtagtatatggaagagagtctcacgtaagatggcgggatatatggcaagaacataatgatggcgtatacagtataggaaaggagtgcatagataatatatacgaagacaaccataccgtagacgaattctacaagatagacagcgtatcagatgtagatgacgcggaacacatatctccgataactaatgatgtatctacacaaacatgggaaaagaaatcagagttagatagatacatggaaatgtatcctcgtcatagatatagtaagcattctgtctttaagggattttctgacaaagttagaaaaaatgatttagacatgaatgtggtaaaagaattactttctaacggtgcatctctaacaattaaggatagcagtaataaggatccaataaccgtttattttcgaagaacgataatgaatttagaaatgattgatattattaacaaacatacaactattgatgaacgaaagtatatagtacactcctatctaaaaaattataaaaatttcgattatccatttttcaggaagttagttttgactaataaacattgtctcaacaattattataatataagcgacagcaaatatggaacaccgctacatatattggcgtctaataaaaaattaataactcctaattacatgaagttattagtgtataacggaaatgatataaacgcacgaggtgaagatacacaaatgcgaactccattacacaaatatttgtgtaaatttgtatatcataatattgaatatggtatccgatactataatgaaaagattatagacgcatttatagagttaggagccgatctaactattccaaataacgatggaatgataccagtagtttactgtatacactcaaatgcagaatatggttataacaatattactaacataaagataatacgtaaactacttaatcttagtagacgtgcgtcacataatctatttagagatcgagtcatgcacgattatataagtaatacatatattgatcttgagtgtttagatattattagatcgttggatggattcgatatcaatggttactttgaaggacgtacaccacttcattgcgctatacaacataacttcactcagattgctaagtacttattagatcgaggagctgatatagtcgtacccaacacattgattatacatcagtacatacagtaaatagcatagatatggaggaggatacaaatatttcaaataaagttataaggtacaacactgtcaataatatatggaagacattacctaacttctggactggaactataaatccaggcgtggtctcgcataaagatgatatatatgttgtatgcgacatcaaagatgaaaaaaatgttaagacttgtatatttagatataacacgaatacgtataacggatgggaattggttacgacgacagaaagcagattatcagctctgcatactattcttcatgacaataccataatgatgttacattgttatgaatcgtatatgttacaagatacatttaatgtgtacactcgcgaatggaatcatatgtgtcatcaacattcgaatagttatatcatgtacaatatactacccatctactaaatataatagaataaaataaatgagtatgatcattttagataacgattgattttatcattaccgcttcattcttatattctttgcttacggaacctatatttagaaacatctactaacgattttttatgcttgcattattaatggtatgtaatatgattgattgtgtacgcaataccaatttgttaagtatgaatacggggtacaaacataaactgaaatttaacattatttatttatgatatatatcgttatcgttattgtttggtctataccatggatatctttaaagaactaatcttaaaacaccctgatgaaaatgttttgatttctccagtttctattttatctactttatctattctaaatcatggagcagctggttctacagctgaacaactatcaaaatatatagagaatatgaatgagaatacacccgatgataagaaggatgacaataatgacatggacgtagatattccgtattgtgcgacactagctaccgcaaataaaatatacggtagcgatagtatcgagttccacgcctccttcctacaaaaaataaaagacgattttcaaactgtaaactttaataatgctaaccaaacaaaggaactaatcaacgaatgggttaagacgatgacaaatggtaaaattaattccttattgactagtccgctatccattaatactcgtatgacagttgttagcgccgtccattttaaagcaatgtggaaatatccattttctaaacatcttacatatacagacaagttttatatttctaagaatatagttaccagtgttgatatgatggtgggtaccgagaataacttgcaatatgtacatattaatgaattattcggaggattctctattatcgatattccatacgagggaaactctagtatggtaattatactaccggacgacatagaaggtatatataacatagaaaaaaatataacagatgaaaaatttaaaaaatggtgtggtatgttatctactaaaagtatagacttgtatatgccaaagtttaaagtggaaatgacagaaccgtataatctggtaccgattttagaaaatttaggacttactaatatattcggatattatgcagattttagcaagatgtgtaatgaaactatcactgtagaaaaatttctacatacgacgtttatagatgttaatgaggagtatacagaagcatcggccgttacaggagtatttatgactaacttttcgatggtatatcgtacgaaggtctacataaaccatccattcatgtacatgattaaagacaacacaggacgtatactttttatagggaaatactgctatccgcaataaatataaacaaatagacttttatcacgtttatctatgtctaaatattacaaatagtaatagtataaactaaagctgataatacttaaaaaaataataatatcatttacaattaatagtataaactaaaaattaaacaaatcgttattataagtaatatcaaaatgatgatatacggattaatagcgtgtcttatattcgtgacttcatccatcgctagtccactttatattcccgttattccacccattacggaagataaatcgttcaatagtgtagaggtattagtttccttgtttagagatgaccaaaaagactatacggtaacttctcagttcaataactacactatcgataccaaagactggactatcggcgtactatccacacctgatggtttggatataccattgactaatataacttattggtcacggtttactataggtcgtgcattgttcaaatcagagtctgaggatattttccaaaagaaaatgagtattctaggtgtttctatagaatgtaagaagtcgtcgacattacttacttttttgaccgtgcgtaaaatgactcgagtatttaataaatttccagatatggcttattatcgaggagactgtttaaaagccgtttatgtaacaatgacttataaaaatactaaaactggagagactgattacacgtacctctctaatggggggttgcctgcatactatcgtaatggggtcgatggttgattattgattagtatattccttattcacacaaaaagaacatttttataaacatgaaaccactgtctaaatgtaattatgatcttgatttatagatgaagatcagcctttagaggattttaaccagtatgtttaatatgaaaaaaataaacataacatattttgagattaagcgctattgtgcttaattattttgctctataaactgaatatatagccacaattattgacgggcttgtttatgaccggcaatcatgaatttacagaaattatctctggctatatatcttactgcgacatgttcgtggtgttatgaaacatgcataagaaaaactgcgttgtatcatgacattcaattggagcatgtagaagacaataaagatagtgtagcgtcgctaccgtacaagtagtcaatcaaagagaacgtagtagattgttggctacatttaattggacagatatagctgagggtgttagaaatgagttcattaaaatatgtgatatcaacggaacatatttatataattatactattgctgttagtataattattgattccacggaagaactaccaacagttactccaattacaacaacatatgaaccttctacatataattatactatcgatgatagcactgttattactactgaagaactacaagtgactcctcatatggatctccatcgatgatacatgtattaaaatactttccgaataagtcttttaaatattgtattaattatgaaaaactatgctatgcgagtatgatgcaaagatgtttaatgatacgatactagattttatctctagcgagagatgtcgttagaatcatttatcataactacgtttaataataattcatcaacgaatatcgataacatgtgtcatttatacgttaaagtctgtccgtcttctctattgtttagactgtttgtagaatgctgtgatataaacaaactagtagaaggtacgactccgttacactgttatctaatgaatgaaggatttgaatcatctgttttaaaaaacctattaaaggagtatgtcatgaatacgtttaatgttcatgacatccattacacaaatatttaactcatgatgaagttgagaatgatatgctttctgatagtatagatagctttagctaatataaaaatatattaatccactatatattctagacttgatttaaaaccgataaactactactacgtactgtataagttgttaaaaaaaggagcagaccctaattatgtagatgatagaggtaatacttttcttcattacttctgcatctatatgtccacttatgagaaaacgtcatttaataagatgcatcgtgaaaagaaatttattaaagagttggtaaaatatgaaaccgaaagtaaataatataggaaatacacctctacataactacgtatctcaatatgatatcactctcattcctcatccacaacccattaaaaaaatggaaattaaagccctctattagcataaacggctacaggtctacctttacaatggcctctccttgtgcccagttcagaccctgtcattgccacgctactaaggactccctgaataccgtggccgacgtcagacattgtctgactgaatacatcctgtgggtttctcatagatggacccatagagaaagcgcagggtctctctacaggcttctcatctctttcagaactgatgcaacggagctctttggtggtgagttgaaggattcacttccgtgggacaatatcgacaattgcgtggagatcattaaatgtttcatcagaaatgactccatgaaaaccgccgaagaacttcgtgcaatcattggactttgtactcaatcagctatcgtctctggaagagtcttcaacgataagtatatcgacatactacttatgctgcgaaagattctgaacgagaacgactatctcaccctcttggatcatatccgcactgctaaatactaaatctccttcatgctctctcactacactttttatcatcttatgaggaatgattgccttcatcatttttcgtgaaataggaataattagcaccagaatagctatggattgcacatgtattctatgtcgtctactggatgaagatgtgacgtacaaaaaaataaaactagaaattgaaacgtgtcacaacttatcaaaacatatagatagacgaggaaacaatgcgctacattgttacgtcttcaataaatgcgatacagacattaagattgttcgactgttactctctcgcggagtcgagagactttgtagaaacaacgaaggattaactccgctaggagcatacagtaagcatagatacgtaaaatctcaaattgtgcatctactgatatccagctattcgaattcctctaacgaactcaagtcgaatataaatgatttcgatctgtattcgtatatgtcttcggataatatcgacttacgtctgctaaaatacctaattgtggataaacggatacgtccgtccaagaatacgaattatgcaatcaatggtctcggattggtggatatatacgtaacgacgcctaatccgagaccagaagtattgctatggcttcttaaatcagaatgttacagcaccggttacgtatttcgtacctgtatgtacgacagtgatatgtgtaagaactctcttcattactatatatcgtctcatagagaatctcaatctctatccaaggatgtaattaaatgtttgatcaataacaatgtttccatccatggcagagacgaaggaggatctttacccatccaatactactggtcttgctcaaccatagatatagagattgttaaattattaataaaggatgtggacacgtgtagagtatacgacgtcagccctatattagaggcggattatctaaacaagcgatttagagtaaccccatataatgtagacatggaaatcgttaatcttcttattgagagacgtcatactcttgtcgacgtaatgcgtagtattacttcttacgattccagagactataaccactacatcatcgataacattctaaagagatttagacaacaggatgaatccatcgtacaagccatgttgataaactacttacattacggcgatatggtcgttcgatgcatgttagataacggacaacaactatcctctgcacgactactttgttaataataatctcgtcgatgtaaacgtcgtaaggtttatcgtggaaaataatggacacatggctgtaaatcacgtatcgaacaatggccgtctatgtatgtacggtctgatattatcgagatttaataattgcgggtatcactgttatgaaaccatactaatagatgtatttgatatactaagcaagtacatggataatatagatatgatcgataatgagaataaaactctactatattacgcggtcgatgtcaataatatacaatttgcaaagcggttattggaatatggagcgagtgttacaacatcacgctcgataatcaatacggccatccagaaaagtagttacagaagagaaaacaaaacgaggatagttgatttattacttagctaccatcccactctagagactatgattgacgcatttaatagagatatacgctatctatatcctgaaccattattcgcctgtatcagatacgccttaatcctagatgatgattttccttctaaagtaagtatgatatctccggtcgtcataaggaactaaagcgctatagagtagacattaatagaatgaagaatgcctacatatcaggcgtctccatgtttgatatattatttaaacgaagcaaacgccacagattgagatacgcaaagaatccgacatcaaatggtacaaaaaagaactaacgtccatcattacagaaactgtaaagaacaatgagaggatcgactccatagtggacaacattaatacagacgataacttgatttcgaaattacccatggagatactttattactccattaaataatttatcatggagcgataatgtcctgtttcatttgtttccatgacatattacaaaatcgattccgtccaagatgataaaaacatttaccggcatcataaacacggagtttattttatatgtctcgcataaacattactaaaaaaatatattgttcggttttctttcacatctttaattatgaaaaagtaaatcattatgagatggacgagattgtacgcatcgttcgcgacagtatgtggtacatacctaacgtatttatggacgacggtaagaatgaaggtcacgtttctgtcaacaatgtttgtcatatgtattttacgttctttgatgtggatacatcgtctcatctgtttaagctagttattaaacactgcgatctgaataaacgaggtaactctccattacattgctatacgatgaatacacgatttaatccatctgtattaaagatattgttacaccacggcatgcgtaactttgatagcaaggatgaaaaaggacatattcctctacaccactatctgattcattcactatcaatcgataacaagatctttgatatactaacggacaccattgatgactttagtaaatcatccgatctattgctgtgttatcttagatataaattcaatgggagcttaaactattacgttctgtacaaaggatccgaccctaattgcgtcgacgaggatggactcacttctcttcattactactgtaaacacatatccacgttctacaaaagcaattattacaagttaagtcacactaagatgcgagccgagaagcgattcatctacgcgataatagattatggagcaaacattaacgcggttacacacttaccttcaacagtataccaaacatagtcctcgtgtggtgtatgctcttttatctcgaggagccgatacgaggatacgtaataatcttgattgtacacccatcatggaacgattgtgcaacaggtcatattctcataatgttactcaattggcacgaacaaaaggaagaaggacaacatctactttatctattcataaaacataatcaaggatacactctcaatatactacggtatctactagataggttcgacattcagaaagacgaatactataataccgcctttcaaaattgtaacaacaatgttgcctcatacatcggatacgacatcaaccttccgactaaagacggtattcgacttggtgtttgaaaacagaaacatcatatacaaggcggatgttgtgaatgacatcatccaccacagactgaaagtatctctacctatgattaaatcgttgttctacaagatgtcagaattctctccctacgacgattactacgtaaaaaagatactagcctactgcctattaagggacgagtcattcgcggaactacatagtaaattctgtttaaacgaggactataaaagtgtatttatgaaaaatatatcattcgataagatagattccatcatcgtgacataagtcgccttaaagagattcgaatctccgacaccgacctgtatacggtatcacagctatcttaaagccatacattcggacagacacatttcatttcccatgtacgacgatctcatagaacagtgccatctatcgatggagcataaaagtaaactcgtcgacaaagcactcaataaattagagtctaccatcggtcaatctagactatcgtatttgcctccggaaattatgcgcaatatcatctaaacagtatgttgtacggaaagaaccattacaaatattatccatgatagaaagaaaatatctatatgattggagaagtaggaaacaggaacaagacgacgattactacattattaaatcatgaagtccgtattatactcgtatatattgtttctctcatgtataataataaacggaagagatatagcaccgcatgcaccatccgatggaaagtgtaaagacaacgaatacaaacgccataatttgtgtccgggaacatacgcttccagattatgcgatagcaagactaacacacgatgtacaccctgtggttcgggtaccttcacatctcgcaataatcatttacccgcttgtctaagttgtaacggaagacgcgatcgtgtaacacgactcacaatagaatctgtgaatgctctcccggatattattgtcttctcaaaggatcatccggatgcaaggcatgtgtttcccaaacaaaatgtggaataggatacggagtatccggagacgtcatctgttctccgtgtggtctcggaacatattctcacaccgtctcttccgcagataaatgcgaacccgtacccagtaatacctttaactatatcgatgtggaaattaatctgtatcccgtcaacgacacgtcgtgtactcggacgaccactaccggtctcagtgaatccatctcaacgtcggaactaactattactatgaatcataaagactgtaatcccgtatttcgtgaggaatacttctctgtccttaataaggtagcaacttcaggtttctttacaggagaaaggtgtgcactctgaatttcgagattaaatgcaataacaaagattcttcctccaaacagttaacgaaagcaaagaatgatgacggtatcatgccgcattcggagacagtaactctagtgggcgactgtatatctagcgtcgacatctatatactatatagtaataccaatactcaagactacgaaactgatacaatctcttatcatgtgggtaatgttctcgatgtcgatagccatatgcccggtagttgcgatatacataaactgatcactaattccaaacccacccgctttttatagtaagtttttcacccataaataataaatacaataattaatttctcgtaaaagtagaaaatatattctaatttattgcatggtaaggaagtagaatcataaagaacagtactcaatcaatagcaattatgaaacaatatatcgtcctggcatgcatgtgcctgccagtcttcagcaatcatcctcatcctcatcctcgtgtacggaagaagaaaacaaacatcatatgggaatcgatgttattatcaaagtcacaaagcaagaccaaacaccgaccaatgataagatttgccaatccgtaacggaaattacagagtccgagtcagatccaaatcccgaggtggaatcagaagatgattccacatcagtcgaggatgtagatcctcctaccacttattactccatcatcggtggaggtctgagaatgaactttggattcaccaaatgtcctcagattaaatccatctcagaatccgctgatggaaacacagtgaatgctagattgtccagcgtgtccccaggacaaggtaaggactctcccgcgatcactcatgaagaagctcttgctatgatcaaagactgtgaggtgtctatcgacatcagatgtagcgaagaagagaaagacagcgacatcaagacccatccagtactcgggtctaacatctctcataagaaagtgagttacgaagatatcatcggttcaacgatcgtcgatacaaaatgtgtcaagaatctagagtttagcgttcgtatcggagacatgtgcaaggaatcatctgaacttgaggtcaaggatggattcaagtatgtcgacggatcggcatctgaaggtgcaaccgatgatacttcactcatcgattcaacaaaactcaaagcgtgtgtctgaatcgataactctattcatctgaaattggatgagtagggttaatcgaacgattcaggcacaccacgaattaaaaaagtgtaccggacactatattccggtttgcaaaacaaaaatgttcttaactacattcacaaaaagttacctctcgcgacttcttctttttctgtctcaatagtgtgatacgattatgacactattcctattcctattcctatttcctttcagggtatcacaaaaatattaaacctctttctgatggtctcataaaaaaagttttacaaaaatatttttattctctttctctctttgatggtctcataaaaaaagttttacaaaaatatttttattctctttctctctttgat

SEQ ID NO: 4 - DNA, 195197 bp, Vaccinia virus
  source 1..195197: mol_type = other DNA
  misc_feature 1..195197: note = VIR13
atcaaagagagaaagagaataaaaatatttttgtaaaactttttttatgagaccatcaaagagagaaagagaataaaaatatttttgtaaaactttttttatgagaccatcagaaagaggtttaatatttttgtgataccctgaaaggaaataggaataggaataggaatagtgtcataatcgtatcacactattgagacagaaaaagaagaagtcgcgagaggtaactttttgtgaatgtagttaagaacatttttgttttgcaaaccggaatatagtgtccggtacacttttttaattcgtggtgtgcctgaatcgttcgattaaccctactcatccaatttcagatgaatagagttatcgattcagacacacgctttgagttttgttgaatcgatgagtgaagtatcatcggttgcaccttcagatgccgatccgtcgacatacttgaatccatccttgacctcaagttcagatgattccttgcacatgtctccgatacgaacgctaaactctagattcttgacacattttgtatcgacgatcgttgaaccgatgatatcttcgtaactcactttcttatgagagatgttagacccgagtactggatgggtcttgatgtcgctgtctttctcttcttcgctacatctgatgtcgatagacacctcacagtctttgatcatagcaagagcttcttcatgagtgatcgcgggagagtccttaccttgtcctggggacacgctggacaatctagcattcactgtgtttccatcagcggattctgagatggatttaatctgaggacatttggtgaatccaaagttcattctcagacctccaccgatgatggagtaataagtggtaggaggatctacatcctcgactgatgtggaatcatcttctgattccacctcgggatttggatctgactcggactctgtaatttccgttacggattggcaaatcttatcattggtcggtgtttggtcttgctttgtgactttgataataacatcgattcccatatgatgtttgttttcttcttccgtacacgaggatgaggatgaggatgattgctgaagactggcaggcacatgcatgccaggacgatatattgtttcataattgctattgattgagtactgttctttatgattctacttccttaccatgcaataaattagaatatattttctacttttacgagaaattaattattgtatttattatttatgggtgaaaaacttactataaaaagcgggtgggtttggaattagtgatcagtttatgtatatcgcaactaccgggcatatggctatcgacatcgagaacattacccacatgataagagattgtatcagtttcgtagtcttgagtattggtattactatatagtatatagatgtcgacgctagatatacagtcgcccactagagttactgtctccgaatgcggcatgataccgtcatcattctttgctttcgttaactgtttggaggaagaatctttgttattgcatttaatctcgaaattcagagtgcacacctttctcctgtaaagaaacctgaagttgctaccttattaaggacagagaagtattcctcacgaaatacgggattacagtctttatgattcatagtaatagttagttccgacgttgagatggattcactgagaccggtagtggtcgtccgagtacacgacgtgtcgttgacgggatacagattaatttccacatcgatatagttaaaggtattactgggtacgggttcgcatttatctgcggaagagacggtgtgagaatatgttccgagaccacacggagaacagatgacgtctccggatactccgtatcctattccacattttgtttgggaaacacatgccttgcatccggatgatcctttgagaagacaataatatccgggagagcattcacagattctattgtgagtcgtgttacacgatcgcgtcttccgttacaacttagacaagcgggtaaatgattattgcgagatgtgaaggtacccgaaccacagggtgtacatcgtgtgttagtcttgctatcgcataatctggaagcgtatgttcccggacacaaattatggcgtttgtattcgttgtctttacactttccatcggatggtgcatgcggtgctatatctcttccgtttattattatacatgagagaaacaatatatacgagtataatacggacttcatgatttaataatgtagtaatcgtcgtcttgttcctgtttcctacttctccaatcatatagatattttctttctatcatggataatatttgtaatggttctttccgtacaacatactgtttagatgatattgcgcataatttccggaggcaaatacgatagtctagattgaccgatggtagactctaatttattgagtgctttgtcgacgagtttacttttatgctccatcgatagatggcactgttctatgagatcgtcgtacatgggaaatgaaatgtgtctgtccgaatgtatggctttaagatagctgtgataccgtatacaggtcggtgtcggagattcgaatctctttaaggcgacttatgtcacgatgatggaatctatcttatcgaatgatatatttttcataaatacacttttatagtcctcgtttaaacagaatttactatgtagttccgcgaatgactcgtcccttaataggcagtaggctagtatcttttttacgtagtaatcgtcgtagggagagaattctgacatcttgtagaacaacgatttaatcataggtagagatactttcagtctgtggtggatgatgtcattcacaacatccgccttgtatatgatgtttctgttttcaaacaccaagtcgaataccgtctttagtcggaaggttgatgtcgtatccgatgtatgaggcaacattgttgttacaattttgaaaggcggtattatagtattcgtctttctgaatgtcgaacctatctagtagataccgtagtatattgagagtgtatccttgattatgttttatgaatagataaagtagatgttgtccttcttccttttgttcgtgccaattgagtaacattatgagaatatgacctgttgcacaatcgttccatgatgggtgtacaatcaagattattacgtatcctcgtatcggctcctcgagataaaagagcatacaccacacgaggactatgtttggtatactgttgaaggtaagtgtgtaaccgcgttaatgtttgctccataatctattatcgcgtagatgaatcgcttctcggctcgcatcttagtgtgacttaacttgtaataattgcttttgtagaacgtggatatgtgtttacagtagtaatgaagagaagtgagtccatcctcgtcgacgcaattagggtcggatcctttgtacagaacgtaatagtttaagctcccattgaatttatatctaagataacacagcaatagatcggatgatttactaaagtcatcaatggtgtccgttagtatatcaaagatcttgttatcgattgatagtgaatgaatcagatagtggtgtagaggaatatgtcctttttcatccttgctatcaaagttacgcatgccgtggtgtaacaatatctttaatacagatggattaaatcgtgtattcatcgtatagcaatgtaatggagagttacctcgtttattcagatcgcagtgtttaataactagcttaaacagatgagacgatgtatccacatcaaagaacgtaaaatacatatgacaaacattgttgacagaaacgtgaccttcattcttaccgtcgtccataaatacgttaggtatgtaccacatactgtcgcgaacgatgcgtacaatctcgtccatctcataatgatttactttttcataattaaagatgtgaaagaaaaccgaacaatatatttttttagtaatgtttatgcgagacatataaaataaactccgtgtttatgatgccggtaaatgtttttatcatcttggacggaatcgattttgtaatatgtcatggaaacaaatgaaacaggacattatcgctccatgataaattatttaatggagtaataaagtatctccatgggtaatttcgaaatcaagttatcgtctgtattaatgttgtccactatggagtcgatcctctcattgttctttacagtttctgtaatgatggacgttagttcttttttgtaccatttgatgtcggattctttgcgtatctcaatctgtggcgtttgcttcgtttaaataatatatcaaacatggagacgcctgatatgtaggcattcttcattctattaatgtctactctatagcgctttagttccttatgacgaccggagatatcatacttactttagaaggaaaatcatcatctaggattaaggcgtatctgatacaggcgaataatggttcaggatatagatagcgtatatctctattaaatgcgtcaatcatagtctctagagtgggatggtagctaagtaataaatcaactatcctcgttttgttttctcttctgtaactacttttctggatggccgtattgattatcgagcgtgatgttgtaacactcgctccatattccaataaccgctttgcaaattgtatattattgacatcgaccgcgtaatatagtagagttttattctcattatcgatcatatctatattatccatgtacttgcttagtatatcaaatacatctattagtatggtttcataacagtgatacccgcaattattaaatctcgataatatcagaccgtacatacatagacggccattgttcgatacgtgatttacagccatgtgtccattattttccacgataaaccttacgacgtttacatcgacgagattattattaacaaagtagtcgtgcagaggatagttgttgtccgttatctaacatgcatcgaacgaccatatcgccgtaatgtaagtagtttatcaacatggcttgtacgatggattcatcctgttgtctaaatctctttagaatgttatcgatgatgtagtggttatagtctctggaatcgtaagaagtaatactacgcattacgtcgacaagagtatgacgtctctcaataagaagattaacgatttccatgtctacattatatggggttactctaaatcgcttgtttagataatccgcctctaatatagggctgacgtcgtatactctacacgtgtccacatcctttattaataatttaacaatctctatatctatggttgagcaagaccagtagtattggatgggtaaagatcctccttcgtctctgccatggatggaaacattgttattgatcaaacatttaattacatccttggatagagattgagattctctatgagacgatatatagtaatgaagagagttcttacacatatcactgtcgtacatacaggtacgaaatacgtaaccggtgctgtaacattctgatttaagaagccatagcaatacttctggtctcggattaggcgtcgttacgtatatatccaccaatccgagaccattgattgcataattcgtattcttggacggacgtatccgtttatccacaattaggtattttagcagacgtaagtcgatattatccgaagacatatacgaatacagatcgaaatcatttatattcgacttgagttcgttagaggaattcgaatagctggatatcagtagatgcacaatttgagattttacgtatctatgcttactgtatgctcctagcggagttaatccttcgttgtttctacaaagtctctcgactccgcgagagagtaacagtcgaacaatcttaatgtctgtatcgcatttattgaagacgtaacaatgtagcgcattgtttcctcgtctatctatatgttttgataagttgtgacacgtttcaatttctagttttatttttttgtacgtcacatcttcatccagtagacgacatagaatacatgtgcaatccatagctattctggtgctaattattcctatttcacgaaaaatgatgaaggcaatcattcctcataagatgataaaaagtgtagtgagagagcatgaaggagatttagtatttagcagtgcggatatgatccaagagggtgagatagtcgttctcgttcagaatctttcgcagcataagtagtatgtcgatatacttatcgttgaagactcttccagagacgatagctgattgagtacaaagtccaatgattgcacgaagttcttcggcggttttcatggagtcatttctgatgaaacatttaatgatctccacgcaattgtcgatattgtcccacggaagtgaatccttcaactcaccaccaaagagctccgttgcatcagttctgaaagagatgagaagcctgtagagagaccctgcgctttctctatgggtccatctatgagaaacccacaggatgtattcagtcagacaatgtctgacgtcggccacggtattcagggagtccttagtagcgtggcaatgacagggtctgaactgggcacaaggagaggccattgtaaaggtagacctgtagccgtttatgctaatagagggctttaatttccatttttttaatgggttgtggatgaggaatgagagtgatatcatattgagatacgtagttatgtagaggtgtatttcctatattatttactttcggtttcatattttaccaactctttaataaatttcttttcacgatgcatcttattaaatgacgttttctcataagtggacatatagatgcagaagtaatgaagaaaagtattacctctatcatctacataattagggtctgctcctttttttaacaacttatacagtacgtagtagtagtttatcggttttaaatcaagtctagaatatatagtggattaatatatttttatattagctaaagctatctatactatcagaaagcatatcattctcaacttcatcatgagttaaatatttgtgtaatggatgtcatgaacattaaacgtattcatgacatactcctttaataggttttttaaaacagatgattcaaatccttcattcattagataacagtgtaacggagtcgtaccttctactagtttgtttatatcacagcattctacaaacagtctaaacaatagagaagacggacagactttaacgtataaatgacacatgttatcgatattcgttgatgaattattattaaacgtagttatgataaatgattctaacgacatctctcgctagagataaaatctagtatcgtatcattaaacatctttgcatcatactcgcatagcatagtttttcataattaatacaatatttaaaagacttattcggaaagtattttaatacatgtatcatcgatggagatccatatgaggagtcacttgtagttcttcagtagtaataacagtgctatcatcgatagtataattatatgtagaaggttcatatgttgttgtaattggagtaactgttggtagttcttccgtggaatcaataattatactaacagcaatagtataattatataaatatgttccgttgatatcacatattttaatgaactcatttctaacaccctcagctatatctgtccaattaaatgtagccaacaatctactacgttctctttgattgactacttgtacggtagcgacgctacactatctttattgtcttctacatgctccaattgaatgtcatgatacaacgcagtttttcttatgcatgtttcataacaccacgaacatgtcgcagtaagatatatagccagagataatttctgtaaattcatgattgccggtcataaacaagcccgtcaataattgtggctatatattcagtttatagagcaaaataattaagcacaatagcgcttaatctcaaaatatgttatgtttatttttttcatattaaacatactggttaaaatcctctaaaggctgatcttcatctataaatcaagatcataattacatttagacagtggtttcatgtttataaaaatgttctttttgtgtgaataaggaatatactaatcaataatcaaccatcgaccccattacgatagtatgcaggcaaccccccattagagaggtacgtgtaatcagtctctccagttttagtatttttataagtcattgttacataaacggcttttaaacagtctcctcgataataagccatatctggaaatttattaaatactcgagtcattttacgcacggtcaaaaaagtaagtaatgtcgacgacttcttacattctatagaaacacctagaatactcattttcttttggaaaatatcctcagactctgatttgaacaatgcacgacctatagtaaaccgtgaccaataagttatattagtcaatggtatatccaaaccatcaggtgtggatagtacgccgatagtccagtctttggtatcgatagtgtagttattgaactgagaagttaccgtatagtctttttggtcatctctaaacaaggaaactaatacctctacactattgaacgatttatcttccgtaatgggtggaataacgggaatataaagtggactagcgatggatgaagtcacgaatataagacacgctattaatccgtatatcatcattttgatattacttataataacgatttgtttaatttttagtttatactattaattgtaaatgatattattatttttttaagtattatcagctttagtttatactattactatttgtaatatttagacatagataaacgtgataaaagtctatttgtttatatttattgcggatagcagtatttccctataaaaagtatacgtcctgtgttgtctttaatcatgtacatgaatggatggtttatgtagaccttcgtacgatataccatcgaaaagttagtcataaatactcctgtaacggccgatgcttctgtatactcctcattaacatctataaacgtcgtatgtagaaatttttctacagtgatagtttcattacacatcttgctaaaatctgcataatatccgaatatattagtaagtcctaaattttctaaaatcggtaccagattatacggttctgtcatttccactttaaactttggcatatacaagtctatacttttagtagataacataccacaccattttttaaatttttcatctgttatatttttttctatgttatatataccttctatgtcgtccggtagtataattaccatactagagtttccctcgtatggaatatcgataatagagaatcctccgaataattcattaatatgtacatattgcaagttattctcggtacccaccatcatatcaacactggtaactatattcttagaaatataaaacttgtctgtatatgtaagatgtttagaaaatggatatttccacattgctttaaaatggacggcgctaacaactgtcatacgagtattaatggatagcggactagtcaataaggaattaattttaccatttgtcatcgtcttaacccattcgttgattagttcctttgtttggttagcattattaaagtttacagtttgaaaatcgtcttttattttttgtaggaaggaggcgtggaactcgatactatcgctaccgtatattttatttgcggtagctagtgtcgcacaatacggaatatctacgtccatgtcattattgtcatccttcttatcatcgggtgtattctcattcatattctctatatattttgatagttgttcagctgtagaaccagctgctccatgatttagaatagataaagtagataaaatagaaactggagaaatcaaaacattttcatcagggtgttttaagattagttctttaaagatatccatggtatagaccaaacaataacgataacgatatatatcataaataaataatgttaaatttcagtttatgtttgtaccccgtattcatacttaacaaattggtattgcgtacacaatcaatcatattacataccattaataatgcaagcataaaaaatcgttagtagatgtttctaaatataggttccgtaagcaaagaatataagaatgaagcggtaatgataaaatcaatcgttatctaaaatgatcatactcatttattttattctattatattaacacatacatttttaacagcaacacattcaatattgtattgttatttttatattatttacacaattaacaatatattattagtttatattactgaattaataatataaaattcccaatcttgtcataaacacacactgagaaacagcataaacacaaaatccatcaaaaatgtcgatgaaatatctgatgttgttgttcgctgctatgataatcagatcattcgccgatagtggtaacgctatcgaaacgacattgccagaaattacaaacgctacaacagatattccagctatcagattatgcggtccagagggagatggatattgtttacacggtgactgtatccacgctagagatatcgacggtatgtattgtagatgctctcatggttatacaggcattagatgtcagcatgtagtattagtagactatcaacgttcagaaaaaccaaacactacaacgtcatatatcccatctcccggtattgtgcttgtattagtaggcattattattatgtgttgtctattatctgtttataggttcactcgaagaactaataaactacctctacaagatatggttgtgccataatttttataaatttttttatgagtatttttacaaaaaaaatgtataaagtgtatgtcttatgtatatttataaaaatgctaagtatgcgatgtatctatgttatttgtatttatctaaacaatacctctacctctagatattatacaaaaattttttatttcggcatattaaagtaaaatctagttaccttgaaaatgaatacagtgggtggttccgtatcaccagtaagaacataatagtcgaatacagtatccgattgagattttgcatacaatactagtctagaaagaaatttgtaatcattttctgtgacgggagtccatatatctgtatcatcgtctagtttatcagtgtcccatgctatatttctgttatcatcattagttaatgaaaataactctcgtgcttcagaaaagtcaaatattgtatccatacatacatctccaaaactatcgcttatacgtttatctttaacgatacctatacctagatggttatttactaacagacattttccagatctattgactataactcctatagtttccacatcaaccaagtaatgatcatctattgttatataacaataacataactcttttccatttttatcagtatgtatatctatatcaacgtcgtcgttgtagtgaatagtagtcattgatctattatatgaaacggatatgtctagaacggcaattgtcttacgtccagttaacactttcgttgatttaaagtctagagtctttgcaaacataatatccttatccgactttatatttcctgtagggtggtataattttattttgcctccacatatcggtgtttccaaatatattactagacaatattccatatagttattagttaagggtacccaattagaacacgtacgcttattatcatcatttggatcgtatttcataaaagttattgtactatcgatgtcaacacattctacattttttaatcgtctatatagtatttttctgatattttctataatatcagaattgtcttccatcggaagttgtatactatcggaatcagttacatgtttaaataattctctgatgtcattccttatacaatcaaattcattattaaacagtttaatagtctgtagacctttatcgtcgtaaatatccattgtcttattagttacgcttatttttatgtgttttacgttgctttattatattttataagaatgattgtttgacgaatcacgagaactattaagacacattattaggtatatattataaaaaagtttttgattacgatgttataagaggaaagaggacacattaacatcatacatcaattaactacattcttataacatcgtaatcaaaagaattgcaattttgatgtataacaactgtcaatgggttatggaattgtatattacatattatacggtatgttggtaacgacaaataccgatcggtaatcgtttgccggtgtaatagaattatatatatctatctattacaccggctgagtatacataataataagttgtggtagtatgatctccatatttataatttaggactttgtattcagtatttttggaatcataaaaaataaaaaaaagttttactaatttaaaatttaaaaagtatttacatttttttcactgtttagtcgcggatatggaattcgatcctgccaaaatcaatacatcatctatagatcatgtaacaatattacaatacatagatgaaccaaatgatataagactaacagtatgcattatccgaaatattaataacattacatattatatcaatatcacaaaaataaatacacatttggctaatcaatttcgggcttggaaaaaacgtatcgccggaagggactatatgactaacttatctagagatacaggaatacaacaatcaaaacttactgaaactatacgtaactgtcaaaaaaatagaaacatatatggtctatatatacactacaatttagttattaatgtggttattgattggataaccgatgtgattgttcaatcaatattaagagggttggtaaattggtacatagctaataatacctatactccaaatacacccaataatacaacaaccatttctgagttggatatcatcaaaatactaaataaatacgaggacgtgtatagagtaagtaaagaaaaagaatgtggaatttgctatgaagttgtttactcaaaacgattagaaaacgatagatactttggtttattggattcgtgtactcatatattttgcataacatgcatcaatatatggcataaaacacgaagagaaaccggtgcgtcggataattgtcctatatgtcgtacccgttttagaaacataacaatgagcaagttctataagctagttaactaataaataaaaagtttaatttgttgacgacgtatgtcgttattttttctcgtataaaagattaatttgattctaatataatctttagtattggataaatatcaattcaaattaattccattagattatatcataaataaaaatagtagcacgcactacttcagccaaatattcttttttgaaacgccatctatcgtagtgaggacacaagtgaacctataatgagcaaatttattagtatcggttacatgaaggactttacgtagagtggtgattccactatctgtggtacgaacggtttcatcttctttgatgccatcacccagatgttctataaacttggtatcctcgtccgatttcatatcctttgccaaccaatacatatagctaaactcaggcatatgttccacacatcctgaacaatgaaattctccagaagatgttacaatgtctagatttggacatttggtttcaaccgcgttaacatatgagtgaacacacccatacatgaaagcgatgagaaataggattttcatcttgccaaaatatcactagaaaaaatttatttatcaattttaaaggtataaaaaatacttattgttgctcgaatattttgtatttgatggtatacggaagattagaaatgtaggtattatcatcaactgattctatggttttatgtattctatcatgtttcactattgcgttggaaataatatcatatgcttccacatatattttattttgttttaactcataatactcacgtaattctggattattggcatatctgtgaataattttagctccatgatcagtaaatattaatgagaacatagtattaccacctaccattatttttttcatttcgttcaattcttgattgcaaagatctatataatcattatagcgttgacttatggactctggaatcttagacgatgtacagtcatctataatcatggcatatttaatacattgttttatagcatagtagttatctacgatgttagatatttctctcaatgaatcaatcacacaatctaatgtaggtttatgacataatagcattttcagcagttcaatgtttctagattcgttgatggcaatggctatacatgtatatccgttatttgatctaatgttgacatctgaaccggattctagcagtaaagatactagagattgtttattatatctaacagccttgtgaagaagtgtttctcctcgtttgtcaatcatgttaatgtctttaagataaggtaggcaaatgtttatagtactaagaattgggcaagcataagacatgtcacaaagaccctttttgtatgtataagtgtagaaattataacatccatagttggatttacataggtgtccaatcgggatctctccatcatcgagatgattgacggcatctcccccttccttttttagtagatatttcatcgtgtaagaatcaatattaatatttctaaagtatccgtgtatagcctctttatttaccacagctccatattccaacatgcattccactaaagggatatcgatatcgccgaatgtcatatactcaattagtatatgttggaggacatccgagttcattgttttcaatatcaaagagatggtttccttatcatttctccatagtggtacaatactacacattattccgtgaggctttccattctccaaaaacaatttgaccaaatctacatctttattgtatctataatcactatttagataatcagccataattcctcgagtgcaacatgttagatcgtctatatatgaataagccgtgttatctattcctttcattaacaatttaacgatgtctatatctatatgagatgacttaatataatattgaagagctgtacaatagtttttatctatagaagacggcttgattccgtgattaattagacatttaacaacttccggacgcacatatgctctcgtatccgactctgaatacagatgagagatgatatacagatgcaatacggtaccgcaatttcgtagttgataatcatcatacgcgtatccgtactcgtcctcataaagaacactgcagccattttctatgaacaaatcaataattttaggaacaggatcattgtcattacataattttctataactgaacgatggttttcacatttaacactcaagtcaaatccatgttctaccaacacctttatcaagtcaacgtctacatttttggatttcatatagctgaatatattaaagtcatttatgttgctaaatccagtggcttctagtagagccatcgctatatcctttaactttaacatgtctactatttgtgtattcttctaatggggtagctgtctccaatttttgcgtaatggattagtgccactgtctagtagtagtttgacgacctcgacattattacaatgctcattaaaaaggtatgcgtgtaaagcattattcttgaattggttcctggtatcattaggatctctgtctctcaacatctgtttaagttcatcgagagccacctcctcattttccaaatagtcaaacattttgactgaatagaagtgaatgagctactgtgaactctatacacccacacaactaatgtcattaaatattatttttttgaatgtatttataccatgtcaaaaacttgtacaattattaataaaaataatttagtgtttaaattttaccagttccagattttacacctccgttaaccccactttttacaccactggacgaccctcctccccacattccaccgccaccagatgtataagttttagatcctttattactaccatcatgtccatggataaagacactccacatgccgccactaccccctttagaagacatattaataagacttaagagttaaggacaagtttaacaataaaattaatcacgagtaccctactaccaacctacactattatatgattatagtttctatttttacagtaccttaactaaagtttctagtcacaagagcaatactaccaacctacactattatatgattatagtttctatttttataggaacgcgtacgagaaaatcaaatgtctaatttctaacggtagtgttgataaacgattatcgtcaatggatacctcctctatcatgtcgtctattttcttactttgttctattaacttattagcattatatattatttgattataaaacttatattgcttattagcccaatctgtaaatatcggattattaacatatcgtttctttgtaggtttatttaacttgtacatcactgtaagcatgtccgtaccatttattttaatttgacgcatatccgcaatttctttttcgcagtcggttataaattctatatatgatggatacatgctacatgtgtacttataatcgactaatatgaagtacttgatacatattttcagtaacgatttattattaccacctatgaataagtacctgtgatcgtctaggtaatcaactgttttcttaatacattcgatggttggtaatttactcagaataatttccaatatcttaatatataattctgctatttctggaatatatttatctgccagtataacacaaatagtaatacatgtaaacccatattttgttattatattaatgtctgcgccattatctattaaccattctactaggctgacactatgcgacttaatacaatgataaagtatactacatccatgtttatctattttgtttatatcatcaatatacggcttacaaagttttagtatcgataacacatccaactcacgcatagagaaggtagggaataatggcataatatttattaggttatcatcattgtcattatctacaactaagtttccattttttaaaatatactcgacaactttaggatctctattgccaaatttttgaaaatatttatttatatgcttaaatctatataatgtagctccttcatcaatcatacatttaataacattgatgtatactgtatgataagatacatattctaacaatagatcttgtatagaatctgtatatcttttaagaattgtggatattaggatattattacgtaaactattacacaattctaaaatataaaacgtatcacggtcgaataatagttgatcaactatataattatcgattttgtgatttttcttcctaaactgtttacgtaaatagttagatagaatattcattagttcatgaccactatagttactatcgaataacgcgtcaaatatttcccgtttaatatcgcatttgtcaagataataatagagtgtggtatgttcacgataagtataataacgcatctctttttcgtgtgaaattaaatagtttatcacgtccaaagatgtagcataaccatcttgtgacctagtaataatataataatagagaactgttttacccattctatcatcataatcagtggtgtagtcgtaatcgtaatcgtctaattcatcatcccaattataatattcaccagcacgtctaatctgttctattttgatcttgtatccatactgtatgttgctacatgtaggtattcctttatccaataatagtttaaacacatctacattgggatttgatgttgtagcgtatttctctacaatattaataccatttttgatactatttatttctatacctttcgaaattagtaatttcaataagtctatatcgatgttatcagaacatagatattcgaatatatcaaaatcattgatatttttatagtcgactgacgacaataacaaaatcacaacatcgtttttgatattattatttttcttggtaacgtatgcctttaatggagtttcaccatcatactcatataatggatttgcaccactttctatcaatgattgtgcactgctggcatcgatgttaaatgttttacaactatcatagagtatcttatcgttaaccatgattggttgttgatgctatcgcattttttggtttctttcatttcagttatgtatggatttagcacgtttgggaagcataagctcatatgatttcagtactgtagtgtcagtactattagtttcgatcagatcaatgtctagatctatagaatcaaaacacgataggtcagaagataatgaatatctgtaggcttcttgttgtactgtaacttctcgttttgttagatggttgcatcgtgctttaacatcaatggtacaaattttatcctcgctttgtgtatcatattcgtccctactataaaattgtatattcagattatcatgagatgtgtatacgctaacggtatcaataaacggagcacaccatttagtcataaccgtaatccaaaaatttttaaagtatatcttaacgaaagaagttgtgtcattgtctacggtgtatggtactagatcctcataagtgtatatatctagagtaatgtttaatttatcaaatggttgataatatggatcctcatggcaatttcctaagacgaaaataagacataaacacgcaataaatctaattgcggacatggttactccttaaaaaaatactaataatcaccttggctatttagtaagtgtcatttaacactatactcatattaatccatggactcataatctctatacgggattaacggatgttctatatacggggatgagtagttctcttctttaactttatactttttactaatcatatttagactgatgtatgggtaatagtgtttgaagagctcgttctcatcatcagaataaatcaatatctctgtttttttgttatacagatgtattacagcctcatatattacgtaatagaacgtgtcatctaccttattaactttcaccgcatagttgtttgcaaatacggttaatcctttgacctcgtcgatttccgaccaatctgggcgtataatgaatctaaactttaatttcttgtaatcattcgaaataatttttagtttgcatccgtagttatcccctttatgtaactgtaaatttctcaacgcgatatctccattaataatgatgtcgaattcgtgctgtatacccatactgaatggatgaacgaataccgacggcgttaatagtaatttactttttcatctttacatattgggtactagttttactatcataagtttataaattccacaagctactatggaataagccaaccatcttagtataacacacatgtcttaaagtttattaattaattacatgttgttttatatatcgctacgaatttaaacagagaaatcagtttaggaaaaaaaattatctatctacatcatcacgtctctgtattctacgatagagtgctactttaagatgagacatatccgtgtcatcaaaaatatactccattaaaatgattattccggcagcgaacttgatattggatatatcacaacctttgttaatatctacgacaatagacagcagtcccatggttccataaacagtgagtttatctttctttgaagagatattttgtagagatcttataaaactgtcgaatgacatcgcatttatatctttagctaaatcgtatatgttaccatcgtaatatctaaccgcgtctatcttaaacgtttccatcgctttaaagacgtttccgatagatggtctcatttcatcagtcatactgagccaacaaatataatcgtgtataacatctttgatagaatcagactctaaagaaaacgaatcggctttattatacgcattcatgataaacttaatgaaaaatgtttttcgttgtttaagttggatgaatagtatgtcttaataattgttattatttcattaattaatatttagtaacgagtacactctataaaaacgagaatgacataactaatcataactagttatcaaagtgtctaggacgcgtaattttcatatggtatagatcctgtaagcattgtctgtattctggagctattttctctatcgcattagtgagttcagaatatgttataaatttaaatcgaataacgaacataactttagtaaagtcgtctatattaactcttttattttctagccatcgtaataccatgtttaagatagtatattctctagttactacgatctcatcgttgtctagaatatcacatactgaatctacatccaattttagaaattggtctgtgttacatatctcttctatattattgttgatgtattgtcgtagaaaactattacgtagaccattttctttataaaacgaatatatagtactccaattatctttaccgatatatttgcacacataatccattctctcaatcactacatctttaagattttcgttgttaagatatttggctaaactatataattctattagatcatcaacagaatcagtatatatttttctagatccaaagacgaactctttggcgtcctctataatattcccagaaaagatattttcgtgttttagtttatcgagatctgatctgttcatatacgccatgattgtacggtacgttatgataaccgcataaaataaaaatccattttcatttttaaccaatactattcataattgagattgatgtaatactttgttactttgaacgtaaagacagtacacggatccgtatctccaacaagcacgtagtaatcaaatttggtgttgttaaacttcgcaatatttatcaatttagatagaaacttatactcatcatctgttttaggaatccatgtattattaccactttccaacttatcattatcccaggctatgtttcgtccatcatcgttgcgcagagtgaataattcttttgtattcggtagttcaaatatataatccatgcatagatcggtaaagctattgtagatgtgatttttcctaaatctaatataaaactcgtttactagcaaacactttcctgatttatcgaccaagacacatatggtttctaaatctatcaagtggtggggatccatagttatgacgcagtaacatagattattaccttcttaactgtcgctaatatctatatatttattgttatcgtattggattctgcatatagatggcttgtatgtcaaagatatagaacacataaccaatttatagtcgcgctttacattctcgaatctaaagttaagagatttagaaaacattatatcctcggatgatgttatcactgtttctggagtaggatatattaaagtctttacagatttcgtccgattcaaataaatcactaaataatatcccacattatcatctgttagagtagtatcattaaatctattatattttatgaaagatatatcactgctcacctctatatttcgtacatttttaaactgtttgtataatatctctctgatacaatcagatatatctattgtgtcggtagacgataccgttacatttgaattaatggtgttccattttacaacttttaacaagttgaccaattcatttctaatagtatcaaacgctccatgattaaatattttaatagtatccattttatatcactacggacacaaagtagctgacataaaccattgtataatttttatgttttatgtttattagcgtacacattttggaagttccggcttccatgtatttcctggagagcaagtagatgatgaggaaccagataggttatatccgtacttgcacttaaagtttacattgtcgttgtatgagtatgatcttttaaacccgctagacaagtatccgtttgatattgtaggatgtggacatttaacaatctgacacgtgggtggatcggaccattctcctcctgaacacaggacaccagagttaccaatcaacgaatatccactattgcaactataagttacaacgcttccatcggtataaaaatcctcgtatccgttatgtcttccgttggatatagatggaggggattggcatttaacagattcacaaataggtgcctcgggattccataccatagatccagtagatcctaattcacaatacgatttagattcaccgatcaaatgatatccgctattacaagagtacgttatactagagccaaagtctactccgccaatatcaagttggccattatcgatatctcgaggcgatgggcatctccgtttaatacattgattaaagagtgtccatccagtacctgtacatttagcatatataggtcccattttttgctttctgtatccaggtagacatagatattctatagtgtctcctatgttgtaattagcattagcatcagtctccacactattcttaaatttcatattaatgggtcgtgacggaatagtacagcatgatagaacgcatcctattcccaacaatgtcaggaacgtcacgctctccaccttcatatttatttatccgtaaaaatgttatcctggacatcgtacaaataataaaaagcccatatatgttcgctattgtagaaattgtttttcacagttgctcaaaaacgatggcagtgacttatgagttacgttacactttggagtctcatctttagtaaacatatcataatattcgatattacgagttgacatatcgaacaaattccaagtatttgattttggataatattcgtattttgcatctgctataattaagatataatcaccgcaagaacacacgaacatctttcctacatggttaaagtacatgtacaattctatccatttgtcttccttaactatatatttgtatagataattacgagtctcgtgagtaattccagtaattacatagatgtcgccgtcgtactctacagcataaactatactatgatgtctaggcatgggagacttttttatccaacgatttttagtgaaacattccacatcgtttaatactacatatttttcatacgtggtataaactccacccattacatatatatcatcgtttacgaataccgacgcgcctgaatatctaggagtaattaagtttggaagtcttatccatttcgaagtgccgtgtttcaaatattctgccacacccgttgaaatagaaaattctaatcctcctattacatataactttccattgttaacacaagtactaacttctgattttaacgacgacatattagtaaccgttttccattttttcgtttcaagatctacccgcgatacggaataaacatgtctattgttaatcatgccgccaataatgtatagacaattatgtaaaacatttgcattatagaattgtctatctgtattaccgactatcgtccaatattctgttctaggagagtaatgggttattgtggatatataatcagagtttttaatgactactatattatgttttataccatttcgtgtcactggctttgtagatttggatatagttaatcccaacaatgatatagcattgcgcatagtattagtcataaacttgggatgtaaaatgttgatgatatctacatcgtttggatttttatgtatccactttaataatatcatagctgtaacatcctcatgatttacgttaacgtcttcgtgggataagatagttgtcagttcatcctttgataattttccaaattctggatcggatgtcaccgcagtaatattgttgattatttctgacatcgacgcattatatagttttttaattccatatcttttagaaaagttaaacatccttatacaatttgtggaattaatattatgaatcatagtttttacacatagatctactacaggcggaacatcaattattatggcagcaactagtatcatttctacattgtttatggtgatgtttatcttcttccagcgcatatagtctaatagcgattcaaacgcgtgatagtttataccattcaatataatcgcttcatcctttagatggtgatcctgaatgcgtttaaaaaaattatacggagatgccgtaataatttccttattcacttgtataatttccccattgatagaaaatatcacgctttccattcttgaagtactataagtaattatagtataatgtaaaggtttatatattcaatattttttataaaaaaatcatttcgacattaattcctttttaaatttccgtctatcatctatagaaacatattctatgaatttataaaatgcttttacgtgtcctatcgtaggcgatagaaccgctaaaaagcctattgaatttctacaaaagaatctattatatggtatagggagagtataaaacattaaatgcccgtacttattaaagtattcagtagccaatcctaactctttcgaatacttattaatggctcttgttctgtacgaatctatttttttgaacaacggacctagtggtatatcttgttctatgtatctaaaataatgtctgactagatccgttagtttaatatcctcagtcatcttgtctagaatggcaaatctaactgcgggtttaggctttagtttagtttttatatctacatctatgtctttatctaacaccaaaaatataatagctaatattttattacaatcatccggatattcttctacgatctcactaactaatgtttctttggttatactagtatagtcactatcggacaaataaagaaaatcagatgatcgatgaataatacatttaaattcatcatctgtaagatttttgagatgtctcattaaaatattattagggtcagtactcattatcattaggcagctattacttattttattatttttcaccatatagatcaatcattagatcatcaaaatatgtttcaatcatcctaaagagtatggtgaatgactcttcccatctaatttctgaacgttcaccaatgtctctagccactttggcactaatagcgatcattcgcttagcgtcttctatattattaactggttgattcaatctatctagcaatggaccgtcggacagcgtcattctcatgttcttaatcaatgtacatacatcgccgtcatctaccaattcatccaacaacataagctttttaaaatcatcattataataggtttgatcgttgtcatttctccaaagaatatatctaataagtagagtcctcatgcttagtaatttaactattttagttaacaactattttttatgttaaatcaattagtacaccgctatgtttaatacttattcatattttagtttttaggattgagaatcaatacaaaaattaatgcatcattaattttagaaatacttagtttccacgtagttaatgaaacatttgaactcatcgtacaagacgttctcgtacaggacgtaactataaaccggtttatatttgttcaagatagatacaaatccgataactttttttacgaattctacgggatccactttaaaagtgtcataccgggttctttttatttttttaaacagatcaatggtgtgatgttgattaggtcttttacgaatttgatatagaatagcgtttacatattctccataatggtcaatcgccatttgttcgtatgtcataaattctttaattatatgacactgtgtattgtttagttcatccttgttcattgttaggaatctatccaaaatggcaattatactagaactataggtgcgttgtatacacatattgatgtgtctgtttatacaatccatgatatttggatccatgctactaccttcgggtaaaattgtagcatcatataccatttctagtactttaggttcattattatccattgcagaggacgtcatgatcgcatcctaaaaaaatatattatttttatgttattttgttaaaaataatcatcgaatacttcgtaagatactccttcatgaacataatcagttacaaaacgtttatatgaagtaaagtatctacgatttttacaaaagtccggatgcataagtacaaagtacgcgataaacggaataataatagatttatctagtctatctttttctatagctttcatagttagatacatggtctcagaagtaggattatgtaacatcagcttcgataaaatgactgggttatttagtcttacacattcgctcatacatgtatgaccgttaactacagagtctacactaaaatgattgaacaatagatagtctaccattgtttcgtattcagatagtacagcgtagtacatggcatcttcacaaattatatcattgtctaatagatatttgacgcatcttatggatcccacttcaacagccatcttaaaatcggtaaaatcatattgctttcctttatcattaataatttctaaaacatcatctctatcataaaagatacaaatattaactgtttgatccgtaataacattgctagtcgatagcaatttgttaataagatgcgctgggctcaatgtcttaataagaagtgtaagaggactatctccgaatttgttttgtttattaacatccgttgatggaagtaaaagatctataatgtctacattcttgactgttttagagcatacaatatggagaggtgtatttccatcatgatctggttttgagggactaattcctagtttcatcatccatgagattgtagaagcttttggattgtctgacataagatgtctatgaatatgatttttgccaaatttatccactatcctggcttcgaatccgatggacattatttttttaaacactctttctgaaggatctgtacacgccaacaacggaccacatccttcttcatcaaccgagttgttaatcttggctccatactgtaccaataaatttattctctctatgacttcatcatctgttcccgagagataatatagaggcgttttatgctgtttatcacacgcgtttggatctgcgccgtgcgtcagcagcatcgcgactattctattattattaattttagaagctatatgcaatggataatttccatcatcatccgtctcatttggagagtatcctctatgaagaagttcttcgacaaatcgttcatctagtcctttaattccacaatacgcatgtagaatgtgataattatttccagaaggttcgatagcttgtagcatattcctaaatacatctaaatttttactattatatttggcataaagagatagataatactcggccgacataatgttgtccattgtagtataaaaattaatatttctatttctatttctgtatatttgcaacaatttactctctataacaaatatcataacttagttcttttatgtcaagaaggcactggtttagttcatctataaatgtcacgccataactaccacgcatgctatactcagaattatgataaagatatttatccttggggtgtaggtaatggggattaatctttgttggatcagtctctaagttaacacatgtcacacatgatccatttatagttatatcacacgatgatgatttatgaattgattccggaagatcgctatcgtattttgtggttccacaattcatttccatacatgttattgtcacactaatattatgatgaactttatctagccgctgagtggtaaacaacagaacagatagtttattatctttaccaacaccctcagccgctgccacaaatctctgatccgtatccatgatggtcatgtttatttctagtccgtatccagtcaacactatgttagcatttctgtcgatatagctttcactcatatgacactcaccaataatagtagaattaatgtcgtaatttacaccaatagtgagttcggcggcaaagtaccaataccggtaatcttgtcgaggaggacatatagtattcttgtattctaccgaatacccgagagatgcgatacaaaagagcaagactaatttgtaaaccatcttactcaaaatatgtaacaatagtacgatgcaatgagtaagacaataggaaatctatcttatatacacataattattctatcaattttaccaattagttagtgtaatgttaacaaaaatgtgggagaatctaattagtttttctttacacaattgacgtacatgagtctgagttccttgtttttgctaattatttcatccaatttattattcttgactatatcgagatcttttgtataggagtcagacttgtattcaacatgcttttctataatcattttagctatttcggcatcatccaatagtacattttccagattagcagaatagatattaatgtcgtatttgaacagagcctgtaacatctcaatgtctttattatctatagccaatttaatgtccggaatgaagagaagggaattattggtgtttgtcgacgtcatatagtcgagcaagagaatcatcatatccacgtgtccattttttatagtggtgtgaatacaactaaggagaatagccagatcaaaagtagatggtatttctgaaagaaagtatgatacaatacttacatcattaagcatgacggcatgataaaatgaagttttccatccagttttcccatagaacatcagtctccaatttttcttaacaaacagttttaccgtttgcatgttaccactatcaaccgcataatacaatgcagtgtttcccttgtcatcaaattgtgaatcatccagtccactgaatagcaaaatctttactattttggtatcttccaatgtggctgcctgatgtaatggaaattcattctctagaagatttttcaatgctccagcgttcaacaacgtacatactagacgcacgttattatcagctattgcataatacaaggcactatgtccatggacatccgccttaaatgtatctttactagagagaaagcttttcagctgcttagacttccaagtattaattcgtgacagatccatgtctgaaacgagacgctaattagtgtatattttttcattttttataattttgtcatattgcaccagaattaataatatctctaatagatctgattagtagatacatggctatcgcaaaacaacatatacacatttaataaaaataatatttattaagaaaattcagatttcacgtacccatcaatataaataaaataatgattccttacaccgtacccatattaaggagattccaccttacccataaacaatataaatccagtaatatcatgtctaatgatgaacacaaatggtgtattaaattccagtttttcaggagatgatctcgccgtagctaccataatagtagatgcctctgctacagttccttgttcgtcgacatctatctttgcattctgaaacattttataaatatataatgggtccctagtcatatgtttaaacgacgcattatctggattaaacatactaggagccatcatttcggctatcgacttaatatccctcttattttcgatagaaaatttagggagtttaagattgtacactttattccctaattgaaacgaccaatagtctaattttgcagccgtaatagaatctgtgaaatgggtcatattatcacctattgccaggtacatactaatattagcatccttatacggaaggcgtaccatgtcatattctttgtcatcgattgtgattgtatttccttgcaatttagtaactacgttcatcatgggaaccgttttcgtaccgtacttattagtaaaactagcattgcgtgttttagtgatatcaaacggatattgccatgtacctttaaaatatatagtattaatgattgcccatagagtattattgtcgagcatattagaatctactacattagacataccggatctacgttctactatagaattaattttattaaccgcatctcgtctaaagtttaatctatataggccgaatctatgatattgttgataatacgacggtttaatacacacagtattatctacgaaactttgataagttagatcagtgtacgtatatttagatgttttcagcttagctaatcctgatattaattctgtaaatgctggacccagatctctttttctcaaatccatagtcttcaataattctattctagtattacctgatgcaggcaatagcgacataaacatagaaaacgaatagccaaacggcgagaagacaatattatcatcttgaatatttttatacgctactataccggcattggtaaatccttgcagacgataggtagacgctgaacacgttaacgatagtatcaataacgcaatcatgattttatggtattaataattaaccttatttttatgttcggtataaaaaaattattgatgtctacacatccttttgtaattgacatctatatatccttttgtataatcaactctaatcactttaacttttacagttttccctaccagtttatccctatattcaacatatctatccatatgcatcttaacactctctgccaagatagcttcagagtgaggatagtcaaaaagataaatatatagagcataatccttctcgtatactctgccctttattacatcgcccgcattgggcaacgaataacaaaatgcaagcatcttgttaacgggctcgtaaattgggataaaaattatgtttttatatctattttattcaagagaatattcaggaatttctttttccggttgtatctcgtcgcagtatatatcatttgtacattgtttcatattttttaatagtttacaccttttagtaggactagtatcgtacaattcatagctgtattttgaattccaatcacgcataaaaatatcttccaattgttgacgaagacctaatccatcatccggtgtaatattaatagatgctccacatgtatccgtaaagtaatttcctgtccaatttgaggtacctatataggccgttttatcggttaccatatatttggcatggtttaccctagaatacggaatgggaggatcagcatctggtacaataaatagctttacttctatatctatgtttttagattttagcatagcgatagatcttaaaaagtttctcatgataaacgaagatcgttgccagcaactaatcaatagcttaacggatacttgtctgtctatagcggatcttcttaattcatcttctatataaggccaaaacaaaattttacccgccttcgaataaataatagggataaagttcataacagatacataaacgaatttactcgcatttctaatacatgacaataaagcggttaaatcattggttctttccatagtacatagttgttgcggcgcagaagcaataaatacagagtgtggaacaccacttacgttaatactaagaggatgatctgtattataatacgacggataaaagtttttccaattatatggtagattgttaactccaagataccagtatacctcaaaaatttgagtgagatccgctgccaagttcctattattgaagatcgcaatacccaattctttgacctgagttagtgatctccaatccatgttagcgcttcctaaataaatatgtgtattatcagatatccaaaattttgtatgaagaactcctcctaggatatttgtaatatctatgtatcgtacttcaactccggccatttgtagtctttcaacatcctttaatggtttgttagatttattgacggctactctaactcttactcctcttttgggtaattgtacaatctcgtttaatattatcgtgccgaaattcgtacccacttcatccgataaactccaataaaaagatgatatatctagtgtttttgtggtattggatagaatttccctccacatgttaaatgtagacaaatatactttatcaaattgcatacctataggaatagtctctgtaatcactgcgattgtattatccggattcattttatttgttaaaaaataatcctatatcacttcactctattaaaaatccaagtttctatttctttcatgactgattttttaacttcatccgtttccttatgaagatgatgtttggcaccttcataaatttttatttctctattacaatttgcatgttgcatgaaataatatgcacctaaaacatcgctaatctcattgtttgttccctggagtatgagagtcgggggggtgttaatcttggaaattatttttctaaccttgttggtagccttcaagacctgactagcaaatccagccttaattttttcatgattgattaatgggtcgtattggtatttataaactttatccatatctctagatactgattctggacatagctttccgactggcgcatttggtgtgatggttcccataagtttggcagctagcagattcagttttgaaacagcatctgcattaactagaggagacattagaatcattgctgtaaacaagtttggattatcgtaagaggctagtatagaaattgttgctcccatggaatgacccaataagtagatttaatagttaccacgtgctgtaccaaagtcatcaatcatcattttttcaccattacttcttccatgtccaatatgatcatgtgagaatactaaaattcctaacgatgatatgttttcagctagttcgtcataacgtccagaatgtttaccagctccatgacttatgaatactaatgccttaggatatgtaataggtttccaatatttacaatatatgtaatcattgtccagattgaacatacagtttgcactcatgattcacgttatataactatcaatattaacagttcgtttgatgatcatattatttttatgttttattgataattgtaaaaacatacaattaaatcaatatagaggaaggagacggatactgtcttttgtgagatagtcatggcgactaaatcagattatgaggatgctgttttttactttgtggatgatgataaaatatgtagtcgcgactccatcatcgatctaatagatgaatatatcacgtggagaaatcatgttatagtgtttaacaaagatattaccagttgtggaagactgtacaaggaattgatgaagttcgatgatgccgctatacagtactatggtattgataaaattaatgagattgtcgaagctatgagcgaaggagaccactacatcaattttacaaaagtccatgatcaggaaagtttattcgctaccataggaatatgtgctaaaatcactgaacattggggatacaaaaagatttcagaatctagattccaatcattgggaaacattacagatctgatgaccgacgataatataaacatcttgatactttttctagaaaaaaaattgaattgatgatataggggtcttcataacgcataattattacgttagcattctatatccgtgttaaaaaaaattatcctatcatgtatttgagagttttatatgtagcaaacatgatagctgtgatgccaataagctttagatattcacgcgtgctagtgttagggatggtattatctggtggtgaaatgtccgttatataatctacaaaacaatcatcgcatatagtatgcgatagtagagtaaacatttttatcgtttctactgggttcatacatcgtctacccaattcggttatgaatgaaattgtcgccaatcttacacccaaacccttgttatccattagcatagtattaacttcgttatttatgtcataaactgtaaatgattctgtagatgccatatcatacatgatattcatgtccctattataatcattactaactttatcacaatatatgttgataatatctatatatgatctagtctttgtgggcaactgtctatacaagtcgtctaaacgttgtttactcatatagtatcgaacagccatcattacatggtcccgttccgttgatagataatcgagtatgttagtggacttgtcaaatctatataccatattttctggaagtggatatacatagtcgtgatcaacattattgctagcctcatcttctatatcctgtactataccattatctatatcatctacataatctacgatattattatacataaacatcgacaacatactattgtcaattatctaagtcctgttgatccaaacccttgatctcctctatctgtactatctagagattgtacttcttccagttctggataatatatacgttgatagattagctgggctattctatcccccgtatttacattaaacgtacattttccattattaataagaataactcctatgtttcccctataatcttcgtctattacaccgcctcctatatcaatgccttttagggacagaccagacctaggagctattctaccatagcagaacttaggcatggacatactaatatctgtcttaattaactgtcgttctccaggagggatagtataatcgtaagcgctatataaatcatatccggcggcgtaaggtgattgcctagtaggagatttagctctgttagtttccttaacaaatctaactggtgagttaatattcatgttgaacataaaactaatattttatttcaaaattatttaccatcccatatattccatgaataagtgtgatgattgtacacttctatagtatctatatacgattcacgataaaatcctcctatcaatagcagtttattatccactatgatcaattctggattatccctcggataaataggatcatctatcagagtccatgtattgctggattcacaataaaattccgcatttctaccaaccaagaataaccttctaccgaacactaacgcgcatgatttataatgaggataataagtggatggtccaaactgccactgatcatgattgggtagcaaatattctgtagttgtatcagtttcagaatgtcctcccattacgtatataacattgtttatagatgccactgctggattacatctaggtttcagaagactcggcatattaacccaagcagcatccccgtggaaccaacgctcaacagatgtgggatttggtagacctcctactacgtataatttattgttagcgggtatcccgctagcatacagtctggggctattcatcggaggaattggaatccaattgtttgatatataatttacagctatagcattgttatgtatttcattgttcatccatccaccgatgagatatactacttctccaacatgagtacttgtacacatatggaatatatctataatttgatccatgttcataggatactctatgaatggatacttgtatgatttgcgtggttgtttatcacaatgaaatattttggtacagtctagtatccattttacattatttatacctctgggagaaagataatttgacctgattacatttttgataaggagtagcagatttcctaatttatttcttcgctttatataccacttaatgacaaaatcaactacataatcctcatctggaacatttagttcatcgctttctagaataagtttcatagatagataatcaaaattgtctatgatgtcatcttccagttccaaaaagtgtttggcaataaagtttttagtatgacataagagattggatagtccgtattctatacccatcatgtaacactcgacacaatattcctttctaaaatctcgtaagataaagtttatacaagtgtagatgataaattctacagaggttaatatagaagcacgtaataaattgacgacgttatgactatctatatatacctttccagtatatgagtaaataactatagaagttaaactgtgaatgtcaaggtctagacaaacccttgtaactggatctttatttttcgtgtatttttgacgtaaatgtgtgcgaaagtaaggagataactttttcaatatcgtagaattgactattatattgccacctatagcatcaataattgttttgaatttcttagtcatagacaatgctaatatattcttacagtacacagtattaacaaatatcggcatttatgtttctttaaaagtcaacatctagagaaaaatgattatctttttgagacataactcccattttttggtattcacccacacgtttttcgaaaaaattagtttttccttccaatgatatattttccatgaaatcaaacggattggtaacattataaatttttttaaatcccaattcagaaatcaatctatccgcgacgaattctatatatgttttcatcatttcacaattcattcctataagtttaactggaagagccgcagtaagaaattcttgttcaatggatactgcatctgttataatagatctaacggtttcttcactcggtggatacaataaatgtttaaacatcaaacatgcgaagtcgcagtgtagaccctcgtctctactaattagttcgttggaaaacgtgagtccgggcattaggccacgctttttaagccaaaatatggaagcgaatgatccggaaaagaagattccttctactgcagcaaaggcaataagtctctctccataaccggcgctgtcatgtatccacttttgagcccaatcggccttcttttttacacaaggcattgtttctatggcattaaagagatagtttttttcattactatctttaacataagtatcgatcaaaagactatacatttccgaatgaatgttttcaatggccatctgaaatccgtagaaacatctagcctcggtaatctgtacttctgtacaaaatcgttccgccaaattttcattcactattccgtcactggctgcaaaaaacgccaatacatgttttataaaatatttttcgtctggtgttagtttattccaatcattgatatctttagatatatctacttcttccactgtccaaaatgatgcctctgcctttttatacatgttccagatgtcatgatattggattgggaaaataacaaatctatttggatttggtgcaaggatgggttccataactaaattaacaatatcaataaattttttttcagttatctatatgcctgtacttggattttttgtacatcgatatcgccgcaatcactacaataattacaagtattattgatagcattgttattagtactatcataattaaattatcgacattcatgggtgctgaataatcgttattatcatcattatcattttgtaattgtgacatcatactaaataaatcgtttgcgagattgttgtgggaagcgggcatggaggatgcattatcattattatttaacgccttccatttggattcacaaatatggcgcgcgttcaacattttatggaaactataattttgtgaaaacagataacaagaaaactcgtcatcgttcaaatttttaacgatagtaaaccgattaaacgtcgagctaatttctaacgctagcgactctgttggatatgggtttccagatatatatcttttcagttcccctacgtatctataatcatctgtaggaaatggaagatatttccatttatctactgttcctaatatcatatgtggtggtgtagtagaaccattaagcgcgaaagatgttatttcgcatcgtattttaacttcgcaataatttctggttagataacgcactctaccagtcaagtcaatgatattagcctttacagatatattcatagtagtcgtaacgatgactccatcttttagatgcgatactcctttgtatgtaccagaatcttcgtacctcaaactcgatatatttaaacaagttaatgagatattaacgcgttttatgaatgatgatatataaccagaagttttatcctcggtggctagcgctataaccttatcattataataccaactagtgtgattaatatgtgacacgtcagtgtgggtacaaatatgtacattatcgtctacgtcgtattcgatacatccgcatacagccaacaaatataaaatgacaaatactctaacgccgttcgtacccatcttgatgcggtttaataaatgttttgatttcaatttattgtaaaaaaagattcggttttatactgttcgatattctcattgcttatattctcatctatcatctccacacagtcaaatccgtggttagcatgcacctcatcaaccggtaaaagactatcggactcttctatcattataactctagaatatttaatttggtcattattaatcaagtcaattatcttatttttaacaaacgtgagtattttactcattttttataaaaacttttagaaatatacagactctatcgtgtgtctatatcttctttttatatccaatgtatttatgtctgatttttcttcatttatcatatataatggtccaaattctacacgtgcttcggattcatccagatcattaaggttcttataattgtaacatccttctcttccctcttctacatcttccttcttattcttattcttagcgtcacagaatctaccacagcaggatcccatgacgagcgtcatattaaactaatccattttcaattataatatatgattagtaatgaccattaaaataaaaaatattcttcataaccggcaagaaagtgaaaagttcacattgaaactatgtcagtagtatacatcatgaaatgatgatatatatatactctattttggtggaggattatatgatataattcgtggataatcattcttaagacacatttcttcattcgtaaatcttttcacgttaaatgagtgtccatattttgcaatttcttcatatgatggcggtgtacgtggacgaggctgctcctgttcttgttgtggtcgccgactgtcgtgtttgcgtttatccctccattatcgcgattgcgtagatggagtactattatataccttgtaattaaatttttttattaattaaacgtataaaaacgttccgtatctgtatttaagagccagatttcgtctaatagaacaaatagctacagtaaaaataactagaataattgctacacccactagaaaccacggatcgtaatacggcaatcggttttcgataataggtggaacgtatattttatttaaggacttaacaattgtctgtaaaccacaatttgcttccgcggatcctgtattaactatctgtaaaagcatatgttggccgggcggagccgaacattctccgatatccaatttctgtatatctataatattattaacctccgcatacgcattacagttcttttctagcttggataccgcactaggtacatcgtctagatctattcctatttcctcagcgatagctcttctatccttttccggaagcaatgaaatcacttcaataaatgattcaaccatgagtgtgaaactaagtcgagaattactcatgcatttgttagttattcggagcgcgcaatttttaaactgtcctataacctctcctatatgaatagcacaagtgacattagtagggatagaatgttgagctaatttttgtaaataactatctataaaaagattatacaaagttttaaactctttagtttccgccatttatccagtctgagaaaatgtctctcataataaatttttccaagaaactaattgggtgaagaatggaaacctttaatctatatttatcacagtctgttttggtacacatgatgaattcttctaatgccgtactaaattcgatatctttttcgatttctggatatgtttttaataaagtatgaacaaagaaatggaaatcgtaataccagttatgtttaactttgaaattgttttttattttcttgttaatgattccagccacttgggaaaagtcaaagtcgtttaatgccgatttaatacgttcattaaaaacaaactttttatcctttagatgaattattattggttcattggaatcaaaaagtaagatattatcgggtttaagatctgcgtgtaaaaagttgtcgcagcatggtagttcgtagattttaatgtataacagagccatctgtaaaaagataaactttatgtattgtaccaaagatttaaatcctaatttgatagctaactcggtatctactttatctgccgaatacagtgctaggggaaaaattataatgtttcctctttcgtattcgtagttagttctcttttcatgttcgaaaaagtgaaacatgcggttaaaatagtttataacattaatattactgttaataactgccgggtaaaagtgggatagtaatttcacgaatttgatactgtcctttctctcgttaaacgcctttagaaaaactttagaagaatatctcaatgatagttcctgaccatccatagtttgtatcaataatagcaacatatgaagaacacgtttatacagagtatgtaaaaatgttaatttatagtttaatcccatggcccacgcacacacgattaattttttttcatctccctttagattgttgtatagaaatttgggtactgtgaactccgccgtagtttccatgggactatataattttgtggcctcgaatacaaattttactacatagttatctatcttaaaaactataccatatcctcctgtagatatgtgataaaaatcgtcgtttataggataaaatcgtttatccttttgttggaaaaaggatgaattaatgtaatcattctcttctatctttagtagtgtttccttattaaaattcttaaaataatttaacaatctaactgacggagcccaattttggtgtaaatctaattgggacattatattgttaaaatacaaacagtctcctaatataacagtatctgataatctatggggagacatccattgatattcaggggatgaatcattggcaacacccatttattgtacaaaaagccccaatttacaaacgaaagtccaggtttgatagagacaaactattaactattttgtctctgtttttaacacctccacagtttttaatttctttagtaatgaaattattcacaatatcagtatcttctttatctaccagagattttactaacttgataaccttggctgtctcattcaatagggtagtaatatttgtatgtgtgatattgatatctttttgaattgtttcttttagaagtgattctttgatggtgccagcatacgaattacaataatgcagaaactcggttaacatgcaggaattatagtaagccaattccaattgttgcctgtgttgtattagagtgtcaatatgagcaatggtgtccttgcgtttctctgatagaatgcgagcagcgattttggcgttatcatttgacgatatttctggaatgacgaatcctgtttctactaactttttggtaggacaaagtgaaacaatcaagaagatagcttctcctcctatttgtggaagaaattgaactcctctagatgatctactgacgatagtatctccttgacagatattggaccgaattacagaagtacctggaatgtaaagccctgaaaccccctcattttttaagcagattgttgccgtaaatcctgcactgtgaccaagatagagagctcctttggtgaatccatctctatgtttcagtttaaccaagaaacagtcagctggtctaaaatttccatctctatctaatacagcatctaacttgatgtcaggaactatgaccggtttaatgttatatgtaacattgagtaaatccttaagttcataatcatcactgtcatcagttatgtacgatccaaacaatgtttctactggcatagtggatacgaagatgctatccatcagaatgtttccctgattagtattttctatatagctattcttctttaaacgattttccaaatcagtaactatgttcatttttttaggagtaggacgcctagccagtatggaagaggattttctagatcctctcttcaacatctttgatctcaatggaatgcaaaaccccatagtgaaacaaccaacgataaaaataatattgtttttcactttttataattttaccatctgactcatggattcattaatatctttataagagctactaacgtataattctttataactgaactgagatatatacaccggatctatggtttccataattgagtaaatgaatgctcggcaataactaatggcaaatgtataaaacaacgaaattatactagagttgttaaagttaatattttctatgagctgttccaataaattatttgttgtgactgcgttcaagtcataaatcatcttgatactatccagtaaacagtctttaagttctggaatattatcatcccattgtaaagcccctaattcgactatcgaatatcctgctctgatagcagtttcaatatcgacggacgtcaatactgtaataaaggtggtagtattgtcatcatcgtgataaactacgggaatatggtcgttagtaggtacggtgactttacacaacgcgatatataactttccttttgtaccatttttaacgtagttgggacgtcctgcagggtattgttttgaagaaatgatatcgagaacagatttgatacgatatttgttggattcctgattattcactataatataatctagacagatagatgattcgataaatagagaaggtatatcgttggtaggataatacatccccattccagtattctcggatactctattgatgacactagttaagaacatgtcttctattctagaaaacgaaaacatcctacatggactcattaaaacttctaacgctcctgattgtgtctcgaatgcctcgtacaaggatttcaaggatgccatagattctttgaccaacgatttagaattgcgtttagcatctgatttttttattaaatcgaatggtcggctctctggtttgctaccccaatgataacaatagtcttgtaaagataaaccgcaagaaaatttatacgcatccatccaaataaccctagcaccatcggatgatattaatgtattattatagattttccatccacaattattgggccagtatactgttagcaacggtatatcgaatagattactcatgtaacctactagaatgatagttcgtgtactagtcataatatctttaatccaatctaagaaatttaaaattagattttttacactgttaaagttaacaaaggtattacccggatacgtggatatcatatatggcattggtccattatcagtaatagctccataaactgatacggcgatggtttttatatgtgtttgatctaacgaggaagaaattcgcgcccacaattcatctctagatatgtatttaatatcaaacggtaacacatcaatttcgggacgcgtatatgtttctaaatttttaatccaaatataatgatgacctatatgccctattatcatactgtcaactatagtacacctagagaacttacgatacatctgtttcctataatcgttaaattttacaaatctataacatgctaaaccttttgacgacaaccattcattaatttctgatatggaatctgtattctcgataccgtattgttctaaagccagtgctatatctccctgttcgtgggaacgctttcgtataatatcgatcaacggataatctgaagtttttggagaataatatgactcatgatctatttcgtccataaacaatctagacataggaattggaggcgatgatcttaattttgtgcaatgagtcgtcaatcctataacttctaatattgtaatattcatcatcgacataacactatctatgttatcatcgtatattagtataccacggccttcttcatttcgtgccaaaataatatacagtcttaaataattacgcaatatctcaatagtttcataattgttagctgttttcatcaaggtttgtatcctgtttaacatgatggcgttctataacgtctctattttctatttttaattttttaaatttttaacgatttactgtggctagatacccaatctctctcaaatatttttttagcctcgcttacaagctgtttatctatactattaaaactgacgaatccgtgattttggtaatgggttccgtcgaaatttgccgaagtgatatgaacatattcgtcgtcgactatcaacaattttgtattattctgaatagtgaaaaccttcacagatagatcattttgaacacacaacgcgtctagacttctggcggttgccatagaatatacgtcgttcttatcccaattaccaactagaagtctgatcttaactcctctattaatggctgcttctataatggagttgtaaatgtcaggccaatagtagctattaccgtcgacacgtgtagtgggaactatggccaaatgttcaatatctatactagtcttagccgacttgagtttatcaataactacatcagtgtctagatctctagaatatcccaataggtgttctggagaatcagtaaagaacactccacctataggattcttaatatgatacgcagtgctaactggcagacaacaagccgcagagcataaattcaaccatgaattttttgcgctattaaaggctttaaaagtatcaaatcttctacgaagatctgtggccagcgggggataatcagaatatacacctaacgttttaatcgtatgtatagatcctccagtaaatgacgcgtttcctacataacatctttcatcatctgacacccaaaaacaaccgagtagtagtcccacattattttttttatctatattaacggttataaaatttatatccgggcagtgactttgtagctctcccagatttcttttccctcgttcatctagcaaaactattattttaatccctttttcagatgcctcttttagtttatcaaaaataagcgcgcccctagtcgtactcagaggattacaacaaaaagatgctatgtatatatatttcttagctagagtgataatttcgttaaaacattcaaatgttgttaaatgatcggatctaaaatccatattttctggtagtgtttctaccagcctacattttgctcccgcaggtaccggtgcaaatggccacatttagttaacataaaaacttatacatcctgttctatcaacgattctagaatatcatcggctatatcgctaaaattttcatcaaagtcgacatcacaacctaactcagtcaatatattaagaagttccatgatgtcatcttcgtttatttctatatccgtatccattgtagattgttgaccgattatcgagtttaaatcattactaatactcaatccttcagaatacaatctgtgtttcattgtaaatttataggcggtgtatttaagttggtagattttcaattatgtatcaatatagcaacagtagttcttgctcctccttgattctagcatcctcttcattattttcttctacgtacataagcatgtccaatacgttagacaacacaccgacgatggcggccgccacagacacgaatatgactagaccgatgaccatttaaaaacccctctctagctttcacttaaactgtatcgattattcttttagaacatgtataatataaaaacattattctatttcgaatttaggcttccaaaaatttttcatccgtaaaccgataataatatatatagacttgttaatagtcggaataaatagattaatgcttaaactatcatcatctccacgattagagatacaatatttacattctttttgctgtttcgaaactttatcaatacacgttaatacaaacccaggaaggagatattgaaactgaggctgttgaaaatgaaacggtgaatacaataattcagataatgtaaaatcatgattccgtattctgatgatattagaactgctaatggatgtcgatggtatgtatctaggagtatctattttaacaaagcatcgatttgctaatatacaattatcattttgattaattgttattttattcatattcttaaaaggtttcatatttatcaattcttctacattaaaaatttccatttttaatttatgtagccccgcaatactcctcattacgtttcattttttgtctataatatccattttgttcatctcggtacatagattatccaattgagaagcgcatttagtagttttgtacattttaagtttattgacgaatcgtcgaaaactagttatagttaacattttattatttgataccctgatattaatacccctgccgttactattatttataactgatgtaacccacgtaacattagaattaattatcgatagtaatgcatcgacgcttccaaaattgtctattataaactcaccgataatttttttattgcatgttttcatattcattaggattatcaaatctttaatcttattacgattgtatgcgttgatattacaagacgtcattctaaaagacggaggatctccatcaaatgccagacaatcacgtacaaagtacatggaaataggttttgttctattgcgcatcatagattcatatagaacacccatagaaatactaatttgttttactctataaaatactaatgcatctatttcatcgttttgtataacgtctttccaagtgccaaattccaaatttttttcattgatagtaccaaattcttctatctctttaactacttgcatagataggtaattacagtgatgcctacatgccgttttttgaaactgaatagatgcgtctagaagcgatgctacactagtcacaatcaccactttcatatttagaatatatgtatgtaaaaatatagtagaatttcattttgtttttttctatgctataaatgaattctcattttgcatctgctcatactccgttttatatcaataccaaagaaggaagatatctggttctaaaagccgttaaagtatgcgatgttagaactgtagaatgcgaaggaagtaaagcttcctgcgtactcaaagtagataaaccctcatcgcccgcgtgtgagagaagaccttcgtccccgtccagatgcgagagaatgaataaccctggaaaacaagtcccgtttatgaggacggacatgctacaaaatatgttcgcggctaatcgcgataatgtagcttctagacttttgtcctaaaatactattatatccttttcgatattaataaatccgtgtcgtccaggttttttatctctttcagtatgtgaatagataggtattttatctctattcatcatcgaatttaagagatccgataaacattgtttgtattctccagatgtcagcatctgatacaacaatatatgtgcacataaacctctggcacttatttcatgtaccttccccttatcactaaggagaatagtatttgagaaatatgtatacatgatattatcatgaattagatatacagaatttgtaacactctcgaaatcacacgatgtgtcggcgttaagatctaatatatcactcgataacacattttcatctagatacactagacattttttaaagctaaaatagtctttagtagtgacagtaactatgcgattattttcatcgatgatacatttcatcggcatattattacgcttaccatcaaagactataccatgtgtatatctaacgtattctagcatggttgccatacgtgcattaaacttttcaggatctttggatagatcttccaatctatctatttgagaaaacatttttatcatgttcaatagttgaaacgtcggatccactatatagatattatctataaagattttaggaactacgttcatggtatcctggcgaatattaaaactatcaatgatatgattatcgttttcatcttttatcaccatatagtttctaagatatgggattttacttaatataatattatttcccgtgataaattttattagaaaggccaaatctataagaaaagtcctagaattagtctgaagaatatctatatcgccgtaccgtatatttggattaattagatatagagaatatgatccgtaacatatacaacttttattatggcgtctaagatattcttccatcaacttattaacatttttgactagggaagatacattatgacgtcccattacttttgccttgtctattactgcgacgttcatagaatttagcatatctcttgccaattcttccattgatgttacattataagaaattttagatgaaattacatttggagctttaatagtaagaactcctaatatgtccgtgtatgtggtcactaatacagattgtagttctataatcgtaaataatttacctatattatatgtttgagtctgtttagaaaagtagctaagtatacgatcttttatttctgatgcagatgtatcaacatcggaaaaaaatctttttttattcttttttactaaagatacaaatatgtctttgttaaaaacagttattttctgaatatttctagcttgtaattttaacatatgatattcgttcacactaggtactctgcctaaataggtttctataatctttaatgtaatattaggaagagtattctgatcaggattcctattcattttgaggatttaaaactctgattattgtctaatatggtctcaacacaaactttttcacagagcgatagagtttttgataactcgtttttcttaagaaatataaaactactgtttccagagctcgctctatcttttattttatctaattcgatacaaactcctgatactggttcagaaagtaattcattaattttcagtcctttatagaagatatttaatatagataatacaaaattttcagttcttgatatcgatctgattgatcctagaactagatatattaataacgtgctcattaggcagtttatggcagcttgataattagatatagtatattccagttcatatttattagataccgcattgcccagattttgatattctatgaattcctctgaaaataaatccaaaataactagacattctattttttgtggattagtgtactctcttccctctatcatgttcactactggtgtccacgatgataaatatctagagggaatataatatagtccataggatgccaatctagcaatgtcgaataactgtaatttgattcttcgttcttcattatgaattgattcttgaggtataaacctaacacaaattatattattagacttttcgtatgtaatgtctttcatgttataagtttttaatcctggaatagaatctattttaatgaggcttttaaacgcagagttctccaacgagtcaaagcataatactctgttgtttttcttatatacgatgttacgattttcttctttgaatggaataggtttttgaattagtttataattacaacataatagataaggaagtgtgcaaatagtacgcggaaaaaacataatagctcccctgttttcatccatggttttaagtaaatgatcactggcttctttagtcaatggatattcgaacattaaccgtttcatcatcattggacagaatccatatttcttaatgtaaagagtgatcaaatcattgtgtttattgtaccatcttgttgtaaatgtgtattcggttatcggatctgctcctttttctattaaagtatcgatgtcgatctcgtctaagaattcaactatatcgacatatttcatttgtatacacataaccattactaacgtagaatgtataggaagagatgtaacgggaacagggtttgttgattcgcaaactattctaatacataattcttctgttaatacgtcttgcacgtaatctattatagatgccaagatatctatataattattttgtaagatgatgttaactatgtgatctatataagtagtgtaataattcatgtatttcgatatatgttccaactctgtctttgtgatgtctagtttcgtaatatctatagcatcctcaaaaaatatattcgcatatattcccaagtcttcagttctatcttctaaaaaatcttcaacgtatggaatataataatctattttacctcttctgatatcattaatgatatagtttttgacactatcttctgtcaattgattcttattcactatatctaagaaacggatagcgtccctaggacgaactactgccattaatatctctattatagcttctggacataattcatctattataccagaattaatgggaactattccgtatctatctaacatagttttaagaaagtcagaatctaagacctgatgttcatatattggttcatacatgaaatgatctctattgatgatagtgactatttcattctctgaaaattggtaactcattctatatatgctttccttgttgatgaaggatagaatatactcaatagaatttgtaccaacaaactgttctcttatgaatcgtatatcatcatctgaaataatcatgtaaggcatacatttaacaattagagacttgtctcctgttatcaatatactattcttgtgataatttatgtgtgaggcaaatttgtccacgttctttaattttgttatagtagatatcaaatccaatggagctacagttcttggcttaaacagatatagtttttctggaacgaattctacaacattattataaaggactttgggtagataagtgggatgaaatcctattttaattaatgcgatagccttgtcctcgtgcagatatccaaacgcttttgtgatagtatggcattcattgtctagaaacgctctacgaatatctgtgacagatatcatctttagagaatatactagtcgcgttaatagtactacaatttgtattttttaatctatctcaataaaaaaattaatatgtatgattcaatgtataactaaactactaactgttattgataactagaatcagaatctaatgatgacgtaaccaagaagtttatctactgccaatttagctgcattatttttagcatctcgtttagattttccatctgccttatcgaatactcttccgtcgatgtctacacaggcataaaatgtaggagagttactaggccccactgattcaatacgaaaagaccaatctctcctagtaatttggcagtactcattaataacggtgacagggttagcacctttccaatcaataatttttttagccggaataacatcatcaaaagacttatgatcctctctcattgatttttcgcgggatacatcatctattatggcgtcagccataacatcagcatccggcttatccgcctccgttgtcataaaccaacgaggaggaatatcgtcggagctgtacaccatagcactacgttgaagatcgtacagagctttattaacttctcgcttctccatattaagttgtctagttagttgtgcagcagtagctccttcgattccaatggttttaatagcctcacacacaatctctgcgttagaacgttcgtcgatatagattttagacatttttagagagaactaacacaaccagcaataaaactgaacctactttatcatttttttattcatcatcctctggtggttcgtcgttcctatcgaatgtggatctgattaacccgtcatctataggtgatgctggttctggagattctggaggagatggattattatctggaagaatctctgttatttccttgttttcatgtatcgattgcgttgtaacattaagattgcgaaatgctctaaatttgggaggcttaaagtgttgtttgcaatctctacacgcatgtctaactagtggaggttcgtcagcggctctagtttgaatcatcatcggcgtagtattcctacttttacagttaggacacggtgtattgtatttctcgtcgagaacgttaaaataatcgttgtaactcacatcctttattttatctatattgtattctactcctttcttaatgcattttataccgaataagagatagcgaaggaattctttttcggtgccgctagtacccttaatcatatcacatagtgttttatattccaaatttgtggcaatagacggtttatttctatacgatagtttgtttctggaatcctttgagtattctataccaatattattctttgattcgaatttagtttcttcgatattagattttgtattacctatattcttgatgtagtactttgatgatttttccatggcccattctattaagtcttccaagttggcatcatccacatattgtgatagtaattctcggatatcagtagcggctaccgccattgatgtttgttcattggatgagtaactactaatgtatacattttccatttataacacttatgtattaactttgttcatttatattttttcattattatgttgatattaacaaaagtgaatatatatgttaataattgtattgtggttatacggctacaatttcataatgagtggaagtcagtgtccgatgatcaatgacgatagctttactctgaaaagaaagtatcaaatcgatagtgcggagtcaacaataaaaatggataagaagaggataaagtttcagaatagagccaaaatggtaaaagaaataaatcagacaataagagcagcacaaactcattacgagacattgaaactaggatacataaaatttaagagaatgattaggactactactctagaagatatagcaccatctattccaaataatcagaaaacttataaactattctcggacatttcagccatcggcaaagcatcacagaatccgagtaagatggtatatgctctgctgctttacatgtttcccaatttgtttggagatgaccatagattcattcgttatagaatgcatccaatgagtaaaatcaaacacaagatcttctctcctttcaaacttaatcttattagaatattagtggaagaaagattctataataatgaatgcagatctaataaatggagaataattggaacacaagttgataaaatgttgatagctgaatctgataaatatacaatagatgcaaggtataacctaaaacccatgtatagaatcaagggaaaatctgaagaagataccctcttcatcaaacagatggtagaacaatgtgtgacatcccaggaattggtggaaaaagtgttgaagatactgtttagagatttgttcaagagtggagaatacaaagcatacagatacgatgatgatgtagaaaatggatttattggattggatacactaaaattaaacattgttcatgatatagttgaaccatgtatgcctgttcgtaggccagtggctaagatactgtgtaaagaaatggtaaataaatactttgagaatccgctacatattattggtaaaaatcttcaagagtgcattgactttgttagtgaataggcatttcatctttctccaatactaattcaaattgttaaattaataatggatagtataaatagttattagtgataaaatagtaaaaataattattagaataagagtgtagtatcatagataactctcttctataaaaatggattttattcgtagaaagtatcttatatacacagtagaaaataatatagattttttaaaggatgatacattaagtaaagtaaacaattttaccctcaatcatgtactagctctcaagtatctagttagcaattttcctcaacacgttattactaaggatgtattagctaataccaatttttttgttttcatacatatggtacgatgttgtaaagtgtacgaagcggttttacgacacgcatttgatgcacccacgttgtacgttaaagcattgactaagaattatttatcgtttagtaacgcaatacaatcgtacaaggaaaccgtgcataaactaacacaagatgaaaaatttttagaggttgccgaatacatggacgaattaggagaacttataggcgtaaattatgacttagttcttaatccattatttcacggaggggaacccatcaaagatatggaaatcatttttttaaaactgtttaagaaaacagacttcaaagttgttaaaaaattaagtgttataagattacttatttgggcatacctaagcaagaaagatacaggcatagagtttgcggataatgatagacaagatatatatactctatttcaacaaactggtagaatcgtccatagcaatctaacagaaacgtttagagattatatctttcccggagataagactagctattgggtgtggttaaacgaaagtatagctaatgatgcggatatcgttcttaatagacacgccattaccatgtatgataaaattcttagttatatatactctgagataaaacaaggacgcgttaataaaaacatgcttaagttagtttatatctttgagcctgaaaaagatatcagagaacttctgctagaaatcatatatgatattcctggagatatcctatctattattgatgcaaaaaacgacgattggaaaaaatattttattagtttttataaagctaattttattaacggtaatacatttattagtgatagaacgtttaacgaggacttattcagagttgttgttcaaatagatcccgaatatttcgataatgaacgaattatgtctttattctctacgagtgctgcggacattaaacgatttgatgagttagatattaataacagttatatatctaatataatttatgaggtgaacgatatcacattagatacaatggatgatatgaagaagtgtcaaatctttaacgaggatacgtcgtattatgttaaggaatacaatacatacctgtttttgcacgagtcggatcccatggtcatagagaacggaatactaaagaaactgtcatctataaaatccaagagtagacggctgaacttgtttagcaaaaacattttaaaatattatttagacggacaattggctcgtctaggtcttgtgttagatgattataaaggagacttgttagttaaaatgataaaccatcttaagtctgtggaggatgtatccgcattcgttcgattttctacagataaaaaccctagtattcttccatcgctaatcaaaactattttagctagttataatatttccatcatcgtcttatttcaaaggtttttgagagataatctatatcatgtagaagaattcttggataaaagcatccatctaaccaagacggataagaaatatatacttcaattgataagacacggtagatcatagaacagaccaaatatattattaataatttgtatatacatagatataattatcacatattaaaaattcacacatttttgataaatgggaactgctgcaacaattcagactcccaccaaattaatgaataaagaaaatgcagaaatgattttggaaaaaattgttgatcatatagttatgtatattagtgacgaatcaagtgattcagaaaataatcctgaatatattgattttcgtaacagatacgaagactatagatctctcattataaaaagtgatcacgagtttgtaaagctatgtaaaaatcatgcagagaaaagttctccagaaacgcaacaaatgattatcaaacacatatacgaacaatatcttattccagtatctgaagtactattaaaacctataatgtccatgggtgacataattacatataacggatgtaaagacaatgaatggatgctagaacaactctctaccctaaactttaacaatctccgcacatggaactcatgtagcataggcaatgtaacgcgtctgttttatacattttttagttatctgatgaaagataaactaaatatataagtataatcccattctaatactttaacctgatgtattacctgcatcttattagaatattaacctaactaaaagacataacataaaaactcattacatagttgataaaaagcggtaggatataaatattatggctgccaccgttccgcgttttgacgacgtgtacaaaaatgcacaaagaagaattctagatcaagaaacattttttagtagaggtctaagtagaccgttaatgaaaaacacatatctatttgataattacgcgtatggatggataccagaaactgcaatttggagtagtagatacgcaaacttagatgcaagtgactattatcccatttcgttgggattacttaaaaagttcgagtttctcatgtctctatataaaggtcctattccagtatacgaagaaaaagtaaatactgaattcatagccaatggatcgttctctggtagatacgtatcatatcttcgaaagttttctgctcttccaacaaacgagtttattagttttttgttactgacttccattccaatctataatatcttgttctggtttaaaaatactcagtttgatattactaaacacacattattcagatacgtctatacagataatgccaaacacctggcgttggctaggtatatgcatcaaacaggagactataagcctttgtttagtcgtctcaaagagaattatatatttaccggtcccgttccaataggtatcaaagatatagatcaccctaatcttagtagagcaagaagtccatccgattatgagacattagctaatattagtactatattgtactttaccaagtatgatccggtattaatgtttttattgttttacgtacctgggtattcaattactacaaaaattactccagccgtagaatatctaatggataaactgaatctaacaaagagcgacgtacaactgttgtaaattattttatgcttcgtaaaatgtaggttttgaaccaaacattctttcaaagaatgagatgcataaaactttattatccaatagattgactatttcggacgtcaatcgtttaaagtaaacttcgtaaaatattctttgatcactgccgagtttaaaacttctatcgataattgtctcatatgttttaatatttacaagttttttggtccatggtacattagccggacaaatatatgcaaaataatatcgttctccaagttctatagtttctggattatttttattatattcagtaaccaaatacatattagggttatctgcggatttataatttgagtgatgcattcgactcaacataaataattctagaggagacgatctactatcaaattcggatcgtaaatctgtttctaaagaacggagaatatctatacatacctgattagaattcatccgtccttcagacaacatctcagacagtctggttttgtacatcttaatcatattcttatgaaacttggaaacatctcttctagtttcactagtacctttattaattctctcaggtacagattttgaattcgacgatgccgagtatttcatcgttgtatatttcttcttcgattgcataatcagattcttatataccgcctcaaactctattttaaaattattaaacaatactctactattaatcagtcgttctaactctttcgctatttctatagacttatctacatcttgactgtctatctctgtaaacacggagtcggtatctccatacacgctacgaaaacgaaatctgtaatctataggcaacgatgttttcacaatcggattaatatctctatcgtccatataaaatggattacttaatggattggcaaaccgtaacataccgttagataactctgctccatttagtaccgattctagatacaagatcattctacgtcctatggatgtgcaactcttagccgaagcgtatgagtatagagcactatttctaaatcccatcagaccatatactgagttggctactatcttgtacgtatattgcatggaatcataaatggccttttcagttgaactggtagcctgttttaacatctttttatatctggctctctctgccaaaaatgttcttaatagtctaggaatggttccttctatcgatctatcgaaaattgctatttcagagatgaggttcggtagtctaggttcacaatgaaccgtaatatatctaggaggtggatatttctgaagcaatagctgattatttatttcttcttccaatctattggtactaacaacgacaccgactaatgtttccggagatagatttccaaagatacacacattaggatacagactgttataatcaaagattaatacattattactaaacattttttgttttggagcaaataccttaccgccttcataaggaaacttttgttttgtttctgatctaactaagatagttttagtttccaacaatagctttaacagtggacccttgatgactgtactcgctctatattcgaataccatggattgaggaagcacatatgttgacgcacccgcgtctgtttttgtttctactccataatactcccacaaatactgacacaaacaagcatcatgaatacagtatctagccatatctaaagctatgtttagattataatccttatacatctgagctaaatcaacgtcatcctttccgaaagataatttatatgtatcattaggtaaagtaggacataatagtacgactttaaatccattttcccaaatatctttacgaattactttacatataatatcctcatcaacagtcacataattacctgtggttaaaacctttgcaaatgcagcggctttgcctttcgcgtccgtagtatcgtcaccgatgaacgtcatttctctaactcctctatttaatactttacccatgcaactgaacgcgttcttggatatagaatccaatttgtacgaatccaatttttcagatttttgaatgaatgaatatagatcgaaaaatatagttccattattgttattaacgtgaaacgtagtattggccatgccgcctactcccttatgactagactgatttctctcataaatacagagatgtacagcttcctttttgtccggagatctaaagataatcttctctcctgttaataactctagacgattagtaatatatctcagatcaaagttatgtccgttaaaggtaacgacgtagtcgaacgttagttccaacaattgtttagctattcgtaacaaaactatttcagaacatagaactagttctcgttcgtaatccatttccattagtgactgtatcctcaaacatcctctatcgacggcttcttgtatttcctgttccgttaacatctcttcattaatgagcgtaaacaataatcgtttaccacttaaatcgatataacagtaacttgtatgcgagattgggttaataaatacagaaggaaacttcttatcgaagtgacactctatatctagaaataagtacgatcttgggatatcgaatctaggtatttttttagcgaaacagttacgtggatcgtcacaatgataacatccattgttaatctttgtcaaatattgctcgtccaacgagtaacatccgtctggagatatcccgttagaaatataaaaccaactaatattgagaaattcatccatggtggcattttgtatgctgcgtttctttggctcttctatcaaccacatatctgcgacggagcattttctatctttaatatctagattataacttattgtctcgtcaatgtctatagttctcatctttcccaacggcctcgcattaaatggaggaggagacaatgactgatatatttcgtccgtcactacgtaataaaagtaatgaggaaatcgtataaatacggtctcaccatttcgacatctggatttcagatataaaaatctgttttcaccgtgactttcaaaccaattaatgcaccgaacatccatttatagaatttagaaatatattttcatttaaatgaatcccaaacattggggaagagccgtatggaccattatttttatagtactttcgcaagcgggtttagacggcaacatagaagcgtgtaaacgaaaactatatactatagtcagcactcttccatgtcctgcatgtagacggcacgcgactatcgctatagaggacaataatgtcatgtctagcgatgatctgaattatatttattattttttcatcagattatttaacaatttggcatctgatcccaaatacgcgatcgatgtgacaaaggttaaccctttataaacttaacccattataaaacttatgattagtcacaactgaaataaccgcgtgattattttttggtataattctacacggcatggtttctgtaactatgaattcaacccccgttacattagtgaaatctttaacaaacagcaagggttcgtcaaagacataaaactcattgtttacaatcgaaatagaccccctatcacacttaaaataaaaaatatccttatcctttaccaccaaataaaattctgattggtcaatgtgaatgtattcacttaacagttccacaaatttatttattaactccgaggcacatacatcgtcggtattttttatggcaaactttactcttccagcatccgtttctaaaaaaatattaacgagttccatttatatcatccaatattattgaaatgacgttgatggacagatgatacaaataagaaggtacggtacctttgtccaccatctcctccaattcatgctctattttgtcattaactttaatgtatgaaaacagtacgccacatgcttccatgacagtgtgtaacactttggatacaaaatgtttgacattagtataattgttcaagactgtcaatctataatagatagtagctataatatattctatgatggtattgaagaagatgacaaccttggcatattgatcatttaacacagacatggtatcaacagatagcttgaatgaaagagaatcagtaattggaataagcgtcttctcgatagagtgtccgtataccaacatgtctgatattttgatgtattccattaaattatttagttttttctttttattttcgttaaacagcatttctgtcaacggaccccaacatcgttgaccgattaagttttgattgatttttccgtgtaatgcgtatctagtcagatcgtatagcctatccaataatccatcatctgtgcgtagatcacatcgtacactttttaattctctatagaagagcgacagacatctggagcaattacagacagcaatttctttattctctacagatgtaagatacttgaagacattcctatgatgatgcagaattttggataacacggtattgatggtatctgttaccataattcctttgatggctgatagtgtcagagcacaagatttccaatctttgacaatttttagcaccattatctttgttttgatatctatatcagacagcatggtgcgtctgacaacacagggattaagacggaaagatgaaatgattctctcaacatcttcaatggataccttgctattttttctggcattatctatatgtgcgagaatatcctctagagaatcagtatcctttttgatgatagtggatctcaatgacatgggacgtctaaaccttcttattttatcaccagattgcatggtgatttgtcttctttcttttatcataatgtaatctctaaattcatcggcaaattgtctatatctaaaatcataatatgagatgtttacctctacaaatatctgttcgtccaatgttagagtatctacatcagttttgtattccaaattaaacatggcaacggatttaattttatattcctctattaagtcctcgtcgataataacagaatgtagataatcatttaatccatcgtacatggttggaagatgcttgttgacaaaatctttaattgtcttgatgaaggtgggactatatctaacatcttgattaataaaatttataacattgtccataggatactttgtaactagttttatacacatctcttcatcggtaagtttagacagaatatcgtgaacaggtggtatattatattcatcagatatacgaagaacaatgtccaaatctatattgtttaatatattatatagatgtagcgtagctcctacaggaatatctttaactaagtcaatgatttcatcaaccgttagatctattttaaagttaatcatataggcattgatttttaaaaggtatgtagccttgactacattctcattaattaaccattccaagtcactgtgtgtaagaagattatattctatcataagcttgactacatttggtcccgataccattaaagaattcttatgatataaggaaacagcttttaggtactcatctactctacaagaattttggagagccttaacgatatcagtgacgtttattatttcaggaggaaaaaacctaacattgagaatgtcggagttaatagcttccagatacagtgattttggcaatagtccgtgtaatccataatccagtaacacgagctggtgcttgctagacaccttttcaatgtttaatttttttgaaataagctttgataaagccttcctcgcaaattccggatacatgaacatgtcggcgacatgattaagtattgttttttcattatttttatattttctcaacaagttctcaataccccaatagatgatagaatatcacccaatgcgtccatgttgtctatttccaacaggtcgctatatccaccaatagaagtttttccaaaaaagattctaggaacagttctaccaccagtaatttgttcaaaatagtcacgcaattcattttcgggtttaaattctttaatatcgacaatttcatacgctcctcttttgaaactaaacttatttagaatatccagtgcatttctacaaaaaggacatgtatacttgacaaaaattgtcactttgttattggccaacctttgttgtacaaattcctcggccattttaatatttaagtgatataaaactatctcgacttatttaactctttagtcgagatatatggacgcagatagctatatgatagccaactacagaaggcaaacgctataaaaaacataattacgacgagcatatttataaatatttttattcagcattacttgatatagtaatattaggcacagtcaaacattcaaccactctcgatacattaactctctcattttctttaacaaattctgcaatatcttcgtaaaaagattcttgaaactttttagaatatctatcgactctagatgaaatagcgttcgtcaacatactatgttttgtatacataaaggcgcccattttaacagtttctagtgacaaaatgctagcgatcctaggatcctttagaatcacatagattgacgattcgtctctcttagtaactctagtaaaataatcatacaatctagtacgcgaaataatattatccttgacttgaggagatctaaacaatctagttttgagaacatcgataagttcatcgggaatgacatacatactatctttaatagaactcttttcatccagttgaatggattcgtccttaaccaactgattaatgagatcttctattttatcattttccagatgatatgtatgtccattaaagttaaattgtgtagcgcttctttttagtctagcagccaatactttaacatcactaatatcgatatacaaaggagatgatttatctatggtattaagaattcgtttttcgacatctgtcaaaaccaattcctttttgcctgtatcatccagttttccatcctttgtaaagaaattattttctactagactattaataagactgataaggattcctccataattgcacaatccaaactttttaacaaaactagactttacaagatctacaggaatgcgtacttcaggtttcttagcttgtgattttttcttttgtggacattttcttgtgaccaactcatctaccatttcattgattttagcagtgaaataagctttcaatgcacgggcactgatactattgaaaacgagttgatcttcaaattccgccatttaagttcaccaaacaacttttaaatacaaatatatcaatagtagtagaataagaactataaaaaaaataataattaaccaataccaaccccaacaaccggtattattagttgatgtgactgttttctcatcacttagaacagatttaacaatttctataaagtctgtcaaatcatcttccggagaccccataaatacaccaaatatagcggcgtacaacttatccatttatacattgaatattggcttttctttatcgctatcttcatcatattcatcatcaatatcaacaagtcccagattacgagccagatcttcttctacattttcagtcattgatacacgttcactatctccagagagtccgataacgttagccaccacttctctatcaatgattagtttcttgagtgcgaatgtaatttttgtttccgttccggatctatagaaaactacaggtgtgataattgccttggccaattgtctttctcttttactgagtgattctagttcaccttctatagatctgagaatggatgattctccagtcgaaacatattctaccatggatccgtttaatttgttgatgaagatggattcatccttaaatgttttctctgtaatagtttccaccgaaagactatgcaaagaatttggaatgcgttccttgtgcttaatgtttccatagacggcttctagaagttgatacaacataggactagccgcggtaacttttatttttagaaagtatccatcgcttctatcttgtttagatttatttttataaagtttagtctctccttccaacataataaaagtggaagtcatttgactagataaactatcagtaagttttatagagatagacgaacaattagcgtattgagaagcatttagtgtaacgtattcgatacattttgcattagatttactaatcgattttgcatactctataacacccgcacaagtctgtagagaatcgctagatgcagtaggtcttggtgaagtttcaactctcttcttgattaccttactcatgattaaacctaaataattgtactttgtaatataatgatatatattttcactttatctcatttgagaataaaaatgtttttgtttaaccactgcatgatgtacagatttcggaatcgcaaaccaccagtggttttattttatccttgtccaatgtgaattgaatgggagcggatgcgggtttcgtacgtagatagtacattcccgtttttagaccgagactccatccgtaaaaatgcatactcgttagtttggaataactcggatctgctatatggatattcatagattgactttgatcgatgaaggctcccctgtctgcagccatttttatgatcgtcttttgtggaatttcccaaatagttttataaactcgcttaatatcttctggaaggtttgtattctgaatggatccaccatctgccataatcctattcttgatctcatcattccataattttctctcggttaaaactctaaggagatgcggattaactacttgaaattctccagacaatactctccgagtgtaaatattactggtatacggttccaccgactcattatttcccaaaatttgagcagttgatgcagtcggcataggtgccaccaataaactatttctaagaccgtatgttctgattttatcttttagaggttcccaattccaaagatccgacggtacaacattccaaagatcatattgtagaataccgttactggcgtacgatcctacatatgtatcgtatggtccttccttctcagctagttcacaactcgcctctaatgcaccgtaataaatggtttcgaagatcttcttatttagatcttgtgcttccaggctatcaaatggataatttaagagaataaacgcgtccgctaatccttgaacaccaataccgataggtctatgtctcttattagagatttcagcttctggaataggataataattaatatctataattttattgagatttctgacaattactttgaccacatccttcagtttgagaaaatcaaatcgcccatctattacaaacatgttcaaggcaacagatgccagattacaaacggctacctcattagcatccgcatattgtattatctcagtgcaaagattactacacttgatagttcctaaattttgttgattactctttttgttacacgcatccttataaagaatgaatggagtaccagtttcaatctgagattctataatcgctttccagacgactcgagcctttattatagatttgtatctcctttctctttcgtatagtgtatacaatcgttcgaactcgtctccccaaacattgtccaatccaggacattcatccggacacatcaacgaccactctccgtcatccttcactcgtttcataaagagatcaggaatccaaagagctataaatagatctctggttctatgttcctcgtttcctgtattctttttaagatcgaggaacgccataatatcagaatgccacggttccaagtatatggccataactccaggccgtttgtttcctccctgatctatgtatctagcggtgttattataaactctcaacattggaataataccgtttgatataccattggtaccggagatatagcttccactggcacgaatattactaattgatagacctattccccctgccattttagagattaatgcgcatcgttttaacgtgtcatagataccctctatgctatcatcgatcatgttaagtagaaaacagctagacatttggtgacgactagttcccgcattaaataaggtaggagaagcgtgcgtaaaccatttttcagaaagtagattgtacgtctcaatagctgagtctatatcccattgatgaattcctactgcgacacgcattaacatgtgctgaggtctttcaacgatcttgttgtttattttcaacaagtaggatttttccaaagttttaaaaccaaaatagttgtatgaaaagtctcgttcgtaaataataaccgagttgagtttatccttatatttgttaactatatccatggtgatacttgaaataatcggagaatgtttcccatttttaggattaacatagttgaataaatcctccatcacttcactaaatagtttttttgtttccttgtgtagatttgatacggctattctggcggctagaatggcataatccggatgttgtgtagtacaagtggctgctatttcggctgccagagtgtccaattctaccgttgttactccattatatattccttgaataaccttcatagctattttaataggatctatatgatccgtgtttaagccataacataattttctaatacgagacgtgattttatcaaacatgacattttccttgtatccatttcgtttaatgacaaacatttttgttggtgtaataaaaaaattatttaacttttcattaatagggatttgacgtatgtagcgtacaaaattatcgttcctggtatatagataaagagtcctatatatttgaaaatcgttacggctcgattaaactttaatgattgcatagtgaatatatcattaggatttaactccttgactatcagggcggcaccagaaattaccatcaaaagcattaatacagttatgccgatcgcagttagaacggttatagcatccaccatttatatctaaaaattagatcaaagaatatgtgacaaagtcctagttgtatactgagaattgacgaaacaatgtttcttacatatttttttcttattagtaactgacttaatagtaggaactggaaagctagacttgattattctataagtatagatacccttccaaataatattctctttgataaaagttccagaaaatgtagaattttttaaaaagttatcttttgctattaccaagattgtgtttagacgcttattattaatatgagtgatgaaatccacaccgcctctagatatcgcttttatttccacattagatggtaaatccaatagtgaaactatctttttaggaatgtatggactcgcgtttagaggagtgaacgtcttaggcgtcggaaaggatgattcatcaaacgaataaacaatttcacaaatggatgttaatgtattagtaggaaattttttgacgctagtggaattgaagattctaatggatgatgttctacctatttcatccgataacatgttaatttccgacaccaacggttttaatatttcgatgatatacggtagtctctctttcggacttatatagcttattccacaatacgagtcattatatactccaaaaaacaaaataactagtataaaatctgtatcgaatgggaaaaacgaaattatcgacataggtatagaatctggaacattgaacgtattaatacttaattctttttctgtggtaagtaccgataggttattgacattgtatggttttaaatattctataacttgagacttgatagatattagtgatgaattgaaaattatttttatcaccacgtgtgtttcaggatcatcgtcgacgcccgtcaaccaaccgaatggagtaaaataaatatcattaatatatgctctagatattagtatttttatcaatcctttgattatcatcttctcgtaggcgaatgattccatgatcaagagtgatttaagaacatcctccggagtattaatgggcttagtaaacagtccatcgttgcaataataaaagttatccaagttaaaggatattatgcattcgtttaaagatatcacctcatctgacggagacaattttttggtaggttttagagactttgaagctacttgtttaacaaagttattcatcgtcgtttactattctatttaattttgtagttaatttatcacatatcacattaattgactttttggtccatttttccatacgtttatattcttttaatcctgcgttatccgtttccgttatatccagggatagatcttgcaagttaaatagaatgctcttaaataatgtcatttttttatccgctaaaaatttaaagaatgtataaacttttttcaaagatttaaaacttttaggtggagttctagtacacaatatcataaacaaactaataaacatcccgcattcagattccaacagctgattaacttccacattaatacagcctattttcgctccaaatgtacattcgaaaaatctgaataaaacatcgatgtcacaatttgtattatccaatacagaatgtctgtgattcgtgttaaaaccatcggagaaggaatagaaataaaaattattatagtggtggaattcagttggaatattgcctccggagtcataaaaggatactaaacattgttttttatcataaattacacatttccaatgagacaaataacaaaatccaaacattacaaatctagaggtagaacttttaattttgtctttaagtatatacgataagatatgtttattcataaacgcgtcaaatttttcatgaatcgctaaggagtttaagaatctcatgtcaaattgtcctatataatccacttcggatccataagcaaactgagagactaagttcttaatacttcgattgctcatccaggctcctctctcaggctctattttcatcttgacgacctttggattttcaccagtatgtattcctttacgtgataaatcatcgattttcaaatccatttgtgagaagtctatcgccttagatactttttcccgtagtcgaggtttaaagaaatacgctaacggtatactagtaggtaactcaaagacatcatatatagaatggtaacgcgtctttaactcgtcggttaactctttcttttgatcgagttcgtcgctactattgggtctgctcaggtgccccgactctactagttccaacatcataccgataggaatacaagacactttgccagcggttgtagatttatcatatttctccactacatatccgttacaatttgttaaaaatttagatacatctatattgctacataatccagctagtgaatatatatgacataataaattggtaaatcctagttctggtattttactaattactaaatctgtatatctttccatttatcatggaaaagaatttaccagatatcttcttttttccaaactgcgttaatgtattctcttacaaatattcacaagatgaattcagtaatatgagtaaaacggaacgtgatagtttctcattggcggtgtttccagttataaaacatagatggcataacgcacacgttgtaaaacataaaggaatatacaaagttagtacagaagcacgtggaaaaaaagtatctcctccatcactaggaaaacccgcacacataaacctaaccgcgaagcaatatatatacagtgaacacacaataagctttgaatgttatagttttctaaaatgtataacaaatacagaaatcaattcgttcgatgagtatatattaagaggactattagaagctggtaatagtttacagatattttccaattccgtaggtaaacgaacagatactataggtgtactagggaataagtatccatttagcaaaattccattggcctcattaactcctaaagcacaacgagagatattttcagcgtggatttctcatagacctgtagttttaactggaggaactggagtgggtaagacgtcacaggtacccaagttattgctttggtttaattatttatttggtggattctctactctagataaaatcactgactttcacgaaagaccagtcattctatctcttcctaggatagctttagttagattgcatagcaataccattttaaaatcattgggatttaaggtactagatggatctcctatttctttacggtacggatctataccggaagaattaataaacaaacaaccaaaaaaatatggaattgtattttctacccataagttatctctaacaaaactatttagttatggcactcttattatagacgaagttcatgagcatgatcaaataggagatattattatagcagtagcgagaaagcatcatacgaaaatagattctatgtttttaatgactgccacgttagaggatgacagggaacggctaaaagtatttttacctaatcccgcatttatacatattcctggagatacactgtttaaaattagcgaggtatttattcataataagataaatccatcttccagaatggcatacatagaagaagaaaagagaaatttagttactgctatacagatgtatactcctcctgatggatcatccggtatagtctttgtggcatccgttgcacagtgtcacgaatataaatcatatttagaaaaaagattaccgtatgatatgtatattattcatggtaaggtcttagatatagacgaaatattagaaaaagtgtattcatcacctaatgtatcgataattatttctactccttatttggaatccagcgttactatacacaatgttacacacatttatgatatgggtagagtttttgtccccgctccttttggaggatcgcaacaatttatttctaaatctatgagagatcaacgaaaaggaagagtaggaagagttaatcctggtacatacgtctatttctatgatctgtcttatatgaagtctatacagcgaatagattcagaatttctacataattatatattgtacgctaataagtttaatctaacactccccgaagatttgtttataatccctacaaatttggatattctatggcgtacaaaggaatatatagactcgttcgatattagtacagaaacatggaataaattattatccaattattatatgaagatgatagagtatgctaaactttatgtactaagtcctattctcgctgaggagttggataactttgagaggacgggagaattaactagtattgtacgagaagccattttatctctaaatttacgaattaagattttaaattttaaacataaagatgatgatacgtatatacacttttgtaaaatattattcggtgtctataacggaacaaacgctactatatattatcatagacctctaacgggatatatgaatatgatttcagatactatatttgttcctgtagataataactaaaaatcaaactctaatgaccacatctttttttagagatgaaaaattttctacatctccttttgtagacacgactaaacattttgcagaaaaaagtttattagtgtttagataatcgtatacttcatcagtgtagatagtaaatgtgaacagataaaaggtattcttgctcaatagattggtaaattccatagaatatattaatcctttcttcttgagatcccacatcatttcaaccagagacgttttatccaatgatttacctcgtactataccacatacaaaactagattttgcagtgacgtcgtacctggtattcctaccaaacaaaattttacttttagttcttttagaaaattctaaggtagaatctctatttgccaatatgtcatctatggaattaccactagcaaaaaatgatagaaatatatattgatacatcgcagctggttttgatctactatactttaaaaacgaatcagattccataattgcctgtatatcatcagctgaaaaactatgttttacacgtattccttcggcatttctttttaatgatatatcttgtttagacaatgataaagttatcatgtccatgagagacgcgtctccgtatcgtataaatatttcattagatgttagacgcttcattaggggtatacttctataaggtttcttaatcagtccatcattggttgcgtcaagaactactatcggatgttgttgggtatctctagtgttacacatggccttactaaagtttgggtaaataactatgatatctctattaattatagatgcatatatttcattcgtcaaggatattagtatcgacttgctatcgtcattaatacgtgtaatgtaatcatataaatcatgcgatagccaaggaaaatttaaatagatgttcatcatataatcgtcgctataattcatattaatacgttgacattgactaatttgtaatatagcctcgccacgaagaaagctctcgtattcagtttcatcgataaaggataccgttaaatataactggttgccgatagtctcatagtctattaagtggtaagtttcgtacaaatacagaatccctaaaatattatctaatgttggattaatctttaccataactgtataaaatggagacggagtcataactattttaccgtttgtacttactggaatagatgaaggaataatctccggacatgctggtaaagacccaaatgtctgtttgaagaaatccaatgttccaggtcctaatctcttaacaaaaattacgatattcgatcccgatatcctttgcattctatttaccagcatatcacgaactatattaagattatctatcatgtctattctcccaccgttatataaatcgcctccgctaagaaacgttagtatatccatacaatggaatacttcatttctaaaatagtattcgttttctaattctttaatgtgaaatcgtatactagaaagggaaaaattatctttgagttttccgttagaaaagaaccacgaaactaatgttctgattgcgtccgattccgttgctgaattaatggatttacaccaaaaactcatataacttctagatgtagaagcattcgctaaaaaattagtagaatcaaaggatataagtagatgttccaacaagtgagcaattcccaagatttcatctatatcattctcgaatccgaaattagaaattcccaagtagatatcctttttcatccgatcgttgatgaaaatacgaactttattcggtaagacaatcatttactaaggagtaaaataggaagtaatgttcgtatgtcgttatcatcgtataaattaaaggtgtgttttttaccattaagtgacattataattttaccaatattggaattataatataggtgtatttgcgcactcgcgacggttgatgcatcggtaaatatagctgtatctaatgttctagtcggtatttcatcatttcgctgtctaataatagcgttttctctatctgtttccattacagctgcctgaagtttattggtcggataatatgtaaaataataagaaatacatacgaataacaaaaataaaataagatataataaagatgccatttagagatctaattttgttcaacttgtccaaattcctacttacagaagatgaggaatcgttggagatagtgtcttccttatgtagaggatttgaaatatcttatgatgacttgataacttactttccagataggaaataccataaatatatttataaagtatttgaacatgtagatttatcggaggaattaagtatggaattccatgatacaactttgcgagatttagtttatcttagattgtacaagtattccaagtgtatacggccgtgttataaattaggagataatctaaaaggcatagttgttataaaggacaggaatatttatattagggaagcaaatgatgacttgatagaatatctcctcaaggaatacactcctcagatttatacatattctaatgagcgcgtccccataactggttcaaaattaattctttgtggattttctcaagttacatttatggcgtatacaacgtcgcatataacaacaaataaaaaggtagatgttctcgtttccaaaaaatgtatagatgaactagtcgatccaataaattatcaaatacttcaaaatttatttgataaaggaagcggaacaataaacaaaatactcaggaagatattttattcggtaaccggtggccaaactccataggtagctttttctatttcggattttagaatttccaaattcaccagcgatttatcggttttggtgaaatccaaggatttattaatgtccacaaatgccatttgttttgtctgtggattgtatttgaaaatggaaacgatgtagttagatagatgcgctgcgaagtttcctattagggttccgcgcttcacgtcacccagcatacttgaatcaccatcctttaaaaaaaatgataagatatcaacatggagtatatcatactcggattttaattcttctactgcatcactgacattttcacaaatactacaatacggtttaccgaaaataatcagtacgttcttcatttatgggtatcaaaaacttaaaatcgttactgctggaaaataaatcactgacgatattagatgataatttatacaaagtatacaatggaatatttgtggatacaatgagtatttatatagccgtcgccaattgtgtcagaaacttagaagagttaactacggtattcataaaatacgtaaacggatgggtaaaaaagggagggcatgtaaccctttttatcgatagaggaagtataaaaattaaacaagacgttagagacaagagacgtaaatattctaaattaaccaaggacagaaaaatgctagaattagaaaagtgtacatccgaaatacaaaatgttaccggatttatggaagaagaaataaaggcaaaaatgcaattaaaaatcgataaacttacatttcaaatatatttatctgattctgataacataaaaatatcattgaatgagatactaacacatttcaacaataatgagaatgttacattattttattgtgatgaacgagacgcagaattcgttatgtgtctcgaggctaaaacacatttctctaccacaggagaatggccgttgataataagtaccgatcaggatactatgctatttgcatctactgataatcatcctaagatgataaaaaacttaactcaactgtttaaatttgttccctcggcagaggataactatttagcaaaattaacggcgttagtgaatggatgtgatttctttcctggactctatggggcatctataacacccaccaacttaaacaaaatacaattgtttagtgattttacaatcgataatatagtcactagtttggcaattaaaaattattatagaaagactaactctaccgtagacgtgcgtaatattgttacgtttataaacgattacgctaatttagacgatgtctactcgtatgttcctccttgtcaatgcactgttcaagaatttatattttccgcattagatgaaaaatggaatgaatttaaatcatcttatttagagaccgttccgttaccctgtcaattaatgtacgcgttagaaccacgtaaggagattgatgtttcagaagttaaaactttatcatcttatatagatttcgaaaatactaaatcagatatcgatgttataaaatctatatcctcgatttttggatattctaacgaaaactgtaacacgatagtattcggcatctataaggataatttactactgagtataaataattcattttactttaacgatagtctgttaataaccaatactaaaagtgataatataataaatataggttactagattaaaaatggtgttccaactcgtgtgctctacatgcggtaaagatatttctcacgaacgatataaattgattatacgaaaaaaatcattaaaggatgtactcgtcagtgtaaagaacgaatgttgtaggttaaaattatctacacaaatagaacctcaacgtaacttaacagtgcaacctctattggatataaactaatatggatccggttaattttatcaagacatatgcgcctagaggttctattatttttattaattataccatgtcattaacaagtcatttgaatccatcgatagaaaaacatgtgggtatttattatggtacgttattatcggaacacttggtagttgaatctacctatagaaaaggagttcgaatagtcccattggatagtttttttgaaggatatcttagtgcaaaagtatacatgttagagaatattcaagttatgaaaatagcagctgatacgtcattaactttattgggtattccgtatggatttggtcatgatagaatgtattgttttaaattggtagctgactgttataaaaatgccggtgttgaaacatcgtctaaacgaatattaggtaaagatatttttctgagccaaaacttcacagacgataatagatggataaagatatatgattctaataatttaacattttggcaaattgattaccttaaagggtgagttaatatgcataactactcctccgttgttttttccctcgttctttttcttaacgttgtttgccatcactctcataatgtaaagatattctaaaatggtaaacttttgcatatcggacgcagaaattggtataaatgttgtaattgtattatttcccgtcaatggactagtcacagctccatcagttttatatcctttagagtatttctcactcgtgtctaacattctagagcattccatgatctgtttatcgttgatattggccggaaagatagattttttattttttattatattactattggcaattgtagatataacttctggtaaatatttttctaccttttcaatctcttctattttcaagccggctatatattctgctatattgttgctagtatcaataccttttcttgctaagaagtcatatgtggtattcactatatcagttttaactggtagttccattagcctttccacttctgcagaataatcagaaattggttctttaccagaaaatccagctactataataggctcaccgatgatcattggcaaaatcctatattgtaccagattaatgagagcatatttcatttccaataattctgctagttcttgagacattgatttatttgatgaatctagttggttctctagatactctaccatttctgccgcatacaataacttgttagataaaatcagggttatcaaagtgtttagcgtggctagaatagtgggcttgcatgtattaaagaatgcggtagtatgagtaaaccgttttaacgaattatatagtctccagaaatctgtggcgttacatacatgagccgaatgacatcgaagattgtccaatatttttaatagctgctctttgtccattatttctatatttgactcgcaacaattgtagataccattaatcactgattcctttttcgatgccggacaatagcacaattgtttagctttggactctatgtattcagaattaatagatatatctcttaatacagattgcactatacattttgaaactatgtcaaaaattgtagaacgacgctgttctgcagccatttaactttaaataatttacaaaaatttaaaatgagcatccgtataaaaatcgataaactgcgccaaattgtggcatatttttcagagttcagtgaagaagtgtctataaatgtagactcgacggatgagttaatgtatatttttgccgccttgggcggatctgtaaacatttgggccattatacctctcagtgcatcagtgttctaccgcggagccgaaaatattgtgtttaatcttccggtgtccaaggtaaaatcgtgtttgtgtagttttcacaatgatgccatcatagatatagaacctgatctggaaaataatctagtaaaactttctagttatcatgtagtaagtgtcgattgtaacaaggaactgatgcctattaggacagatactactatttgtctaagtatagatcaaaagaaatcttacgtgtttaattttcacaagtatgaagaaaaatgttgtggtagaaccgtcattcatttagaatggttgttgggctttatcaagtgtattagtcagcatcagcatttggctattatgtttaaagatgacaatattattatgaagactcctggtaatactgatgcgttttccagggaatattctatgactgaatgttctcaagaactacaaaagttttctttcaaaatagctatctcgtctctcaacaaactacgaggattcaaaaagagagtcaatgtttttgaaactagaatcgtaatggataatgacgataacattctaggaatgttgttttcggatagagttcaatcctttaagatcaacatctttatggcgtttttagattaatactttcaatgagataaatatgggtggcggagtaagtgttgagctccctaaacgggatccgcctccgggagtacccactgatgagatgttattaaacgtggataaaatgcatgacgtgatagctcccgctaagcttttagaatatgtgcatataggaccactagcaaaagataaagaggataaagtaaagaaaagatatccagagtttagattagtcaacacaggacccggtggtctttcggcattgttaagacaatcgtataatggaaccgcacccaattgctgtcgcacttttaatcgtactcattattggaagaaggatggaaagatatcagataagtatgaagagggtgcagtattagaatcgtgttggccagacgttcacgacactggaaaatgcgatgttgatttattcgactggtgtcagggggatacgttcgatagaaacatatgccatcagtggatcggttcagcctttaataggagtgatagaactgtagagggtcaacaatcgttaataaatctgtataataagatgcaaacattatgtagtaaagatgctagtgtaccaatatgtgaatcatttttgcatcatttacgcgcacacaatacagaagatagcaaagagatgatcgattatattctaagacaacagtctgcggactttaaacagaaatatatgagatgtagttatcccactagagataagttagaagagtcattaaaatatgcggaacctcgagaatgttgggatccagagtgttcgaatgccaatgttaatttcttactaacacgtaattataataatttaggactttgcaatattgtacgatgtaatactagcgtgaacaacttacagatggataaaacttcctcattaagattgtcatgtggattaagcaatagtgatagattttctactgttcccgtcaatagagcaaaagtagttcaacataatattaaacattcgttcgacctaaaattgcatttgatcagtttattatctctcttggtaatatggatactaattgtagctatttaaatgggtgccgcggcaagcatacagacgacggtgaatacactcagcgaacgtatctcgtctaaattagaacaagaagcgaacgctagtgctcaaacaaaatgtgatatagaaatcggaaatttttatatccgacaaaaccatggatgtaacctcactgttaaaaatatgtgctctgcggacgcggatgctcagttggatgctgtgttatcagccgctacagaaacatatagtggattaacaccggaacaaaaagcatacgtgccagctatgtttactgctgcgttaaacattcagacaagtgtaaacactgttgttagagattttgaaaattatgtgaaacagacttgtaattctagcgcggtcgtcgataacaaattaaagatacaaaacgtaatcatagatgaatgttacggagccccaggatctccaacaaatttggaatttattaatacaggatctagcaaaggaaattgtgccattaaagcgttgatgcaattgacgactaaggccactactcaaatagcacctagacaagttgctggtacaggagttcagttttatatgattgttatcggtgttataatattggcagcgttgtttatgtactatgccaagcgtatgctgttcacatccaccaatgataaaatcaaacttattttagccaataaggaaaacgtccattggactacttacatggacacattctttagaacttctccgatggttattgctaccacggatatacaaaactgaaaatatattgataatattttaatagattaacatggaagttatcgctgatcgtctagacgatatagtgaaacaaaatatagcggatgaaaaatttgtagattttgttatacacggtctagagcatcaatgtcctgctatacttcgaccattaattaggttgtttattgatatactattatttgttatagtaatttatatttttacggtacgtctagtaagtagaaattatcaaatgttgttggtggcgctagtcatcacattaactattttttattactttatactataatagtactagactgacttctaacaaacatctcacctgccataaataaatgcttgatattaaagtcttctatttctaacactattccatctgtggaaaataatactctgacattatcgctaattgacacatcggtgagtgatatgcctataaagtaataatcttctttgggcacatataccagtgtaccaggttctaacaacctatttactggtgctcctgtagcatactttttctttaccttgagaatatccatcgtttgcttggtcaatagcgatatgtgattttttatcaaccactcgaaaaagtaattggagtgttcatatcctctacgggctattgtctcatggccgtgtatgaaatttaagtaacacgactgtggtagatttgttctatagagccggttgccgcaaatagatagaactaccaatatgtctgtacaaatgttaaacattaattgattaacagaaaaaacaatgttcgttctgggaatagaaaccagatcaaaacaaaattcgttagaatatatgccacgtttatacattgaatataaaataactacagtttgaaaaataacagtatcatttaaacatttaacttgcggggttaatctcacaactttactgtttttaaactgttcaaaatatagcatcgatccatgagaaatacgtttagccgcctttaatagaggaaatcccaccgcctttctggatctcaccaacgacgatagttctgaccagcaactcatttcttcatcatccacctgttttaacatataataggcaggagatagatatccgtcattgcaatattccttctcgtaggcacacaatctaatattgataaaatctccattctcttctctgcatttattatcttgtttcggtggctgattaggctgtagtcttggtttaggctttggtatatcgttgttgaatctattttggtcattaaatctttcatttcttcctggtatatttttatcacctcgtttggttggatttttgtctatattatcgtttgtaacatcggtacgggtattcatttatcacaaaaaaaacttctctaaatgagtctactgctagaaaacctcatcgaagaagataccatattttttgcaggaagtatatctgagtatgatgatttacaaatggttattgccggcgcaaaatccaaatttccaagatctatgctttctatttttaatatagtacctagaacgatgtcaaaatatgagttggagttgattcataacgaaaatatcacaggagcaatgtttaccacaatgtataatataagaaacaatttgggtctaggagatgataaactaactattgaagccattgaaaactatttcttggatcctaacaatgaagttatgcctcttattattaataatacggatatgactgccgtcattcctaaaaaaagtggtaggagaaagaataagaacatggttattttccgtcaaggatcatcacctatcttgtgtattttcgaaactcgtaaaaagattaatatttataaagaaaatatggaatccgcatcgactgagtatacacctatcggagacaacaaggctttgatatctaaatatgcgggaattaatatcctaaatgtgtattctccttccacatccataagattgaatgccatttacggattcaccaataaaaataaactagagaaacttagtactaataaggaactagaatcgtatagttctagccctcttcaagaacccattaggttaaatgattttctgggactattggaatgtgttaaaaagaatattcctctaacagatattccgacaaaggattgattactataaatggagaatgttcctaatgtatactttaatcctgtgtttatagagcccacgtttaaacattctttattaagtgtttataaacacagattaatagttttatttgaagtattcgttgtattcattctaatatatgtattttttagatctgaattaaatatgttcttcatgcctaaacgaaaaatacccgatcctattgatagattacgacgtgctaatctagcgtgtgaagacgataaattaatgatctatggattaccatggatgacaactcaaacatctgcgttatcaataaatagtaaaccgatagtgtataaagattgtgcaaagcttttgcgatcaataaatggatcacaaccagtatctcttaacgatgttcttcgcagatgatgattcattttttaagtatttggctagtcaagatgatgaatcttcattatctgatatattgcaaatcactcaatatctagactttctgttattattattgatccaatcaaaaaataaattagaagccgtgggtcattgttatgaatctctttcagaggaatacagacaattgacaaaattcacagactttcaagattttaaaaaactgtttaacaaggtccctattgttacagatggaagggtcaaacttaataaaggatatttgttcgactttgtgattagtttgatgcgattcaaaaaagaatcctctctagctaccaccgcaatagatcctattagatacatagatcctcgtcgcgatatcgcattttctaacgtgatggatatattaaagtcgaataaagtgaacaataattaattctttattgtcatcatgaacggcggacatattcagttgataatcggccccatgttttcaggtaaaagtacagaattaattagacgagttggtacctgcagcggccgctcgagagctcggaggtaatgatatgtatcaatcggtgtgtagaaagtgttacatcgactcataatattatattttttatctaaaaaactaaaaataaacattgattaaattttaatataatacttaaaaatggatgttgtgtcgttagataaaccgtttatgtattttgaggaaattgataatgagttagattacgaaccagaaagtgcaaatgaggtcgcaaaaaaactaccgtatcaaggacagttaaaactattactaggagaattattttttcttagtaagttacagcgacacggtatattagatggtgccaccgtagtgtatataggatcggctcctggtacacatatacgttatttgagagatcatttctataatttaggagtgatcatcaaatggatgctaattgacggccgccatcatgatcctattttaaatggattgcgtgatgtgactctagtgactcggttcgttgatgaggaatatctacgatccatcaaaaaacaactgcatccttctaagattattttaatttctgatgtaagatccaaacgaggaggaaatgaacctagtacggcggatttactaagtaattacgctctacaaaatgtcatgattagtattttaaaccccgtggcatctagtcttaaatggagatgcccgtttccagatcaatggatcaaggacttttatatcccacacggtaataaaatgttacaaccttttgctccttcatattcagctgaaatgagattattaagtatttataccggtgagaacatgagactgactcgagttaccaaattagacgctgtaaattatgaaaaaaagatgtactaccttaataagatcgtccgtaacaaagtagttgttaactttgattatcctaatcaggaatatgactattttcacatgtactttatgctgaggaccgtgtactgcaataaaacatttcctactactaaagcaaaggtactatttctacaacaatctatatttcgtttcttaaatattccaacaacatcaactgaaaaagttagtcatgaaccaatacaacgtaaaatatctagcaaaaattctatgtctaaaaacagaaatagcaagagatccgtacgcggtaataaatagaaacgtgctactgagatatactaccgatatagagtataatgatttagttactttaataaccgttagacataaaattgattctatgaaaactgtgtttcaggtatttaacgaatcatccataaattatactccggttgatgatgattatggagaaccaatcattataacatcgtatcttcaaaaaggtcataacaagtttcctgtaaattttctatacatagatgtggtaatatctgacttatttcctagctttgttagactagatactacagaaactaatatagttaatagtgtactacaaacaggcgatggtaaaaagactcttcgtcttcccaaaatgttagagacggaaatagttgtcaagattctctatcgccctaatataccattaaaaattgttagatttttccgcaataacatggtaactggagtagagatagccgatagatctgttatttcagtcgctgattaatcaattagtagagatgagataagaacattataataatcaataatattatcttatatctcgtttagaaaaatgctaatattaaaatagctaacgctagtaatccaatcggaagccatttgatatctataatagggtatctaatttcctgattcagatagcggacagctatattctcggtagctactcgtttggaatcacaaacattatttacatctaatttactatctgtaatggaaacgtttcccaatgaaatggtacaatccgatacattgcattttgttatatttttttttaaagaggctggtaacaacgcatcgcttcgtttacatggctcgtaccaacaataatagggtaatcttgtatctattcctatccgtactatgcttttatcaggataaatacatttacatcgtatatcgtctttgttagcatcacagaatgcataaatttgttcgtccgtcatgataaaaatttaaagtgtaaatataactattatttttatagttgtaataaaaagggaaatttgattgtatactttcggttctttaaaagaaactgacttgataaaaatggctgtaatctctaaggttacgtatagtctatatgatcaaaaagagattaatgctacagatattatcattagtcatgttaaaaatgacgacgatatcggtaccgttaaagatggtagactaggtgctatggatggggcattatgtaaaacttgtgggaaaacggaattggaatgtttcggtcactggggtaaagtaagtatttataaaactcatatagttaagcctgaatttatttcagaaattattcgtttactgaatcatatatgtattcactgcggattattgcgttcacgagaaccgtattccgacgatattaacctaaaagagttatcgggacacgctcttaggagattaaaggataaaatattatccaagaaaaagtcatgttggaacagcgaatgtatgcaaccgtatcaaaaaattactttttcaaagaaaaaggtttgtttcgtcaacaagttggatgatattaacgttcctaattctctcatctatcaaaagttaatttctattcatgaaaagttttggccattattagaaattcatcaatatccagctaacttattttatacagactactttcccatccctccgctgattattagaccggctattagtttttggatagatagtatacccaaagagaccaatgaattaacttacttattaggtatgatcgttaagaattgtaacttgaatgctgatgaacaggttatccagaaggcggtaatagaatacgatgatattaaaattatttctaataacactaccagtatcaatttatcatatattacatccggcaaaaataatatgattagaagttatatcgtcgcccgacgaaaagatcagaccgctagatctgtaattggtcccagtacatctatcaccgttaatgaggtaggaatgcccgcatatattagaaatacacttacagaaaagatatttgttaatgcctttacagtggataaagttaaacaactattagcgtcaaaccaagttaaattttactttaataaacgattaaaccaattaacaagaatacgccaaggaaagtttatcaaaaataaaatacatttattgcctggtgattgggtagaagtagctgttcaagaatatacaagtattatttttggaagacagccgtctctacatagatacaacgtcatcgcttcatctatcagagctaccgaaggagatactatcaaaatatctcccggaattgccaactctcaaaatgctgatttcgacggagatgaagaatggatgatattggagcaaaatcctaaagccgtaattgaacaaagtattcttatgtatccgacgacgttactcaaacacgatattcatggagcccccgtttatggatctattcaagatgaaatcgtagcagcgtattcattgtttaggatacaagatctttgtttagatgaagtattgaacatcttggggaaatatggaagagagttcgatcctaaaggtaaatgtaaattcagcggtaaagatatctatacttacttgataggtgaaaagattaattatccgggtctcttaaaggatggtgaaattattgcaaacgacgtagatagtaattttgttgtggctatgaggcatctgtcattggctggactcttatccgatcataagtcgaacgtggaaggtatcaactttattatcaagtcatcttatgtttttaagagatatctatctatttacggttttggggtgacattcaaagatctgagaccaaattcgacgttcactaataaattggaggccatcaacgtagaaaaaatagaacttatcaaagaagcatacgccaaatatctcaacgatgtaagagacgggaaaatagttccattatctaaagctttagaggcggactatgtggaatccatgttatccaacttgacaaatcttaatatccgagagatagaagaacatatgagacaaacgctgatagatgatccagataataacctcctgaaaatggccaaagcgggttataaagtaaatcctacagaactaatgtatattctaggtacgtatggacaacaaaggattgatggtgaaccagcagagactcgagtattgggtagagtcttaccttactatcttccagactctaaggatccagaaggaagaggttacattcttaattctttaacaaaaggattaacgggttctcaatattacttttcgatgctggttgccagatctcaatctactgatatcgtctgtgaaacatcacgtaccggaacactggctagaaaaatcattaaaaagatggaggatatggtggtcgacggatacggacaagtagttataggtaatacgctcatcaagtacgccgccaattataccaaaattctaggctcagtatgtaaacctgtagatcttatctatccagatgagtccatgacttggtatttggaaattagtgctctgtggaataaaataaaacagggattcgtttactctcagaaacagaaacttgcaaagaagacattggcgccgtttaatttcctagtattcgtcaaacccaccactgaggataatgctattaaggttaaggatctgtacgatatgattcataacgtcattgatgatgtgagagagaaatacttctttacggtatctaatatagattttatggagtatatattcttgacgcatcttaatccttctagaattagaattacaaaagaaacggctatcactatctttgaaaagttctatgaaaaactcaattatactctaggtggtggaactcctattggaattatttctgcacaggtattgtctgagaagtttacacaacaagccctgtccagttttcacactactgaaaaaagtggtgccgtcaaacaaaaacttggtttcaacgagtttaataacttgactaatttgagtaagaataagaccgaaattatcactctggtatccgatgatatctctaaacttcaatctgttaagattaatttcgaatttgtatgtttgggagaattaaatccagacatcactcttcgaaaagaaacagataaatatgtagtagatataatagttaatagattatacatcaagagagcagaaataaccgaattagttgtcgaatatatgattgaacgatttatctcctttagcgtcattgtaaaggaatggggtatggagacattcattgaggacgaggataatattagatttactgtctacctaaatttcgttgaaccggaagaattgaatcttagtaagtttatgatggttcttccgggtgccgccaacaagggcaagattagtaaattcaagattcctatctctgattatacgggttatgacgacttcaatcaaacaaaaaagctcaataagatgactgtagaactcatgaatctaaaagaattgggttctttcgatttggaaaacgtcaacgtgtatcctggagtatggaatacatacgatatcttcggtatcgaggccgctcgtgaatacttgtgcgaagccatgttaaacacctatggagaagggttcgattatctgtatcagccttgtgatcttctcgctagtttactatgtgctagttacgaaccagaatcagttaataaattcaagttcggtgcagctagtactcttaagagagctacgttcggagacaataaagcattgttaaacgcggctcttcataaaaagtcagaacctattaacgataatagtagctgccacttttttagcaaggtccctaatataggaactggatattacaaatactttatcgacttgggtcttctcatgagaatggaaaggaaactatctgataagatatcttctcaaaagatcaaggaaatggaagaaacagaagacttttaattcttatcaataacatatttttctatgatctgtcttttaaacgatggattttccacaaatgcgcctctcaagtccctcatagaatgatacacgtataaaaaatatagcataggcaatgactccttatttttagacattagatatgccaaaatcatagccccgcttctatttactcccgcagcacaatgaaccaacacgggctcgtttcgttgatcacatttagataaaaaggcggttacgtcgtcaaaatatttactaatatcggtagttgtatcatctaccaacggtatatgaataatattaatattagagttaggtaatgtatatttatccatcgtcaaatttaaaacatatttgaacttaacttcagatgatggtgcatccatagcatttttataatttcccaaatacacattattggttacccttgtcattatagtgggagatttggctttgtgcatatctccagttgaacgtagtagtaagtatttatacaaacttttcttatccatttataacgtacaaatggataaaactactttatcggtaaacgcgtgtaatttagaatacgttagagaaaaggctatagtaggcgtacaagcagccaaaacatcaacacttatattctttgttattatattggcaattagtgcgctattactctggtttcagacgtctgataatccagtctttaatgaattaacgagatatatgcgaattaaaaatacggttaacgattggaaatcattaacggatagcaaaacaaaattagaaagtgatagaggtagacttctagccgctggtaaggatgatatattcgacttcaaatgtgtggatttcggcgcctattttatagctatgcgattggataagaaaacatatctgccgcaagctattaggcgaggtactggagacgcgtggatggttaaaaaggcggcaaaggtcgatccatctgctcaacaattttgtcagtatttgataaaacacaagtctaataatgttattacttgtggtaatgagatgttaaatgaattaggttatagcggttattttatgtcaccgcattggtgttccgattttagtaatatggaatagtgttagataaatgcggtaacgaatgttcctgtaaggaaccataacagtttagatttaacgttaaagatgagcataaacataataaacaaaattacaatcaaacctataacattaatatcaaacaatccaaaaaatgaaatcagtggagtagtaaacgcgtacataactcctggataacgtttagcagctgccgttcctattctagaccaaaaattcggtttcatgttttcgaagcggtgttctgcaacaagtcggggatcgtgttctacatatttggcggcgttatccagtatctgcctattgatcttcatttcgttttcgattctggctatttcaaaataaaatcccgatgatagacctccagactttataatttcatctacgatgttcagcgccgtagtaactctaataatataggctgataagctaacatcataccctcctgtatatgtgaatatggcatgatttttgtccattacaagctcggttttaactttattgcctgtaataatttctctcatctgtaggatatctatttttttgtcatgcattgccttcaagacgggacgaagaaacgtaatatcctcaataacgttatcgttttctacaataactacatattctacctttttattttctaactcggtaaaaaaattagaatcccatagggctaaatgtctagcgatatttcttttcgtttcctctgtacacatagtgttacaaaaccctgaaaagaagtgagtatacttgtcatcatttctaatgtttcctccagtccactgtataaacgcataatccttgtaatgatctggatcatccttgactaccacaacatttcttttttctggcataacttcgttgtcctttacatcatcgaacttctgatcattaatatgctcatgaacattaggaaatgtttctgatggaggtctatcaataactggcacaacaataacaggagttttcaccgccgccatttagttattgaaattaatcatatacaactctttaatacgagttatattttcgtctatccattgtttcacatttacatatttcgacaaaaagatataaaatgcgtattccaatgcttctctgtttaatgaattactaaaatatacaaacacgtcactgtctggcaataaatgatatcttagaatattgtaacaatttattttgtattgcacatgttcgtgatctatgagttcttcttcgaatggcataggatctccgaatctgaaaacgtataaataggagttagaataataatatttgagagtattggtaatatataaactctttagcggtataattagtttttttctctcaatttctatttttagatgtgatggaaaaatgactaattttgtagcattagtatcatgaactctaatcaaaatcttaatatcttcgtcacacgttagctctttgaagtttttaagagatgcatcagttggttctacagatggagtaggtgcaacaattttttgttctacacatgtatgtactggagccattgttttaactataatggtgcttgtatcgaaaaactttaatgcagatagcggaagctcttcgccgcgactttctacatcgtaattgggttctaacgccgatctctgaatggatactagttttctaagttctaatgtgattctctgaaaatgtaaatccaattcctccggcattatagatgtgtatacatcggtaaataaaactatagtatccaacgatcccttctcgcaaattctagtcttaaccaaaaaatcgtatataaccacggagatggcgtatttaagagtggattcttctaccgttttgttcttggatgtcatataggaaactataaagtccgcactactgttaagaatgattactaacgcaactatatagttcaaattaagcattttggaaacataaaataactctgtagacgatacttgactttcgaataagtttgcagacaaacgaagaaagaacagacctctcttaatttcagaagaaaactttttttcgtattcctgacgtctagagtttatatcaataagaaagttaagaattagtcggttaatgttgtatttcattacccaagtttgagatttcataatattatcaaaagacatgataatattaaagataaagcgctgactatgaacgaaatagctatatggttcgctcaagaatatagtcttgttaaacgtggaaacgataactgtatttttaatcacgtcagcggcatctaaattaaatataggtatatttattccacacactctacaatatgccacaccatcttcataataaataaattcgttagcaaaattattaattttagtgaaatagttagcgtcaactttcatagcttccttcaatctaatttgatgctcacacggtgcgaattccactctaacatcccttttccatgcctcaggttcatcgatctctataatatctagtttcttgcgtttcacaaacacgggctcgtctctcgcgatgagatctgtatagtaactatgtaaatgataactagatagaaagatgtagctatatagatgacgatcctttaagagaggtataataactttaccccaatcagataaactattgttatggtcttcggaaaaagaatttttataaatttttccagtattttccaaatatacgtacttgacatctaaaaaatccttaatgataataggaatggataatccgtctattttataaagaaatacatatcgcacattatacttttttttggaaatgggaataccgatgtgtctacataaatatgcaaagtctaaatattttttagagaatcttagttggtccaaattcttttccaagtacggtaatagatttttcatattgaacggtatcttcttaatctctggttctagttccgcattaaatgatgaaactaagtcactatttttataactaacgattacatcacctctaacatcatcatttaccagaatactgatcttcttttgtcgtaaatacatgtctaatgtgttaaaaaaaagatcatacaagttatacgtcatttcatctgtggtattcttgtcattgaaggataaactcgtactaatctcttctttaacagcctgttcaaatttatatcctatatacgaaaaaatagcaaccagtgtttgatcatccgcgtcaatattctgttctatcgtagtgtataacaatcgtatatcttcttctgtgatagtcgatacgttataaaggttgataacgaaaatatttttatttcgtgaaataaagtcatcgtaggattttggacttatattcgcgtctagtagatatgcttttatttttggaatgatctcaattagaatagtctctttagagtccatttaaagttacaaacaactaggaaattggtttatgatgtataatttttttagtttttatagattctttattctatacttaaaaaatgaaaataaatacaaaggttcttgagggttgtgttaaattgaaagcgagaaataatcataaattatttcattatcgcgatatccgttaagtttgtatcgtaatggcgtggtcaattacaaataaagcggatactagtagcttcacaaagatggctgaaatcagagctcatctaaaaaatagcgctgaaaataaagataaaaacgaggatattttcccggaagatgtaataattccatctactaagcccaaaaccaaacgagccactactcctcgtaaaccagcggctactaaaagatcaaccaaaaaggaggaagtggaagaagaagtagttatagaggaatatcatcaaacaactgaaaaaaattctccatctcctggagtcagcgacattgtagaaagcgtggccgctgtagagctcgatgatagcgacggggatgatgaacctatggtacaagttgaagctggtaaagtaaatcatagtgctagaagcgatctttctgacctaaaggtggctaccgacaatatcgttaaagatcttaagaaaattattactagaatctctgcagtatcgacggttctagaggatgttcaagcagctggtatctctagacaatttacttctatgactaaagctattacaacactatctgatctagtcaccgagggaaaatctaaagttgttcgtaaaaaagttaaaacttgtaagaagtaaatgcgtgcacttttttataaagatggtaaactctttaccgataataattttttaaatcctgtatcagacgataatccagcgtatgaggttttgcaacatgttaaaattcctactcatttaacagatgtagtagtatatgaacaaacgtgggaggaggcgttaactagattaatttttgtgggaagcgattcaaaaggacgtagacaatacttttacggaaaaatgcatgtacagaatcgcaacgctaaaagagatcgtatttttgttagagtatataacgttatgaaacgaattaattgttttataaacaaaaatataaagaaatcgtccacagattccaattatcagttggcggtttttatgttaatggaaactatgttttttattagatttggtaaaatgaaatatcttaaggagaatgaaacagtagggttattaacactaaaaaataaacacatagaaataagtcccgatgaaatagttatcaagtttgtaggaaaggacaaagtttcacatgaatttgttgttcataagtctaatagactatataagccgctattgaaactgacggatgattctagtcccgaagaatttctgttcaacaaactaagtgaacgaaaggtatacgaatgtatcaaacagtttggtattagaatcaaggatctccgaacgtatggagtcaattatacgtttttatataatttttggacaaatgtaaagtccatatctcctcttccatcaccaaaaaagttaatagcgttaactatcaaacaaactgctgaagtggtaggtcatactccatcaatttcaaaaagagcttacatggcaacgactattttagaaatggtaaaggataaaaattttttagatgtagtatctaaaactacgttcgatgaattcctatctatagtcgtagatcacgttaaatcatctacggatggatgatatagatctttacacaaataattacaagaccgataaatggaaatggataagcgtatgaaatctctcgcaatgacagctttcttcggagagctaaacacattagatattatggcattgataatgtctatatttaaacgccatccaaacaataccattttttcagtggataaggatggtcagtttatgattgatttcgaatacgataattataaggcttctcaatatttggatctgaccctcactccgatatctggagatgaatgcaagactcacgcatcgagtatagccgaacaattggcgtgtgtggatattattaaagaggatattagcgaatatatcaaaactactccccgtcttaaacgatttataaaaaaataccgcaatagatcagatactcgtatcagtcgagatacagaaaagcttaaaatagctctagctaaaggcatagattacgaatatataaaagacgcttgttaataagtaaatgaaaaaaaactagtcgtttataataaaacacaatatggatgccaacatagtatcatcttctactattgcaacgtatatagacgctttagcaaagaatgcttcagaattagaacagaggtctaccgcatacgaaataaataatgaattggaactagtatttattaagccgccattaattactttgacaaatgtagtgaatatctctacgattcaggaatcgtttattcgatttaccgttactaataaggaaggtgtcaaaattagaactaagattccattatctaaggtacatggtctagatgtaaaaaatgtacagttagtagatgctatagataacatagtttgggaaaagaaatcattagtgacggaaaatcgtcttcacaaagaatgcttgttgagactatcgacagaggaacgtcatatatttttggattacaagaaatatggatcctctatccgactagaattagtcaatcttattcaagcaaaaacaaaaaactttacgatagactttaagctaaaatattttctaggatccggtgcccaatctaaaagttctttgttgcacgctattaatcatccaaagtcaaggcctaatacatctctggaaatagaattcacacctagagacaatgaaaaagttccatatgatgaactaataaaggaattgacgactctatcacgtcatatatttatggcttctccagagaatgtaattctttctccgcctattaacgcacctataaagacttttatgttgcctaaacaagatatagtaggtctggatctggaaaatctatatgccgtaactaagactgacggcattcctataactatcagagttacatcaaacgggttgtattgttattttacacatcttgggtatattattagatatccagttaagagaataatagattccgaagtagtagtctttggtgaggcagttaaggataagaactggaccgtatatctcattaagctaatagagcctgtgaatgcaatcaatgatagactagaagaaagtaagtatgttgaatctaaactagtggatatttgtgatcggatagtattcaagtcaaagaaatatgaaggtccgtttactacaactagtgaagtcgtcgatatgttatctacatatttaccaaagcaaccagaaggtgttattctgttctattcaaagggacctaaatctaacattgattttaaaattaaaaaggaaaatactatagaccaaactgcaaatgtagtatttaggtacatgtccagtgaaccaattatctttggagaatcgtctatctttgtagagtataagaaatttagcaacgataaaggctttcctaaagaatatggttctggtaagattgtgttatataacggcgttaattatctaaataatatctattgtttggaatatattaatacacataatgaagtgggtattaagtccgtggttgtacctattaagtttatagcagaattcttagttaatggagaaatacttaaacctagaatcgataaaaccatgaaatatattaactcagaagattattatggaaatcaacataatatcatagtcgaacatttaagagatcaaagcatcaaaataggagatatctttaacgaggataaactatcggatgtgggacatcaatacgccaataatgataaatttagattaaatccagaagttagttattttacgaataaacgaactagaggaccgttgggaattttatcaaactacgtcaagactcttcttatttctatgtattgttccaaaacatttttagacgattccaacaaacgaaaggtattggcgattgattttggaaacggtgctgacctggaaaaatacttttatggagagattgcgttattggtagcgacggatccggatgctgatgctatagctagaggaaatgaaagatacaacaaattaaactctggaattaaaaccaagtactacaaatttgactacattcaggaaactattcgatccgatacatttgtctctagtgtcagagaagtattctattttggaaagtttaatatcatcgactggcagtttgctatccattattcttttcatccgagacattatgctaccgtcatgaataacttatccgaactaactgcttctggaggcaaggtattaatcactaccatggacggagacaaattatcaaaattaacagataaaaagacttttataattcataagaatttacctagtagcgaaaactatatgtctgtagaaaaaatagctgatgatagaatagtggtatataatccatcaacaatgtctactccaatgactgaatacattatcaaaaagaacgatatagtcagagtgtttaacgaatacggatttgttcttgtagataacgttgatttcgctacaattatagaacgaagtaaaaagtttattaatggcgcatctacaatggaagatagaccgtctacaaaaaactttttcgaactaaatagaggagccattaaatgtgaaggtttagatgtcgaagacttacttagttactatgttgtttatgtcttttctaagcggtaaataataatatggtatgggttctgatatccccgttctaaatgcattaaataattccaatagagcgatttttgttcctataggaccttccaactgtggatactctgtattgttaatagatatattaatacttttgtcgggtaacagaggttctacgtcttctaaaaataaaagtttgataacatctggcctgttcataaataaaaacttggcgattctatatatactcttattatcaaatctagccattgtcttatagatgtgagctactgtaggtgtaccatttgattttctttctaatactatatatttctctcgaagaagttcttgcacatcatctgggaataaaatactactgttgagtaaatcagttattttttttatatcgatattgatggacatttttatagttaaggataataagtatcccaaagtcgataacgacgataacgaagtatttatacttttaggaaatcacaatgactttatcagatcaaaattaacaaaattaaaggagcatgtatttttttctgaatatattgtgactccagatacatatggatctttatgcgtcgaattaaatgggtctagttttcagcacggtggtagatatatagaggtggaggaatttatagatgctggaagacaagttagatggtgttctacatccaatcatatatctgaagatatacccgaagatatacacactgataaatttgtcatttatgatatatacacttttgacgctttcaagaataaacgattggtattcgtacaggtacctccgtcgttaggagatgatagctatttgactaatccgttattgtctccgtattatcgtaattcagtagccagacaaatggtcaatgatatgatttttaatcaagattcatttttaaaatatttattagaacatctgattagaagccactatagagtttctaaacatataacaatagttagatacaaggataccgaagaattaaatctaacgagaatatgttataatagagataagtttaaggcgtttgtattcgcttggtttaacggcgtttcggaaaatgaaaaggtactagatacgtataaaaaggtatctaatttgatataatgaattcagtgactgtatcacacgcgccatatactattacttatcacgatgattgggaaccagtaatgagtcaattggtagagttttataacgaagtagccagttggctgctacgagacgagacgtcgcctattcctgataagttctttatacagttgaaacaaccgcttagaaataaacgagtatgtgtgtgcggtatagatccgtatccgaaagatggaactggtgtaccgttcgaatcaccaaattttacaaaaaaatcaattaaggagatagcttcatctatatctagattaaccggagtaattgattataaaggttataaccttaatataatagacggggttataccctggaattattacttaagttgtaaattaggagaaacaaaaagtcacgcgatctactgggataagatttccaagttactgctgcagcatataactaaacacgttagtgttctttattgtttgggtaaaacagatttctcgaatatacgggcaaagttagaatccccggtaactaccatagtgggatatcatccagcggctagagaccgtcaattcgagaaagatcgatcatttgaaattatcaacgttttactggaattagacaacaaggtacctataaattgggctcaagggtttatttattaatgctttagtgaaattttaacttgtgttctaaatggatgcggctattagaggtaatgatgttatctttgttcttaagactataggtgtcccgtcagcgtgcagacaaaatgaagatccaagatttgtagaagcatttaaatgcgacgagttagaaagatatattgagaataatccagaatgtacactattcgaaagtcttagggatgaggaagcatactctatagtcagaattttcatggatgtagatttagacgcgtgtctagacgaaatagattatttaacggctattcaagattttattatcgaggtgtcaaactgtgtagctagattcgcgtttacagaatgcggcgccattcatgaaaatgtaataaaatccatgagatctaatttttcattgactaagtctacaaatagagataaaacaagttttcatattatctttttagacacgtataccactatggatacattgatagctatgaaacgaacactattagaattaagtagatcatctgaaaatccactaacaagatcgatagacactgccgtatataggagaaaaacaactcttcgggttgtaggtactaggaaaaatccaaattgcgacactattcatgtaatgcaaccacctcatgataatatagaagattacctattcacttacgtggatatgaacaacaatagttattacttttctctacaacgacgattggaggatttagttcctgataagttatgggaaccagggtttatttcattcgaagacgctataaaaagagtttcaaaaatattcattaattctataataaactttaatgatctcgatgaaaataattttacaacggtaccactggtcatagattacgtaacaccttgtgcattatgtaaaaaacgatcgcataaacatccgcatcaactatcgttggaaaatggtgctattagaatttacaaaactggtaatccacatagttgtaaagttaaaattgttccgttggatggtaataaactgtttaatattgcacaaagaattttagacactaactctgttttattaaccgaacgaggagaccatatagtttggattaataattcatggaaatttaacagcgaagaacccttgataacaaaactaattttgtcaataagacatcaactacctaaggaatattcaagcgaattactctgtccaagaaaacgaaagactgtagaagctaacatacgagacatgttagtagattcagtggagaccgatacctatccggataaacttccgtttaaaaatggtgtattggacctggtagacggaatgttttactctggagatgatgctaaaaaatatatgtgtactgtatcaaccggatttaaatttgacgatacaaagttcgtcgaagacagtccagaaatggaagagttaatgaatatcattaacgatatccaaccattaacggatgaaaataagaaaaatagagagctatatgaaaaaacattatctagttgtttatgcggtgctaccaaaggatgtttaacattcttttttggagaaactgcaactggaaagtcgacaaccaaacgtttgttaaagtctgctatcggtgacctgtttgttgagacgggtcaaacaattttaacagatgtattggataaaggacctaatccatttatcgctaacatgcatttgaaaagatctgtattctgtagcgaactacctgattttgcatgtagtgggtcaaagaaaatcagatctgataatattaaaaagttgacagaaccttgtgtcattggaagaccgtgtttctccaataaaattaataatagaaaccatgcgacaatcattatcgatactaattacaaacctgtttttgataggatagataacgcattaatgagaagaattgccgtcgtgcgattcagaacacacttttctcaaccttctggtagagaggctgctgaaaataatgacgcgtacgataaagtcaaactattagacgaggggttagatggtaaaatacaaaataatagatatagattcgcatttctatacttgttggtgaaatggtacagaaaatatcatgttcctattatgaaactatatcctacacccgaagagattcctgactttgcattctatctcaaaataggtactctgttggtatctagctctgtaaagcatattccattaatgacggacctctccaaaaagggatatatattgtacgataatgtggtcactcttccgttgactactttccaacagaaaatatccaagtattttaattctagactatttggacacgatatagagagcttcatcaatagacataagaaatttgccaatgttagtgatgaatatctgcaatatatattcatagaggatatttcatctccgtaaatatatgctcatatatttatagaagatatcacatatctaaatgaataccggaattatagatttatttgataatcatgttgatagtataccaactatattacctcatcagttagctactctagattatctagttagaactatcatagatgagaacagaagcgtgttattgttccatattatgggatcaggtaaaacaataatcgctttgttgttcgccttggtagcttccagatttaaaaaggtttacattctagtgccgaacatcaacatcttaaaaattttcaattataatatgggtgtagctatgaacttgtttaatgacgaattcatagctgagaatatctttattcattccacaacaagtttttattctcttaattataacgataacgtcattaattataacggattatctcgctacaataactctatttttatcgttgatgaggcacataatatctttgggaataatactggagaacttatgaccgtgataaaaaataaaaacaagattccttttctactattgtctggatctcccattactaacacacctaatactctgggtcatattatagatttaatgtccgaagagacgatagattttggtgaaattattagtcgtggtaagaaagtaattcagacacttcttaacgaacgcggtgtgaatgtacttaaggatttgcttaaaggaagaatatcatattacgaaatgcctgataaagatctaccaacgataagatatcacggacgtaagtttctagatactagagtagtatattgtcacatgtctaaacttcaagagagagattatatgattactagacgacagctatgttatcatgaaatgtttgataaaaatatgtataacgtgtcaatggcagtattgggacaacttaatctgatgaataatttagatactttatttcaggaacaggataaggaattgtacccaaatctgaaaataaataatggcgtgttatacggagaagaattggtaacgttaaacattagttccaaatttaaatactttattaatcggatacagacactcaacggaaaacattttatatacttttctaattctacatatggcggattggtaattaaatatatcatgctcagtaatggatattctgaatataatggttctcagggaactaatccacatatgataaacggcaaaccaaaaacatttgctatcgttactagtaaaatgaaatcgtctttagaggatctattagatgtgtataattctcctgaaaacgatgatggtagtcaattgatgtttttgttttcatcaaacattatgtccgaatcctatactctaaaagaggtaaggcatatttggtttatgactatcccagatactttttctcaatacaaccaaattcttggacgatctattagaaaattctcttacgccgatatttctgaaccagttaatgtatatcttttagccgccgtatattccgatttcaatgacgaagtgacgtcattaaacgattacacacaggatgaattaattaatgttttaccatttgacatcaaaaagctgttatatctaaaatttaagacgaaagaaacgaatagaatatactctattcttcaagagatgtctgaaacgtattctcttccaccacatccatcaattgtaaaagttttattgggagaattggtcagacaatttttttataataattctcgtattaagtataacgataccaagttacttaaaatggttacatcagttataaaaaataaagaagacgctaggaattacatagatgatattgtaaacggtcacttctttgtatcgaataaagtatttgataaatctcttttatacaaatacgaaaacgatattattacagtaccgtttagactttcctacgaaccatttgtttggggagttaactttcgtaaagaatataacgtggtatcttctccataaaactgatgagatatataaagaaataaatgtcgagctttgttaccaatggataccttccagttacattggagccacacgagctgacgttagacataaaaactaatattaggaatgccgtatataagacgtatctccatagagaaattagtggtaaaatggccaagaaaatagaaattcgtgaagacgtggaattacctctcggcgaaatagttaataattctgtagttataaacgttccgtgtgtaataacctacgcgtattatcacgttggggatatagttagaggaacattaaacatcgaagatgaatcaaatgtaactattcaatgtggagatttaatctgtaaactaagtagagattcgggtactgtatcatttagcgattcaaagtactgcttttttcgaaatggtaatgcgtatgacaatggcagcgaagtcactgccgttctaatggaggctcaacaaggtatcgaatctagttttgtttttctcgcgaatatcgtcgactcataagaaagagaatagcggtaagtataaacacgaatactatggcaataattgcgaatgttttattcccttcgatatatttttgataatatgaaaaacatgtctctctcaaatcggacaaccatctcataaaatagttatctcgcgctggcgaggtggttgccgctcgtataatctccccagaataatatacttgcgtgtcgtcgttcaatttatacggatttctatagttctctgttatataatgcggttttccatcatgattagacgacgacaatagtgttctaaatttagatagttgatcagaatgaatgtttattggcgttggaaaaattatccatgctgcgtctgcagagtggttgatagttgttcctagatatgtaaaataatccaacgtactaggtagcaaattgtctagataaaatactgaatcaaacggcgcagacgtattagcggatctaatggaatccaattgattgactatcttttgaaaatatacatttttatgatccgatacttgtaagaatatagaaataatgataagtccatcatcgtgtttttttgcctcttcataagaactatattttttcttattccaatgaacaagattaatctctccagagtatttgtacacatctatcaagtgattggatccataatcgtcttcctttccccaatatatatgtagtgatgataacacatattcattggggagaaaccctccacttatatatcctcctttaaaattaatccttactagttttccagtgttctggatagtggttggtttcgactcattataatgtatgtctaacggcttcaatcgcgcgttagaaattgcttttttagtttctatattaataggagatagttgttgcggcatagtaaaaatgaaatgataactgtttaaaaatagctcttagtatgggaattacaatggatgaggaagtgatatttgaaactcctagagaattaatatctattaaacgaataaaagatattccaagatcaaaagacacgcatgtgtttgctgcgtgtataacaagtgacggatatccgttaataggagctagaagaacttcattcgcgttccaggcgatattatctcaacaaaattcagattctatctttagagtatccactaaactattacggtttatgtactacaatgaactaagagaaatctttagacggttgagaaaaggttctatcaacaatatcgatcctcactttgaagagttaatattattgggtggtaaactagataaaaaggaatctattaaagattgtttaagaagagaattaaaagaggaaagtgatgaacgtataacagtaaaagaatttggaaatgtaattctaaaacttacaacacgggataaattatttaataaagtatatataggttattgcatggcgtgttttattaatcaatcgttggaggatttatcgcatactagtatttacaatgtagaaattagaaagattaaatcattaaatgattgtattaacgacgataaatacgaatatctgtcttatatttataatatgctagttaatagtaaatgaacttttacagatctagtataattagtcagattattaagtataatagacgactagctaagtctattatttgcaaggatgactctcaaattattacactcacggcattcgttaaccaatgcctatggtgtcataaacgagtatccgtgtccgctattttattaactactgataacaaaatattagtatgtaacagacgagatagttttctctattctgaaataattagaactagaaacatgtttagaaagaaacgattatttctgaattattccaattatttgtccaaacaggaaagaagtatactatcgtcatttttttctctatatccagctactgctgataatgatagaatagacgctatttatccgggtggcatacccaaaaggggtgagaatgttccagagtgtctatccagggaaatcaaagaagaagttaatatagacaattcttttgtattcatagacactcggttttttattcatggtatcatagaagataccattatcaacaaattttttgaggtaattttctttgtcggaagaatatctctaacgagtgatcaaattattgatacctttaaaagtaatcatgaaatcaaggatctaatatttttagatccgaattcaggtaatggactccaatacgaaattgcaaaatatgctctagatactgcaaaacttaaatgttacggccatagaggatgttattatgaatcattaaaaaaattaactgaggatgattgattagaaaatataaattaatttaccatcgtgtatttttataacgggattgtccggcatatcatgtagatagttaccgtctacatcgtatactcgaccatctacgcctttaaatcctctatttattgacattaatctattagaattggaataccaaatattagtaccctcaattagtttattggtaatattttttttagacgatagatcgatggctcttgaaaccaaggttttccaaccggactcattgtcgatcggtgagaagtctttttcattagcatgaatccattctaatgatgtatgtttaaacactctaaacaattggacaaattcttttgatttgctttgaatgatttcaaataggtcttcgtctacagtaggcataccattagataatctagccattataaagtgcacgtttacatatctacgttctggaggagtaagaacgtgactattgagacgaatggctcttcctactatctgacgaagagacgcctcgttccatgtcatatctaaaatgaagatatcattaattgagaaaaaactaataccctcgcctccactagaagagaatacgcatgttttaatgcattctccgttagtgtttgattcttggttaaactcagccaccgccttgattctagtatcttttgttctagatgagaactctatattagagataccaaagactttgaaatatagtaataagatttctattcctgactgattaacaaatggttcaaagactagacatttaccatgggatgctaatattcccaaacatacatctataaatttgacgcttttctcttttaattcagtaaatagagagatatcagccgcactagcatcccctttcaatagttctccctttttaaaggtatttaatgcggatttagaaaactctctatctcttaatgaatttttaaaatcattatatagtgttgctatctcttgcgcgtattcgccgggatcacgattttgtctttcaggaaagctatcgaacgtaaacgtagtagccatacgtctcagaattctaaatgatgatataccagtttttatttctgcgagtttagccttttgataaatctcttcttgcttttttgacatattaacgtatcgcattaatactgttttcttagcgaatgatgcagacccttctacgttatcaaaaatagaaaactcgttattaactatgtacgaacataggcctcctagtttggagactaattctttttcatcgactagacgtttattctcaaatagtgattggtgttgtaaggatcctggtcgtagtaagttaaccaacatggtgaattcttgcacactattgacgataggtgtagccgataaacaaatcatcttatggttttttaatgcgatggtcttggataaaaaattatatactgaacgagtaggacggatcttaccatcttctttgattaatgatttagaaatgaagttatgacattcatcaataatgacgcatattctactcttggaattaatagttttgatattagtaaaaaatttatttctaaaattttgatcatcgtaattaataaaaatacaatccttcgttatctctggagcgtatctgagtatagtgttcatccaaggatcttctatcaaagcctttttcaccaataagataatagcccaattcgtataaatatccttaagatgtttgagaatatatacagtagtcattgttttaccgacacccgtttcatggaacaataaaagagaatgcatactgtctaatcctaagaaaactcttgctacaaaatgttgataatccttgaggcgtactacgtccgaccccatcatttcaacgggcatattagtagttctgcgtaaggcataatcgatataggccgcgtgtgatttactcatttatgagtgataagtaataactatgttttaaaaatcacagcagtagtttaactagtcttctctgatgtttgttttcgatactttttgaatcagaagtcatactagaataaagcaacgagtgaacgtaatagagagcttcgtatactctattcgaaaactctaagaacttattaatgaattccgtatccactggattgtttaaaatactaaattgaacactgttcacatccttccaagaagaagacttagtgacggacttaacatgagacataaataaatccaaattttttttacaaacatcactagccaccataatggcgctatctttcaaccagctatcgcttacgcattttagcagtctaacatttttaaagagactacaatatattctcatagtatcgattacacctctaccgaataaagttggaagtttaataatacaatatttttcgtttacaaaatcaaataatggtcgaaacacgtcgaaggttaacatcttataatcgctaatgtatagattgttttcagtgagatgattattagatttaatagcatctcgttcacgtttgaacagtttattgcgtgcgctgaggtcggcaactacggcgtccgctttagtactcctcccataatactttacgctattaatctttaaaatttcatagactttatctagatcgctttctggtaacatgatatcatgtgtaaaaagttttaacatgtcggtcggcattctatttagatcattaactctagaaatctgaagaaagtaattagctccgtattccagactaggtaatgggcttttacctagagacagattaagttctggcaatgtttcataaaatggaagaaggacatgcgttccctcccggatattttttacaatttcatccatttacaactctatagtttgttttcattattattagttattatctcccataatcttggtaatacttaccccttgatcgtaagataccttatacaggtcattacatacaactaccaattgtttttgtacataatagattggatggttgacatccatggtggaataaactactcgaacagatagtttatctttccccctagatacattggccgtaatagttgtcggcctaaagaatatctttggtgtaaagttaaaagttagggttcttgttccattattgctttttgtcagtagttcattataaattctcgagatgggtccgttctctgaatatagaacatcatttccaaatctaacttctagtctagaaataatatcggtcttattcttaaaatctattcccttgatgaagggatcgttaatgaacaaatccttggcctttgattcggctgatctattatctccgttatagacgttacgttgactagtccaaagacttacaggaatagatgtatcgatgatgttgatactatgtgatatgtgagcaaagattgttctcttagtggcatcactatatgttccagtaatggcggaaaactttttagaaatgttatatataaaagaattttttcgtgttccaaacattagcagattagtatgaagataaacactcatattatcaggaacattatcaatttttacatacacatcagcatcttgaatagaaacgataccatcttctggaacctcaacaatctcggcagactccggataaccagtcggtggaccatcgctaacaataactagatcatccaacaatctactcacatatgcatctatataatctttttcatcttgtgagtaccctggatacgaaataaatttattatccgtatttccataataaggtttagtataaacagagagcgatgttgccgcatgaacttcagttacagtcgccgttggttggtttatttgacctattactctcctaggtttctctataaacgatggtttaatttgtacattcttaaccatatatccaataaagctcaattcaggaacataaacaaattctttgttgaacgtttcaaagtcgaacgaagagtcacgaataacgatatcggatactggattgaaggttaccgttacggtaatttttgaatcggatagtttaagactgctgaatgtatcttccacatcaaacggagttttaatataaacgtatactgtagatggttctttaatagtgtcattaggagttaggccaatagaaatatcattaagttcactagaatatccagagtgtttcaaagcaattgtattattgatacaattattatataattcttcgccctcaatttcccaaataacaccgttacacgaagagatagatacgtgattaatacatttatatccaacatatggtacgtaaccgaatcttcccatacctttaacttctggaagttccaaactcagaaccaaatgattaagcgcagtaatatactgatccctaatttcgaagctagcgatagcctgattgtctggaccatcgtttgtcataactccggatagagaaatatattgcggcatatataaagttggaatttgactatcgactgcgaagacattagaccgtttaatagagtcatccccaccgatcaaagaattaatgatagtattattcattttctatttaaaatggaaaaagcttacaataaactccgtagagaaatatctataatttgtgagttttccttaaagtaacagcttccgtaaacgccgtctttatctcttagtaagtttattgtatttataaccttttccttatcttcatagaatactaaaggcaacaaagaaatttttggttcttctctaagagctacgtgagacttaaccatagaagccaacgaatccctacatattttagaacagaaataccctacttcaccacccttgtatgtctcaatactaataggtctaaaaaccaaatcttgattacaaaaccaacacttatcaattacactatttgtcttaatagacacatctgccatagatttataatactttggtagtatacaagcgagtgcttcttctttagcgggcttaaagactgctttaggtgctgaaataaccacatctggaaggcttactcgcttagccatttaattacggaactatttttttatacttctaatgagcaagtagaaaacctctcatctacaaaaacatactcgtgtccataatcctctaccatagttacacgttttttagatctcatatgtgctaaaaagttttcccatactaattggttactattatttttcgtataatttttaacagtttgaggttttagatttttagttacagaagtgatatcgaatattttatccaaaaagaatgaataattaattgtcttagaaggagtgttttcttggcaaaagaataccaagtgcttaaatatttctactacttcattaatcttttctgtactcagattcagtttctcatcttttacttgattgattatttcaaagactaacttataatcctttttatttattctctcgttagccttaagaaaactagatacaaaatttgcatctacatcatccgtggatatttgatttttttccatgatatccaagagttccgagataatttctccagaacattgatgagacaataatctccgcaatacatttctcaaatgaataagtttattagacacgtggaagtttgactttttttgtacctttgtacatttttgaaataccgactcgcaaaaaatacaatattcatatccttgttcagatactataccgttgtgtctacaaccgctacataatcgtagattcatgttaacactctacgtatctcgtcgtccaatattttatataaaaacattttatttctagacgttgccagaaaatcctgtaatacttttagttttttgggctgtgaataaagtatcgccctaatatggttaccgtcctccgccaatatagtagttaaattatccgcacatgcaaaagaacaccgcttaggcggattcagtacaatgttatatttttcgtaccaactcatttaaatatcataatctaaaatagttctgtaatatgtctagcgctaatatattgatcataatcctgtgcataaattaagatacaacaatgtctcgaaatcatcgacatggcttcttccatagttagaagatcgtcgtcaaagttagcaacgtgattcatcaacatttgctgttttgaggcagcaaatactgaaccgtcgccattcaaccattcataaaaaccatcgtctgaatccattgataatttcttgtactggtttttgagagctcgcatcaatctagcatttctagctcccggattgaaaacagaaagaggatcgtacatccagggtccattttctgtaaatagaatcgtataatgtcccttcaagaagatatcagacgatccacaatcaaagaattggtctccgagtttgtaacaaactgcggactttaacctatacatgataccgtttagcataatttctggtgatacgtcaatcggagtatcatctattagagatctaaagccggtgtaacattctccaccaaacatattcttattctgacgtcgttctacataaaacatcattgctccattaacgataacaggggaatgaacagcactacccatcacattagttcccaatggatcaatgtgtgtaactccagaacatcttccatagcctatgttaggaggagcgaacaccactcttccactattgccatcgaatgccatagaataaatatccttggaattgatagaaatcggactgtcggatgttgtgatcatcttcataggattaacaacgatgtatggtgccgcctgaagtttcatatcgtaactgatgccgttcataggtctagccacagaaaccaacgtaggtctaaatccaactatagacaaaatagaagccaatatctgttcctcatctgtcataacttgagagcatccagtatgaataatcttcattagatggggatctaccgcatcatcatcgttacaataaaaaattcccattctaatgttcataattgcttttctaatcatggtatgcatgtttgctctctgaatctctgtggaaattagatctgatacacctgtaatcactatcggattatcctccgtaagacgattaaccaacaacatataattataagactttacttttctaaattcataaagttgctggattaggctataggtgtctccatgtacatacgcgttctcgagcgcaggaagtttaataccgaatagtgccatcagaataggatgaatatagtaattagtttctggttttctataaataaaagacaaatcttgtgaactagacatatcggtaaaatgcatggattggaatcgtgtagtcgacagaagaatatgatgattagatggagagtatattttatctaactctttgagttggtcaccgattctaggactagctcgagaatgaataagtactaaaggatgagtacatttcacagaaacactagcattgttcaatgtgctctttacatgggtaaggagttgaaatagctcgtttctatttgttctgacaatatttagtttattcataatgttaagcatatcctgaatagtaaagttagatgtgtcatacttgttagtagttagatatttagcaattgcattcccatcatttctcaatctcgtactccaatcatgcgtggatgctacttcgtcgatggaaaccatacaatcctttttgataggctgttgagattgattatttcctgcacgtttaggtttggtacgttgatttctagcccctgcggatataaagtcatcgtctacaatttgggacaatgaattgcatacactacaagacaaagatttatcagaagtgtgaatatgatcttcatctaccaaagaaagagtttgattagtataactagattttagtcctgcgttagatgttaaaaaaacatcgctattgaccacggcttccattatttatattcgtagtttttactcgaaagcgtgattttaatatccaatcttattacttttggaatcgttcaaaacctttgactagttgtagaatttgatctattgccctacgcgtatactcccttgcatcatatacgttcgtcaccagatcgtttgtttcggcctgaagttggtgcatatctttttcaacactcgacatgagatccttaagggccatatcgtctagattttgttgagatgctgctcctggatttggattttgttgtgctgttgtacatactgtaccaccagtaggtgtaggagtacatacagtggccacaataggaggttgaggaggtgtaaccgttggagtagtacaagaaatatttccatccgattgttgtgtacatgtagttgttggtaacgtctgagaaggttgggtagatggcggtgtcgtcgtcttttgatctttattaaatttagagataatatcctgaacagcattgctcggcgtcaacgctggaaggagtgaactcgccggcgcatcagtatctgcagacagccaatcaaaaagattagacatatcagatgatgtattagtttgttgtcgtggttttggtgtaggagcagtactactaggtagaagaataggagccgatgtaggtgtcggaaccggctgtggagttatatgaatagttggttgtagcggttggataggctgtctgctggcggccatcatattatctctagctagttgttctcgcaactgtctttgataatacgactcttgagactttagtcctatttcaatcgcttcatcctttttcgtatccggatccttttcttcagaataatagattgacgactttggtgtagaggattctgccagcccctgtgagaacttgttaaagaagtccatttaaggctttaaaattgaattgcgattataagattaaatggcagacacagacgatattatcgactatgaatccgatgatctcactgaatacgaggatgatgaagaagaggaagaagatggagagtcactagaaactagtgatatagatcccaaatcttcttataagattgtagaatcagcatccactcatatagaagatgcgcattccaatcttaaacatatagggaatcatatatctgctcttaaacgacgctatactagacgtataagtctatttgaaatagcgggtataatagcagaaagctataacttgcttcaacgaggaagattacctctagtttcagaattttctgacgaaacgatgaagcaaaatatgctacatgtaattatacaagagatagaggagggttcttgtcctatagtcatcgaaaagaacggagaattgttgtcggtaaacgattttgacaaagatggtctaaaattccatctagactatattatcaaaatttggaaacttcaaaaacgatattagaatttatacgaatatcgttctctaaatgtcacaatcaagtctcgcatgttcagcaatttattgtcgtactttatatcgtgttcattaacgatatcttgcaaaatagtaatgattctatcttccttcgatagatattcttcagagattattgtcttatattctttcttgttatcagatatgaatttgataagactttgaacattattgatacccgtctgtttaattttttctacagatattttagttttggcagattctatcgtatctgtcaatagacatccaacatcgacattcgacgtcaattgtctataaatcaacgtataaattttagaaataacattagcgaattgttgtgcattgatgtcgttattctgaaacagtatgattttaggtagcattttcttaacaaagagaacgtatttattgttactcagttgaacagatgatatatccagattactaacgcatctgattccgtataccaaactttcagaagaaatggtatacaattgtttgtattcattcaatgtctctttttcagaaattagtttagagtcgaatactgcaataattttcaagagatagttttcatcagataagattttatttagtgtagatatgataaaactattgttttgttggagaacttgatacgccgcgttctctgtagtcgacgctctcaaatgggaaacgatctccattatttttttggaatcggatactatatcttcggtatcttgacgcagtctagtatacatagagttaagagagattagagtttgtacattaagcaacatgtctctaaatgtggctacaaacttttccttttccacatcatctagtttattatataccgatttcacaacggcaccagatttaaggaaccagaatgaaaaactctgataactacaatatttcatcatagttacgattttatcatcttctatagttggtgtaatagcgcatacctttttctccaagactggaaccaacgtcataaaaatgtttaaatcaaaatccatatcaacatctgatgcgctaagaccagtctcgcgttcaagattatctttactaatggtgacgaactcatcgtatagaactctaagtttgtccattatttatttacagatttagttgtttaatttatttgtgctcttccagagttgggatagtatttttctaacgtcggtattatattattaggatctacgttcatatgtatcataatattaatcatccacgttttgataaatctatctttagcttctgaaataacgtatttaaacaaaggagaaaaatatttagctacggcatcagacgcaataacattttttgtaaatgtaacgtatttagacgacagatcttcgttaaaaagttttccatctatgtagaatccatcagttgttaacaccattcccgcgtcagattgaataggagtttgaatagtttgttttggaaatagatccttcaataacttatagttgggtgggaaaaaatcgattttatcactagactctttcttttttactatcattacctcatgaactatttcttgaatgagtatatgtattttctttcctatatcggacgcgttcattggaaaatataccatgtcgttaactataagaatatttttatcctcgtttacaaactgaataatatcagatgtagttcgtaaacgaactatatcatcaccagcacaacatctaactatatgatatccactagtttcctttagtcgtttattatcttgttccatattagcagtcattccatcatttaagaaggcgtcaaagataatagggagaaatgacattttggattctgttacaactttaccaaaattaaggatatacggacttactatctttttctcaacgtcaatttgatgaacacacgatgaaaatgtacttcgatgagattgatcatgtagaaaacaacaagggatacaatatttccgcatatcatgaaatatattaagaaatcccaccttattatatttccccaaaggatccatgcacgtaaacattatgccgttatcattaataaagacttctttctcatcggatctgtaaaagttgttactgatttttttcattccaggatctagataattaataatgatgggttttctattcttattctttgtattttggcatatcctagaccagtaaacagtttccactttggtaaaatcagcagacttttgaacgctattaaacatggcattaatggcaataactaaaaatgtaaaatatttttctatgttaggaatatggtttttcactttaatagatatatggtttttggccaaaatgatagatatttttttatccgaggatagtaaaatattattagtcgccgtctctataaaaatgaagctagtctcgatatccaattttattctagaattgataggagtcgccaaatgtaccttatacgttatatctcccttgatgcgttccatttgtgtatctatatcggacacaagatctgtaaatagttttacgttattaatcatcacggtatcgccgtcgctagataatgctaatgtaccatccaagtcccaaatggagagatttaactgttcatcgtttagaataaaatgattaccggtcatattaataaagtgttcatcgtatctagataacaacgacttataattaatgtccaagtcttgaactcgctgaatgatcttttttaacccagttagttttagattggtacgaaatatattgttaaactttgattctacagtaatgtccaaatctagttgtggaaatacttccatcaacattgtttcaaacttgataatattattatctacatcttcatacgatccaaattccggaatagatgtatcacatgctcttgccacccagataaccaaaaagtcacacgctccaggatatacattgtataaaaagctatcgtttttaagtagggtttttttctgcgtgtatacgaagggattaaaaatagtattatcaacgtaactatattccaaattattcttatgagaatagataataatatcgtccttaatatctaacaaatttcctaaatatccctttaattgagtcattcgaagcgtcaatagaatatgtctcttaactatttccggctgttgtatatttaaatgacttcgtaaaaaataatatatgggcgacttctcatctatgtaatcatatggagtgagatatagggctcgttctacctcctgccccttacccacctgtaataccaattgcggacttactatatatcgcatatttatatcgtggggtaaagtgaaaatctactaccgatgatgtaagtcttacaatgttcgaaccagtaccagatcttaatttggaggcctccgtagaactaggggaggtaaatatagatcaaacaacacctatgataaaggaaaatagcggttttatatcccgtagtagacgtctattcgcccatagatctaaggatgatgagagaaaactagcactacgattctttttacaaagactttattttttagatcatagagagattcattatttgttcagatgcgttgacgctgtaaaagacgtcactattaccaaaaaaaataacattatcgtggcgccttatatagcacttttaactatcgcatcaaaaggatgcaaacttacagaaacaatgattgaagcattctttccagaactatataatgaacatagtaagaaatttaaattcaactctcaagtatccatcatccaagaaaaactcggataccagtttggaaactatcacgtttatgattttgaaccgtattactctacagtagctctggctattcgagatgaacattcatctggcatttttaatatccgtcaagagagttatctggtaagttcattatctgaaataacatatagattttatctaattaatctaaaatctgatcttgttcaatggagtgctagtacgggcgctgtaattaatcaaatggtaaatactgtattgattacagtgtatgaaaagttacaactggtcatagaaaatgattcacaatttacatgttcattggctgtggaatcagaacttccaataaaattacttaaagatagaaatgaattatttacaaaattcatcaacgagttaaaaaagaccagttcattcaagataagcaaacgcgataaggatacgctactaaaatattttacttaggactggagttagaatttatagacgactcatttcgtttatcattattactaccatcattattagtattcttcttgttatcttgttcagaaatatacagcaatgctatgcctaatactaaatacattatcatgcttgcaatggctctaacaacgacgaaccaaaatgaatttggtcgtagcttttgttcacaaaaatacataaagaaatgtctacataaatctatggcgccattggctacttgaaatagcgccagtcctcctacagattttaatatagctgtataacatgacatttattcatcatcaaaagagacagagtcaccatctgtcatatttagattttttttcatgtgttcaaagtatcctctactcatttcattataatagtttatcatacttagaattttaggacggatcaatgagtaagacttgactagatcgtcagtagtaatttgtgcatcgtctattctgcatccgcttcgtcgaataatgtatagcatcgctttgagattctccatagctatcaagtctttatacaatgacatggaaatatctgtgaatactttatacttctccaacatcgatgccttaacatcatcgcctactttagcattgaaaatacgttctattgtgtagatggatgtagcaagatttttaaacaacaatgccatcttacacgatgattgcctcaagtctccaatcgtttgtttagaacgattagctacagagttcaacgcttggctgactagcatattattatctttagaaattgtattcttcaatgaagcgtttatcatatctgtgatttcgttagtcatattacagtctgactgggttgtaatgttatccaacatatcacctatggatacggtacacgtaccagcatttgtaataatcctatctaagatgttgtatggcattgcgcagaaaatatcttctcctgtaatatctccactctcgataaatctactcagattattcttaaatgccttattctctggagaaaagatatcagtgtccatcatttcattaatagtatacgcagaaaagataccacgagtatcaattctatccaagatacttatcggttccgagtcacagataatggtttcctctccttcgggagatcctgcatagaaatatctaggacaatagtttctatactgtctgtaactctgataatctctaaagtcactaactgataccatgaaattgagaagatcaaacgctgaagtaatcaatttttctgcctcgtttttactacaactagttttcatcaatgtagtgacgatgtattgtttagttactcttggtctaatactgatgatagagatattattacttcccataatggatcttctagtagtcaccttaaagcccattgatgcaaatagcagatagataaagtcttggtatgactcctttctaatatagtacggactacctttgtcacccaactttatacccacataagccataacaacctctttaatagccgtttcatgaggtttatcagccatgagcctgagtagttggaagaatctcatgaatcccgtctcagaaagtcctatatgcatgatagatttatctttcctgggaaactctcgtatagtcatagatgaaatactcttcaaagtttctgaaataagattagtaacagtcttacctccgactactctgggtaacaaacatactctaataggtgttttctctgcggagataatatcagaaaggatagagcaataagtagtattattgtgattataaagaccgaatacataacaggtagaatttataaacatcatgtcctgaaggtttttagacttgtattcctcgtaatccataccgtcccaaaacatggatttggtaactttgatagccgtagatctttgttccttcgccaacaggttaaagaaattaataaagaatttgttgtttctatttatgtccacaaattgcacgtttggaagcgtaactgttacgttcactgcagcattttgaggatcgcgagtatgaagtacgatgttattgtttactggtatatctggaaagaaatctaccagtctaggaataagagattgatatcgcatagaaatagtaaagtttataatctcatcatcgaagagcattttgttaccattgtaataaatatccactctgtcatatgtataaatgaagtactgttcaaacatgatgagatgtttatatgttggcatagtagtgagatcgacgtttggtaatggcaatgtattaagattaactccataatgtctagcagcatctgcgatgttataagtgtcgtcaaagcggggtcgatcttgtgctgttatatattgtctaacacctataagattatcaaaatcttgtctgcttaatacaccgttaacaatttttgccttgaattcttttattggtgcattaataacatccttatagaggatgttaaacaaataagtgttatcaaagttaagatctggatatttcttttctgctagaacatccattgagtcggagccatctggtttaatataaccaccgataaatctagctctgtattctgtatccgtcaatctaatattaagaaggtgttgagtgaaaggtggaagatcgtaaaagctgtgagtattaatgataggattagtttccgaactaatgttaattggggtattaataatatctatatttccagcgttaagtgtaacattaaacagttttaattcacgtgacgtggtatcaattaaataattaatgcccaatttggatatagcagcctgaagctcatcttgtttagttacggatcctaatgagttattaagcaatatatcgaacggatgaacgaaggttgttttaagttggtcacatactttgtaatctagacatagatgcggaagaacggtagaaactatacgaaataaatattcagagtcctctaattgatcaagagtaactattgacttaataggcatcatttatttagtattaaatgacgaccgtaccagtgacggatatacaaaacgatttaattacagagttttcagaagataattatccatctaacaaaaattatgaaataactcttcgtcaaatgtctattctaactcacgttaacaacgtggtagatagagaacataatgccgccgtagtgtcatctccagaggaaatatcctcacaacttaatgaagatctatttccagatgatgattcaccggccactattatcgaacgagtacaacctcatactactattattgacgatactccacctcctacttttcgtagagagttattaatatcggaacaacgtcaacaacgagaaaaaagatttaatattacagtatcgaaaaatgctgaagcaataatggaatctagatctatgataacttctatgccaacacaaacaccatccttgggagtagtttatgataaagataaaagaattcagatgttagaggatgaagtggttaatcttagaaatcaacgatctaatacaaaatcatctgataatttagataattttaccaaaatactatttggtaagactccgtataaatcaacagaagttaataagcgtatagccatcgttaattatgcaaatttgaacgggtcccccttatcagttgaggacttggatgtttgttcggaggatgaaatagatagaatctataaaacgattaaacaatatcacgaaagtagaaaacgaaaaattatcgtcactaacgtgattattattgtcataaacattatcgagcaggcattgctaaaactcggatttgaagaaatcaaaggactgagtaccgatatcacttcagaaattatcgatgtggagatcggagatgactgcgatgctgtagcatctaaactaggaatcggtaacagtccggttcttaatattgtattgtttatactcaagatattcgttaaacgaattaaaattatttaatttaatacattcccatatccagacaacaatcgtctggattaatctgttcctgtcgtctcataccggacgacatattaatctttttattagtaggcatctttttagatggtttctttttcccagcattaactgagtcgatacctagaagatcgtgattgatctctccgaccattccacgaacttctaattggccgtctctgacggtaccataaactattttaccagcattagtaacagcttggacaatctgaccatccattgcgttgaatgatgtagttgctgttgttctacgtttaggagcaccagaagtatttttggagcccttggaggctgatgtagaagaagacgaggattttgatttacatgtaatacattttgtactctttgattttgtatcacatgcgccggcagtcacatttgtttgagaattaagattattgttgcctcctttgacggctgcatctccaccgatttgcgctagtagatttttaagctgtggtgtaatcttattaactgtttcgatataatcatcgtaactgcttctaacggctaaattttttttatccgccatttagaagctaaaaatatttttatttatgcagaagatttaactagattatacaatgaactaatatgatccttttccagattatttacaaacttggtattttttggttctggaggaggcgaatttaaattcggacttggattcggattttgtgagttcttgatcttattatacatcgagtataggatggcgacggtaactgctacgcaaataccgatcaacaaaagaataccaatcatttattgacaataacttcactattgatcaagtatgcaatatatcatcttttcactaaataagtagtaataatgattcaacaatgtcgagatatatggacgataataatttagttcatggaaatatcgctatgattggtatgaatgactccgctaactctgtggggtgcgcagtgctttccccacatagaataaattagcattccgactgtgataataataccaagtataaacgccataatactcaatactttccatgtacgagtgggactggtagacttactaaagtcaataaaggcgaagatacacgaaagaatcaaaagaatgattccagcgattagcacgccggaaaaataatttccaatcataagcatcatgtccatttaactaataaaaattttaaatcgccgaatgaacaaagtggaatataaaccatataaaaacaatagtttgtactgcaaaaataatatctatttttgttttcgaagatatggtaaaattaaatagtagtacacagcatgttataactaacagcagcaacggctcgtaattacttatcatttactagacgaaaaggtggtgggatattttcttgctcaaataatacgaatatatcacccatccattttatgcgatgtttatatactctaatctttaatagatctatagacgacgggtttaccaacaatatagattttatcgattcatctaatttaaacccttccttaaacgtgaatgatctattatctggcataacgatgactctacctgatgaatcggacaatgtactgggccatgtagaataaattatcaacgaattatcgtctacgaacatttatatcatttgttttaattttaggacgcgaataaatggatataaaatagaaaataacagatattacaaccaatgttatggccgcgcccaaccaggtaggcagttttattttatcttttactacaggttctcctggatgtacgtcaccaacggcggacgtagttctagtacaattagacgtaagttctgcttgggaattttttaacgctaaagagttaacgttaatcgtgcacccaacgtatttacatctagttctttgaacatcttgattataatataaccattttctatctctagattcgtcggtgcactcatgtaaccaacataccctaggtcctaaatatttatctccggaattagattttggataattcgcgcaccaacaatttctatttcctttatgatcgttacaaaagacgtataatgccgtatccccaaaagtaaaataatcaggacgaataattctaataaactcagaacaatatctcgcatccatatgtttggagcaaatatcggaataagtagacatagccggtttccgttttgcacgtaaccattctaaacaattggggtttccaggatcgtttctacaaaatccagtcatgaaatcatcacaatgttctgtcttgtaattattattaaatatttttggacagtgtttggtatttgtcttagaacaacattttgccacgctatcactatcgcccaggagataatccttttttataaaatgacatcgttgcccggatgctatataatcagtggcgtgttttaaatccttaatatattcaggagttacctcgttctgataatagattaatgatccaggacgaaatttgaaagaactacatggttctccatgaattaatacatattgtttagcaaattcaggaactataaaactactacaatgatctatcgacataccatctatcaaacaaaacttgggtttaatttctcccggagatgtttcataatagtacgtataactttcttctgcaaacttaacagctctattatattcaggataattaaaacctaattccatatatttgtctcgtatatctgctattcctggtgctattttaattctattaagagtaacggctgcccccattcttaataatcgtcagtatttaaactgttaaatgttggtatatcaacatctaccttatttcccgcagtataaggtttgttgcaggtatactgttcaggaatggttacatttatacttcttctatagtcctgtctttcgatgttcatcacatatgcaaagaacagaataaacaaaataatgtaagaaataatattaaatatctgtgaattcgtaaatacattgattgccataataattacagcagctacaatacatacaatagacattcccacagtgttgccattacctccacgatacatttgagttactaagcaataggtaataactaagctagtaagaggcaatagaaaagatgagataaatatcatcaatatagagattagaggagggctatatagagccaagacgaacaaaatcaaaccgagtaacgttctaacatcattatttttgaagattcccaaataatcattcattcctccataatcgttttgcattatacctccatctttaggcataaacgattgctgctgttcctctgtaaataaatctttatcaagcactccagcacccgcagagaagtcgtcaagcatattgtaatatcttaaataactcatttatatattaaaaaatgtcactattaaagatggagtataatctttatgccgaactaaaaaaaatgacttgtggtcaacccctaagtctttttaacgaagacggggatttcgtagaagttgaaccgggatcatcctttaagtttctgatacctaagggattttacgcctctccttccgtaaagacgagtctagtattcgagacattaacaacgaccgataataaaatcactagtatcaatccaacaaatgcgccaaagttatatcctcttcaacgcaaagtcgtatctgaagtagtttctaatatgaggaaaatgatcgaatcaaaacgtcctctatacattactcttcacttggcgtgtggatttggtaagactattaccacgtgttatcttatggctacacacggtagaaaaaccgtcatttgcgtacccaataaaatgttaatacatcaatggaagacacaggtagaggcagtcggattggaacataagatatctatagatggagtaagtagtctattaaaggaactaaagactcaaagtccggatgtattaatagtagtcagtagacatctgacaaacgatgccttttgtaaatatatcaataagcattatgatttgttcatcttggatgaatcacatacgtataatctgatgaacaatacagcagttacaagatttttagcgtattatcctccgatgatgtgttattttttaactgctacacctagaccagctaaccgaatttattgtaacagtattattaatattgccaagttatccgatctaaaaaaaactatctatgcggtagatagtttttttgagccatattccacagacaatattagacatatggtaaaacgactagatggaccatctaataaatatcatatatatactgagaagttattatctgtagacgagcctagaaatcaacttattcttgataccctggtagaagaattcaagtcaggaactattaatcgaattttagttattactaaactacgtgaacatatggtattcttctacaaacgattattagattttttcggatcagaggttgtatttataggagacgcccaaaatagacgtactccagatatggtcaaatcaatcaaggaactaaatagatttatattcgtatccaccttattttattccggtactggtttagatattcctagtttggattcgttgttcatttgctcggcagtaatcaacaatatgcaaatagagcaattactagggagggtatgtcgagaaacagaactattagataggacggtatatgtatttcctaacacatccatcaaagaaataaagtacatgataggaaatttcatgcaacgaattattagtctgtctgtagataaactaggatttaaacaaaaaagttatcggaaacatcaagaatccgatcccacttctgtatgtacaacatcctccagagaagaacgtgtattaaatagaatatttaactcgcaaaatcgttaagaagtttaagcgacgatccgcatgctgcgcaggccagtgtattacccctcatagtattaatataatccaatgatacttttgtgatgtcggaaatcttaaccaatttagactgacaggcagaacacgtcatgcaatcatcatcgtcatcgataactgtagtcttgggcttctttttgcggctcttcattccggaacgcacattggtgctatccatttaggtagtaaaaaataagtcagaatatgccctatagcacgatcgtgcaaaacctggtatatcgtctctatctttatcacaatatagtgtatcgacatttttattattattgacctcgtttatcttggaacatggaatgggaacatttttgttatcaacggccatctttgccttaattccagatgttgtaaaattataactaaacagtctatcatcgacacaaatgaaattcttgtttagacgtttgtagtttacgtatgcggctcgttcgcgtctcattttttcagatattgcaggtactataatattaaaaataagaatgaaataacataggattaaaaataaagttatcatgacttctagcgctgatttaactaacttaaaagaattacttagtctgtacaaaagtttgaaattttcagattctgcggctatagaaaagtataattctttggtagaatggggaacatctacttactggaaaataggcgtgcaaaaggtagctaatgtcgagacgtcaatatctgattattatgatgaggtaaaaaataaaccgtttaatattgatccgggatattacattttcttaccggtatattttggaagcgtctttatttattcgaagggtaaaaatatggtagaacttggatctggaaactcttttcaaataccagatgatatgcgaagtgcgtgtaacaaagtattagacagcgataacggaatagactttctgagatttgttttgttaaacaatagatggataatggaagatgctatatcaaaatatcagtctccagttaatatatttaaactagctagtgagtacggattaaacatacccaaatatttagaaattgaaatagaggaagacacattatttgacgacgagttatactctattatagaacgctctttcgatgataaatttccaaaaatatccatatcgtatattaagttgggagaacttagacggcaagttgtagactttttcaaattctcgttcatgtatattgagtccatcaaggtagatcgtataggagataatatttttattcctagcgttataacaaaatcaggaaaaaagatattagtaaaagatgtagaccatttaatacgatccaaggttagagaacatacatttgtaaaagtaaaaaagaaaaacacattttccattttatacgactatgatggaaacggaacagaaactagaggagaagtaataaaacgaattatagacactataggacgagactattatgttaacggaaagtatttctctaaggttggtagtgcaggcttaaagcaattgactaataaattagatattaatgagtgcgcaactgtcgatgagttagttgatgagattaataaatccggaactgtaaaacgaaaaataaaaaaccaatcagcatttgatttaagcagagaatgtttgggatatccagaagcggattttataacgttagttaataacatgcggttcaaaatagaaaattgtaaggttgtaaatttcaatattgaaaatactaattgtttaaataacccgagtattgaaactatatatggaaactttaaccagttcgtctcaatctttaatatcgtcaccgatgtcaaaaaaagattattcgagtgaaataatatgcgcctttgatataggtgcaaaaaatcctgccagaactgttttagaagtcaaggataactccgttagggtattggatatatcaaaattagactggagttctgattgggaaaggcgcatagctaaagatttgtcacaatatgaatacactacagttcttctagaacgtcagcctagaaggtcgccgtacgtcaaatttatctattttattaaaggctttttatatcatacatcggctgccaaagttatttgcgtctcgcctgtcatgtctggtaattcatatagagatcgaaaaaagagatcggtcgaagcatttcttgattggatggacacattcggattgcgagactccgttccggatagacgcaaattagacgatgtagcggatagtttcaatttggctatgagatacgtattagataaatggaatactaattatacaccttataataggtgtaaatctagaaattacataaaaaaaatgtaataacgttagtaacgccattatggataatctatttacctttctacatgaaatagaagatagatatgccagaactatttttaactttcatctaataagttgcgatgaaataggagatatatatggtcttatgaaagaacgcatttcctcagaggatatgtttgataatatagtgtataataaagatatacatcatgccattaagaaactagtgtattgcgacatccaacttactaaacacattattaatcagaatacgtatccggtatttaacgattcttcacaagtgaaatgttgtcattatttcgacataaactcagataatagcaatattagctctcgtacagtagagatatttgagagggaaaagtcatctcttgtatcatatattaaaactaccaataagaagagaaaggtcaattacggcgaaataaagaaaactgttcatggaggcactaatgcaaattacttttccggtaaaaagtctgacgagtatctgagtactacagttagatccaacattaatcaaccttggatcaaaaccatctctaagaggatgagagttgatatcattaatcactctatagtaacgcgtggaaaaagctctatattacaaactatagaaattatttttactaatagaacatgtgtgaaaatattcaaggattctactatgcacattattctatccaaggacaaggatgaaaaggggtgtatacacatgattgacaaattattctatgtctattataatttatttctgttgttcgaggatatcatccaaaacgagtactttaaagaagtagctaatgttgtaaaccacgtacttacggctacggcattagatgagaaattattcctaattaagaaaatggctgaacacgatgtttatggagttagcaatttcaaaatagggatgtttaacctgacatttattaagtcgttggatcataccgttttcccctctctgttagatgaggatagcaaaataaagttttttaaggggaaaaagctcaatattgtagcattacgatctctggaggattgtataaattacgtgactaaatccgagaatatgatagaaatgatgaaggaaagatcgactattttaaatagcatagatatagaaacggaatcggtagatcgtctaaaagaattgcttctaaaatgaaaaaaaacactgattcagaaatggatcaacgactcggatataagtttttggtgcctgatcctaaagccggagttttttatagaccgttacatttccaatatgtatcgtattctaattttatattgcatcgattgcatgaaatcttgaccgtcaagcggccactcttatcgtttaagaataatacagaacgaattatgatagaaattagcaatgttaaagtgactcctccagattactcacctataatcgcgagtattaaaggtaagagttatgacgcattagccacgttcactgtaaatatctttaaagaggtaatgaccaaagagggtatatccatcactaaaataagtagttatgagggaaaagattctcatttgataaaaattccgctactaataggatacgggaataaaaatccacttgatacagccaagtatcttgttcctaatgtcataggtggagtctttatcaataaacaatctgtcgaaaaagtaggaattaatctagtagaaaagattacaacatggccaaaatttagggttgttaagccaaactcattcactttctcgttttcctccgtatcccctcctaatgtattaccgacaagatatcgccattacaagatatctctggatatatcacaattggaagcgtcgaatatatcatcgacaaagacatttataacggtcaatattgttttgctgtctcaatatttatctagagtgagtctagaattcattagacgtagcttatcatacgatatgcctccagaagttgtctatctagtaaacgcgataatagatagtgctaaacgaattactgaatctattactgactttaatattgatacatacattaatgacctggtggaagctgaacacattaaacaaaaatctcagttaacgatcaacgagttcaaatatgaaatgctgcataactttttacctcatatgaactatacacccgatcaactaaagggattttatatgatatctttactaagaaagtttctctactgtatctaccacacttctagatatccagatagagattcgatggtttgtcatcgtatactaacatacggcaaatattttgagacgttggcacatgatgaattagagaattacataggcaacatccgaaacgatatcatgaacaatcacaagaacagaggcacttacgcggtaaacattcatgtactaacaactcctggacttaatcatgcattttctagtctattgagtggaaagttcaaaaagtcagacggtagttatcgaacacatcctcactattcatggatgcagaatatttctattcctaggagtgttggattttatccggatcaagtaaagatttcaaagatgttttctgtcagaaaataccatccaagtcaatatctttacttttgttcatcagacgttccggaaagaggtcctcaggtaggtttagtatctcaattgtctgtcttgagttccattacaaatatactaacgtctgagtatttggatttggaaaagaaaatttgtgagtatatcagatcatattataaagatgatataagttactttgaaacaggatttccaatcactatagaaaatgctctagtcgcatctcttaatccaaatatgatatgtgattttgtaactgactttagacgtagaaaacggatgggattcttcggtaacttggaggtaggtattactttagttagggatcacatgaatgaaattcgcattaatattggagcgggaagattagtcagaccattcttggttgtggataacggagagctcatgatggatgtgtgtccggagttagaaagcagattagacgacatgacattctctgacattcagaaagagtttccgcatgtcatcgaaatggtagatatagaacaatttacttttagtaacgtatgtgaatcggttcaaaaatttagaatgatgtcaaaggatgaaagaaagcaatacgatttatgtgactttcctgccgaatttagagatggatatgtggcatcttcattagtgggaatcaatcacaattctggacccagagctattcttggatgtgctcaagctaaacaagctatctcttgtctgagctcggatatacgaaataaaatagacaatggaattcatttgatgtatccagagaggccaatcgtgattagtaaggctttagaaacttcaaagattgcggctaattgcttcggccaacatgttactatagcattaatgtcgtacaaaggtatcaatcaagaggatggaattatcatcaaaaaacaatttattcagagaggcggtctcgatattgttacagccaagaaacatcaagtagaaattccattggaaaactttaataacaaagaaagagataggtctaacgcctattcaaaattagaaagtaatggattagttagactgaatgctttcttggaatccggagacgctatggcacgaaatatctcatcaagaactcttgaagatgattttgctagagataatcagattagcttcgatgtttccgagaaatataccgatatgtacaaatctcgcgttgaacgagtacaagtagaacttactgacaaagttaaggtacgagtattaaccatgaaagaaagaagacccattctaggagacaaatttaccactagaacgagtcaaaagggaacagtcgcgtatgtcgcggatgaaacggaacttccatacgacgaaaatggtatcacaccagatgtcattattaattctacatccatcttctctagaaaaactatatctatgttgatagaggttattttaacagccgcatattctgctaagccgtacaacaataagggagaaaaccgacctgtctgttttcctagtagtaacgaaacatccatcgatacatatatgcaattcgctaaacaatgttatgagcattcaaatccgaaattgtctgatgaagaattatcggataaaatcttttgtgaaaagattctctatgatcctgaaacggataagccttatgcatccaaagtattttttggaccaatttattacttgcgtctgagacatttaactcaggacaaggcaaccgttagatgtagaggtaaaaagacgaagctcattagacaggcgaatgagggacgaaaacgtggaggaggtatcaagttcggagaaatggagagagactgtttaatagcgcatggtgcagccaatactattacagaagttttgaaagattcggaagaagattatcaagatgtgtatgtttgtgaaaattgtggagacatagcagcacaaatcaagggtattaatacatgtcttagatgttcaaaacttaatctctctcctctcttaacaaaaattgataccacacacgtatctaaagtatttcttactcaaatgaacgccagaggcgtaaaagtcaaattagatttcgaacgaagacctccttcgttttataaaccattagataaagttgatctcaaaccgtcttttctggtctaatattgtttagtagatacttatcaacatcatcaagattatcaagattatcaagattatcaagataagctaattcactaaacacattatcgatttcggtatcgttactcgcagaataaagttcgttatgatcctgatattcggaaatctgtggagtttcaggttttggtggatgtgtaacagctacttgagataccgaagtctgatattcagaaagctgtggatgttctggttcggcatccaccgatggtgttacaccactactaattggttcagtaacgtctgtggacgatggaggcaccacttctacaggttctggttctttatcctcagtcatcaacggagctacttcaatgcgaggaaatgtataatttggtaatggtttctcatgtggatctgaagaagaggtaagatatctactagaaagataccgatcacgttctagttctcttttgtagaacttaactttttctttctcagcatctagttgatattccaacctcttcacgttactacgttcagatttcaattcacgttcgcatgggttacctccgcagtttttacgagcgatttcacgttcagccttcatgcgtctctccctctctctatcgagtttatcagagcagtctttctgaaggcgatcgaactccataaatttctccaacgctttgattgtttccatagatttccgaagttcagcttttaggactgtgattctttttctttcgaattcacagctggatgtacaaccgtttccattaccgccatctctaagtttcttttctagatcggcaacatttcatccccatgccttttacattcctcgagtctactgtcgtcgaaatatcgttccagctccttttcgacatcaataactttagcacgttgtctctcaagctctcttttgtagttatctgattccctggcacgtttaagatcttcatgcaattgagtcagctcttaacacaatctcttgcttcttcgtcatagtacgcgcaatcactgtgagatccattgttaccacgtctacactcggcgagctcgcgtttaagagattcaatttcccgtttgtattggtccatgtttccattgctaccaccattagatttacaggctgctagttgtcgttcgagatcagaaatacgggttttcttggaattgatttcgtcgatgtacttggcatcgaaacacttattaagttctttttccaattctacgattttatttctttcgcgagtcaattccctcctgtagtaactatctgttttgtcagattcacgctctctacgtagactttcttgcaagttactaatttgttccctagcacgtccgagtttagttttatatgctgaatagagttctgattcatcctttgagcagatctctagcgatcgtttaagattcctgattctagtctttagcctatttacctcctcagaagatgttccgttaccgttgcgtttacactcgttaagctgtctatcaagatccatgattctatctctaagacgttgcatctctctttccatatcagcattgctttcattattacgtctgcagtcactcaactgtctttcaatatctgagattctatctctaagacgtcgcatctctctctgtttcggcattggtttcattattacgtctacagtcgttcaactgtctttcaagatctgatattctagattggagtctgctaatctctgtagcattttcacggcattcactcagttgtctttcaagatctgaaattttagattggagtctgctaatctctgtaagatttcctcctccgctctcgatgcagtcggtcaacttattctctagttctctaatacgcgaacgcagtgcatcaacttcttgcgtgtcttcctggttgcgtgtacattcatcgagtctagattcgagatctctaacgcgtcgtcgttcttcctcaagttctctgcgtactacagaaagcgtgtccctatcttgttgatatttagcaatttctgattctagagtactgattttgcttacgtagttactaatatttgtcttggccttatcaagatcctccttgtatttgtcgcattccttgatatccctacgaagtctggacagttcccattcgacattacgacgtttatcgatttcagctcggagatcgtcatcgcgttgttttagccacatacgactgagttcaagttctcgttgacaagatccatctacttttccattcctaatagtatccagttccttttctagttctgaacgcatttctcgttccctatcaagcgattctctcaattctcggatagtcttcttatcaatttctaataaatctgaaccatcatctgtcccattttgaatatccctgtgttctttgatctcttttgtaagtcggtcgattctttcggttttataaacagaatccctttccaaagtcctaatcttactgagtttatcactaagttctgcattcaattcggtgagttttctcttggcttcttccaactctgttttaaactctccactatttccgcattcttcctcgcatttatctaaccattcaattagtttattaataactagttggtaatcagcgattcctatagccgttcttgtaattgtgggaacataattaggatcttctaatggattgtatggcttgatagcatcatctttatcattattagggggatggacaaccttaattggttggtcctcatctcctccagtagcgtgtggttcttcaatagccgtgttagtaataggcttaggcaaatgcttgtcgtacgcgggcacttcctcatccatcaagtatttataatcgggttctacgtctgaatattcttttctaagagacgcaacttctggagttagtagaagaactctgtttctatatctatcaacgctggaatcaatactcaagttaaggatagcgaatacctcatcgtcatcatccgtatcctctgaaacgccatcatatgacatttcatgaagtctaacgtattgataaacagaatcagatttagtattaaacagatccttaacctttttagtaaatgcatatgtatattttagatctccagatttcataatatggtcgcatgccttaaatgtcagtgcttccataatatagtctggaacactaattggtgatgaaaaagataccggaccatatgctacgttgataaataactctgagccactaactagataatgattaatgttaaggaagaggaaatattcagtgtataggtatgtcttggcgtcatatcttgtactaaacacgctaaacagtttgttaatgtgatcaatttccaatagattaattagagcagcaggaataccaacaaacatattaccacatccgtattttctatgaatatcacatatcatgttaaaaaatcttgatagaagagcgaatatctcgtctgacttaatgagtcgtagttcagcagcaacataagtcataactgtaaatagaacatactttcctgtagtgttgattctagactccacatcaacaccattattaaaaatagttttatatacatctttaatctgctctccgttaatcgtcgaacgttctagtatacggaaacactttgatttcttatctgtagttaatgacttagtgatatcacgaagaatattacgaattacatttcttgtttttcttgagagacctgattcagaactcaactcatcgttccatagtttttttacctcagtggcgaaatctttggagtgcttggtacatttttcaataaggttcgtgacctccatttattataaaaaaattttattcaaaacttaactacaatcgggtaattataaaatcgtagatctcccatgtggtggaatactaccatctatcgcatgtggatggacagtaggtaatggccatgggaacagtaatgtttgcatatttatctttcttgccagtattactgcatattgtcccaatgtttcgatgtgatgttctaacctatcaactgccgctgtatcacaacaatagtgtccgatgaaattaagattatgatccaatgtgtttaatatatgattatcaagtcttatacgatccgcgtcttttttgacaggatcaggttcttctacaggaagaagtttcggcctcttatgatattcatgtctgggaaacggtggtctagggtgaggctccggtatcggagtgggttttggattataatcatcatcgtctatgacatcatcttcgacttcgatatttattttgctatcttgatgatgtcctgtatcagttgcattttcagcactcgactgaatattagcgcattcattgtttattattaccatatttctaaacccaaaatgtatatgttgaacatcagtactatcgttgatgagtcttatagcatgaattcgcttatcgttatcgggtttagcttctgtcaccttagcaattccttttttattaaactctacataatcatatccatttctattgtttgttctaatataaacgagtatagcatcattgctaaatttttcaatagtatcgaaaacagaatatcctaaaccatataatatatattcaggaacactcaaactaaatgtccaggattctcctaaatacgtaaactttaatagtgcgaaatcattcaaaaatctaccacttatagatagatagtacataaatgcgtatagtagtctacctatctctttattatgaaaaccggcattacgatcatatatgtcgtgatatacctgtgatccgtttacgttaaaccataaatacatgggtgatcctataaacatgaatttatttctaattctcagagctatagttaattgaccgtgtaatatttgcttacatgcatacttgatacgctcattaataagatttttatcattgctcgttatctcagaatcgtatatataaggagtaccatcgtgattcttaccagatattatacaaaatactatatataaaatatattgaccaacgttagtaatcatataaatgtttaacgttttaaattttgtattcaatgatccattatcatacgctagcatggtcttatgatattcattctttaaaatataatattgtgttagccattgcattggggctcctaatggagattttttattctcatccattttaggataggctttcataaagtccctaataacttcgtgaataatgtttctatgttttctactgatgcatgtatttgcttcgatttttttatcccatgtttcatctatcatagatttaaacgcagtaatgctcgcaacattaacatcttgaaccgttggtacaattccgttccataaatttataatgttcgccatttatataactcattttttgaatatacttttaattaacaaaagagttaagttactcatatggacgccgtccagtctgaacatcaatctttttagccagagatatcatagccgctcttagagtttcagcgtgattttccaacctaaatagaacttcatcgttgcgtttacaacacttttctatttgttcaaactttgttgttacattagtaatctttttttccaaattagttagccgttgtttgagagtttcctcattgtcgtcttcatcggctttaacaattgcttcgcgtttagcctctggctttttagcagcctttgtagaaaaaaattcagttgctggaattgcaagatcgtcatctccggggaaaagagttccgtccatttaaagtacagattttagaaactgacactctgcgttatttatatttggtacaacacatggattataaatattgatgttaataacatcagaaaatgtaaagtctatacattgttgcatcgtgttaaattttctaatggatctagtattattgggtccaacttctgcctgaaatccaaatatggaagcggatacaaaaccgtttcctggataaaccacacatctccacttttgctttacatcagaaattgtgtcattgacatcttgaactctcctatctaatgccggtgttccacctatagattttgaatattcgaatgctgcatgagtagcattaaattccttaatattgccataattttcatatattgagtaaccctggataaaaagtaaacacaccgcagccgtcgctaccacaataaaaaaaattgatagagagttcatttataatctattagaagctgacaaaatttttttacacgcatcagacaatgctttaataaatagttcaacatctacttttgtcatatcgaaccgatggtatgattctaacctagaattacatccgaaaaagttgactatgttcatagtcattaagtcattaacaaacaacattccagactctggattataagacgatactgtttcgtcacaattacctaccttaatcatgtgattatgaatattggctattagagcaccttctaagaaatctataatatctttgaaacacgatttaaaatcaaaccacgaatatacttctacgaagaaagttagtttacccataggagaaataactataaatggagatctaaatacaaaatccggatctatgatagttttaacattattatattctctattaaatacctccacatctaaaaatgttaattttgaaactatgtcttcgtttattaccgtacctgaactaaacgctataagctctattgtttgagaactctttaaacgatattcttgaaatacatgtaacaaagtttcctttaactcggtcggtttatctaccatagttacagaatttgtatccttatctataatataataatcaaaatcgtataaagttatataattatcgcgttcagattgtgatcttttcaaatagactaaaaaccccatttctctagtaagtatcttatgtatatgtttgtaaaatatcttcatggtgggaatatgctctaccgcagttagccattcctcattgacagcggtagatgtattagacaaaactattccaatgtttaacaagggccattttacgagattattaaatccttgtttgataaatgtagccaatgagggttcgagttcaacgacgattgaattctcttcccgcggatgctgcatgatgaacgacgggatgttgttcgattgatttggaattctttttcgactttttgtttatattaaatattttaaaatttatagctgatagcaattcatgtactacggataatgtagacgcgtattgcgcatcgatatctttattattagataaatttatcaataaatgtgagaagtttgcctcgttaaggtcttccatttaaatattatataaacatttgtgtttgtatcttattcgtcttttatggaatagttttttactagtaaagctgcaattacacactttgtccgtaaaacataaatataaacaccagcttttatcaatcgttccaaaaagtcgacggcggacatttttaacatggcatctattttaaatacacttaggtttttggaaaaaacatcattttataattgtaacgattcaataactaaagaaaagattaagattaaacataagggaatgtcatttgtattttataagccaaagcattctaccgttgttaaatacttgtctggaggaggtatatatcatgatgatttggttgtattggggaaggtaacaattaatgatctaaagatgatgctattttacatggatttatcatatcatggagtgacaagtagtggagcaatttacaaattgggatcgtctatcgatagactttctctaaataggactattgttacaaaagttaataattatgatgatacattttttgacgacgatgattgatcgctattgcacaattttgtttttttactttctaatatagcgtttagattctttttcatgtgcgaatattgatttactaaaatatcgatgtttaacttttgttctatgacgtccttatcagcggtatcggtacatatacgtaattcaccttcacaaaatacggagtcttcgataataatagccaatcgattattggatctagcggtctgtatcatattcaacatgtttaatatatcctttcgtttcccctttacaggcatcgatcgtagcatattttccgcgtctgagatggaaatgttaaaactacaaaaatgcgtaatgttagcccgtcctaatattggtacgtgtctataagtttggcatagtagaataatagacgtgtttaaatgccttccaaagtttaagaattctattagagtattgcattttgatagtttatcgcctacatcatcaaaaataagtaaaaagtgtgctgattttttatgattttgtgcgacagcaatacatttttctatgttacttttagttcgtatcagattatattctagagattcctgactactaacgaaattaatatgatttggccaaatgtatccatcataatctggattataaacgggtgtaaacaagaatatatgtttatattttttaactagtgtagaaaacagagatagtaaatagatagtttttccagatccagatcctcccgttaaaaccattctaaacggcatttttaataaattttctcttgaaaattgtttttcttggaaacaattcataattatatttacagttactaaattaatttgataataaatcaaaatatggaaaactaaggtcgttagtagggaggagaacaaagaaggcatatcgtgatataaataacatttattatcatgatgacaccagaaaacgacgaagagcagacatctgtgttctccgctactgtttacggagacaaaattcagggaaagaataaacgcaaacgcgtgattggtctatgtattagaatatctatggttatttcactactatctatgattaccatgtccgcgtttctcatagtgcgcctaaatcaatgcatgtctgctaacgaggctgctattactgacgccgctgttgccgttgctgctgcatcatctactcatagaaaggttgcgtctagcactacgcaatatgatcacaaagaaagctgtaatggtttatattaccagggttcttgttatatattacattcagactaccagttattctcggatgctaaagcaaattgcactgcggaatcatcaacactacccaataaatccgatgtcttgattacctggctcattgattatgttgaggatacatggggatctgatggtaatccaattacaaaaactacatccgattatcaagattctgatatatcacaagaagttagaaagtatttttgtgttaaaacaatgaactaatatttatttttgtacattaataaatgaaatcgcttaatagacaaactgtaagtaggtttaagaagttgtcggtgccggccgctataatgatgatactctcaaccattattagtggcataggaacatttctgcattacaaagaagaactgatgcctagtgcttgcgccaatggatggatacaatacgataaacattgttatctagataccaacattaaaatgtctacagataatgcggtttatcagtgtcgtaaattacgagctagattgcctagacctgatactagacatctgagagtattgtttagtattttttataaagattattgggtaagtttaaaaaagaccaataataaatggttagatattaataatgataaagatatagatattagtaaattaacaaattttaaacaactaaacagtacgacggatgctgaagcgtgttatatatacaagtctggaaaactggttgaaacagtatgtaaaagtactcaatctgtactatgtgttaaaaaattctacaagtgacaacaaaaaatgaattaataataagtcgttaacgtacgccgccatggacgccgcgtttgttattactccaatgggtgttgactataacagatacattgtatgatgatctcgatatctcaatcatggactttataggaccatacattataggtaacataaaaactgtccaaatagatgtacgggatataaaatattccgacatgcaaaaatgctactttagctataagggtaaaatagttcctcaggattctaatgatttggctagattcaacatttatagcatttgtgccgcatacagatcaaaaaataccatcatcatagcatgcgactatgatatcatgttagatatagaagataaacatcagccattttatctattcccatctattgatgtttttaacgctacaatcatagaagcgtataacctgtatacagctggagattatcatctaatcatcaatccttcagataatctgaaaatgaaattgtcgtttaattcttcattctgcatatcagacggcaatggatggatcataattgatgggaaatgcaatagtaattttttatcataaaagttgtaaagtaaataataaaacaataaatattgaactagtagtacgtatattgagcaatcagaaatgatgctggtacctcttatcacggtgaccgtagttgcgggaacaatattagtatgttatatattatatatttgtaggaaaaagatacgtactgtctataatgacaataaaattatcatgacaaaattaaaaaagataaagagttctaattccagcaaatctagtaaatcaactgatagcgaatcagactgggaggatcactgtagtgctatggaacaaaacaatgacgtagataatatttctaggaatgagatattggacgatgatagcttcgctggtagtttaatatgggataacgaatccaatgttatggcgcctagcacagaacacatttacgatagtgttgctggaagcacgctgctaataaataatgatcgtaatgaacagactatttatcagaacactacagtagtaattaatgaaacggagactgttaaagtacttaatgaagataccaaacagaatcctaactattcatccaatcctttcgtaaattataataaaaccagtatttgtagcaagtcaaatccgtttattacagaacttaacaataaatttagtgagaataatccgtttagacgagcacatagcgatgattatcttaataagcaagaacaagatcatgaacacgatgatatagaatcatcggtcgtatcattggtgtgattagtttcctttttataaaattgaagtaatatttagtattattgctgccgtcacgttgtacaaatggagatattccctgtattcggcatttctaaaattagcaattttattgctaataatgactgtagatattatatagatacagaacatcaaaaaattatatctgatgagatcaatagacagatggatgaaacggtacttcttaccaacatcttaagcgtagaagttgtaaatgacaatgagatgtaccatcttattcctcatagattatcgacgattatactctgtattagttctgtcggaggatgtgttatctctatagataatgacgtcaatggcaaaaatattctaacctttcccattgatcatgctgtaatcatatccccactgagtaaatgtgtcgtagttagcaagggccctacaaccatactggttgctaaagcggatatacccagcaaacgattggtaacatcgtttacaaacgacatactgtatgtaaacaatctatcactgattaattatttgccgttgtctgtattcattattagacgagtcaccgactatttggatagacacatatgcgatcagatatttgctaataataagtggtattcccttataaccatcgacgataagcaatatcctattccatcaaattgtataggtatgtcttctgccaagtacataaattctagcatcgagcaagatactttaatacatgtttgtaacctcgagcatccattcgacttagtatacaaaaaaatgcagtcgtacaattctgtacctatcaaggaacaaatattgtacggtagaattgataatataaatatgagcattagtatttctgtggattaatagatttctagtatggggatcattaatcatctctaatctctaaatacctcataaaacgaaaaaaaagctattatcaaatactgtacggaatagattcattctcttctctttttatgaaactctgttgtatatctactgataaaactggaagcaaaaaatctgataaaaagaataagatcaagatcaaggattatatggaacacgattattataaaataacaatagttcctggttcctcttccacgtctactagctcgtggtattatacacatgcctagtaatagtctctttgcgttgatggaaagcagactagaaataacaggctaaaatgttcagacaccataatagttcccaacccagataataacagagtaccatcaacacattcctttaaactcaatcccaaacccaaaaccgttaaaatgtatccggccaattgatagtagataatgaggtgtacagcgcatgataatttacacagtaaccaaaatgaaaatactttagtaattataagaaatatagatggtaacgtcatcatcaacaatccaataatatgccggagagtaaacattgacggataaaacaaaaatgctccgcataactctatcatggcaataacacaaccaaatacttgtaagattcctaaattagtagaaaatacaacggatatcgatgtataagtgatctcgagaaataataagaataaagtaatgcccgtaaagataaacatcaacattgtttggtaatcattaaaccaattagtatgacgttgaactaatttcacagtaaattttattccagtattatccccgcatgtataagtacctggtaagatatctttatattccataatcaatgagacatcactatctgataacgaatgaagtctagcactagtatgccatttacttaatattgtcgtcttggaagttttattataagttaaaatatcatggttatccaatttccatctaatatactttgtcggattatctatagtacacggaataatgatggtatcattacatgctgtatactctatggtctttgtagttgttataacaaccaacgtatagaggtatatcaacgatattctaactcttgacattttttatttatttaaaatgatacctttgttatttattttattctattttgctaacggtattgaatggcataagtttgaaacgagtgaagaaataatttctacttacttattagacgacgtattatacacgggtgttaatggggcggtatacacattttcaaataataaactaaacaaaactggtttaactaataataattatataacaacatctataaaagtagaggatgcggataaggatacattagtatgcggaaccaataacggaaatcccaaatgttggaaaatagacggttcagacgacccaaaacatagaggtagaggatacgctccttatcaaaatagcaaagtaacgataatcagtcacaacggatgtgtactatctgacataaacatatcaaaagaaggaattaaacgatggagaagatttgacggaccatgtggttatgatttattcacggcggataacgtaattccaaaagatggtttacgaggagcattcgtcgataaagacggtacttatgacaaagtttacattcttttcactgatactatcggctcaaagagaattgttaaaattccgtatatagcacaaatgtgcctaaacgacgaaggtggtccatcatcgttgtctagtcatagatggtcgacgtttctcaaagtcgaattagaatgtgatatcgacggaagaagttatagataaattattcattctaaaactataaaaacagataatgatacgatactatatgtattcttcgatagtccgcattatgtacctattctatgaataccattaaacaatctttttctacgtcaaaattggaaggatatacaaagcaattgccgtctccagctcctggtatatgtctaccagctggaaaagttgttccacataccacgtttgaagtcatagaaaaatataatgtactagatgatattataaagcctttatctaaccaacctatcttcgaaggaccgtctggtgttaaatggttcgatataaaggagaaggaaaatgaacatcgggaatatagaatatacttcataaaagaaaattctatatattcgttcgatacaaaatctaaacaaactcgtagctcgcaagtcgatgcgcgactattttcagtaatggtaacttcgaaaccgttatttatagcagatatagggataggagtaggaatgccacaaatgaaaaaaatacttaaaatgtaatcttaatcgagtacaccacacgacaatgaacaaacataagacagattatgctggttatgcttgctgcgtaatatgcggtctaattgttggaattatttttacagcgacactattaaaagttgtagaacgtaaattagttcatacaccatcaatagataaaacgataaaagatgcatatattagagaagattgtcctactgactggataagctataataataaatgtatccatttatctactgatcgaaaaaacctgggaggaaggacgtaatgcatgcaaagctctaaatccaaattcggatctaattaagatagagactccaaacgagttaagttttttaagaagccttagacgaggctattgggtaggagaatccgaaatattaaaccagacaaccccatataattttatagctaaaaatgccacgaagaatggaactaaaaaacggaaatatatttgtagtacaacgaatactcccaaactgcattcgtgttacactatataacaattacactacatttttatcataacactacttcggttagatgttttagaaaaaaataaatatcgccgtaccgttcttgtttttataaaaataacaattaacaattatcaaattttttctttaatattttacgtggttgaccattcttggtggtaaaataatctcttagtgttggaatggaatgctgtttaatgtttccgcactcatcgtatattttgacgtatgcagtcacatcgtttacgcaatagtcagactgtagttctatcatgcttcctacatcagaaggaggaacagttttaaagtctcttggttttaatctattgccattagttttcatgaaatcctttgttttatccacttcacattttaaataaatgtccactatacattcttctgttaattttactagatcgtcatgggtcatagaatttataggttccgtagtccatggatccaaactagcaaacttcgcgtatacggtatcgcgattagtgtatacaccaactgtatgaaaattaagaaaacagtttaataaatcaacagaaatatttaatcctccgtttgatacagatgcgccatatttatggatttcggattcacacgttgtttgtctgaggtgttcgtctagtgttgcttctacgtaaacttcgattcccatatattctttattgtcagaatcgcataccgatttatcatcatacactgtttgaaaactaaatggtatacacatcaaaataataaataataacgagtacattctgcaatattgttatcgtaattggaaaattagtgttcgagtgagtcggattatgtgagtactggattgtatattttattttatattttgtaataagaataaaatgctaatgtcaagtttattccaatagatgtcttattaaaaaacatatataataaataacaatggctgaatggcataaaattatcgaggatatctcaaaaaataataagttcgaggatgccgccatcgttgattacaagactacaaagaatgttctagctgctattcctaacagaacatttgccaagattaatccgggtgaaattattcctctcatcactaatcgtaatattctaaaacctcttattggtcagaaatattgtattgtatatactaactctctaatggatgagaacacgtatgctatggagttgcttactgggtacgcccctgtatctccgatcgttatagcgagaactcataccgcacttatatttttgatgggtaagccaacaacatccagacgtgatgtgtatagaacgtgtagagatcacgctacccgtgtacgcgcaactggtaattaaaataaaaagtaatattcatatgtagtgtcaattttaaatgatgatgatgaaatggataatatccatattgacgatgtcaataatgccggtattggcatacagctcatcgatttttagatttcattcagaggatgtggaattatgttatgggcatttgtattttgataggatctataatgtagtaaatataaaatataatccgcatattccatatagatataattttattaatcgcacgttaaccgtagatgaactagacgataatgtcttttttacacatggttattttttaaaacacaaatatggttcacttaatcctagtttgattgtctcattatcaggaaacttaaaatataatgatatacaatgctcagtaaatgtatcgtgtctcattaaaaatttggcaacgagtacatctactatattaacatctaaacataagacttattctctacatcggtccacgtgtattactataataggatacgattctattatatggtataaagatataaatgacaagtataatgacatctatgattttactgcaatatgtatgctaatagcgtctacattgatagtgaccatatacgtgtttaaaaaaataaaaatgaactcttaattatgctatgctattagaaatggataaaatcaaaattacggttgattcaaaaattggtaatgttgttaccatatcgtataacttggaaaagataactattgatgttacacctaaaaagaaaaaagaaaaggatgtattattagcgcaatcagttgctgtcgaagaggcaaaagatgtcaaggtagaagaaaaaaatattatcgatattgaagatgacgatgatatggatgtagaaagcgcataatacgatctataaaaataagtatataataaatactttttatttacggtactcttgtagtggtgataccctactcaattatttttttaaaaaaatacttattctgattcttctagccatttccgtgttcgttcgaatgccacatcgacgttaaagataggggagtagttgaaatctagttctgcattgttggtacgcacctcaaatgtagtgttggatatcttcaacgtatagttgttgagtagtgatggttttctaaatagaattctcttcatatcattcttgcacgcgtacatttttagcatccatcttggaattctagatccttgttctattcccaatggtttcatcaatagaagattaaacatatcgtacgaacacgatggagagtaatcgtagcaaaagtaagcatttcctttaatcttagatcccggatactggatatattttgcagccaacacgtgcatccatgcagcatttcctacatatacccggctatgcaccgcgtcatcatcgactgtacgatacataatgttaccgtgttgcttacattgctcgtaaaagactttcgtcaatttgtctccttctccgtaaattccagtgggtcttaggcaacaagtatacaattttgctccattcatgattacggaattattggctttcataaccagttgctcggccatacgtttactttttgcgtatacatgtcctggtgatatatcataaagggtatgctcatggccgatgaatggatcaccgtgtttattgggtcctattgcttccatgctactagtatagatcaaatacttgattcctaggtccacacaagctgccaatatagtctgtgttccataatagtttactttcatgatttcattatcggtgtattttccaaatacatccactagagcagccgtatgaataatcagatttaccccatctagcgcttctctcaccttatcaaagtcgtttatatcacattgtatatagtttataaccttaactttcgaggttattggttgtggatcttctacaatatctatgactctgatttcttgaacatcatctgcactaattaacagttttactatatacctgcctagaaatccggcaccaccagtaaccgcgtacacggccattgctgccactcataatatcagactacttattctattttactaaataatggctgtttgtataatagaccacgataatatcagaggagttatttactttgaaccagtccatggaaaagataaagttttaggatcagttattggattaaaatccggaacgtatagtttgataattcatcgttacggagatattagtcaaggatgtgattccataggcagtccagaaatatttatcggtaacatctttgtaaacagatatggtgtagcatatgtttatttagatacagatgtaaatatatttacaattattggaaaggcgttatctatttcaaaaaatgatcagagattagcgtgtggagttattggtatttcttacataaatgaaaagataatacattttcttacaattaacgagaatggcgtttgatatatcagttaatgcgtctaaaacaataaatgcattagtttacttttctactcagcaaaataaattagtcatacgtaatgaagttaatgatacacactacactgtcgaatttgatagggacaaagtagttgacacgtttatttcatataatagacataatgacaccatagagataagaggggtgcttccagaggaaactaatattggttgcgcggttaatacgccggttagtatgacttacttgtataataagtatagttttaaactgattttagcagaatatataagacacagaaatactatatccggcaatatttattcggcattgatgacactagatgatttggctattaaacagtatggagacattgatctattatttaatgagaaacttaaagtagactccgattcgggactatttgactttgtcaactttgtaaaggatatgatatgttgtgattctagaatagtagtagctctatctagtctagtatctaaacattgggaattgacaaataaaaagtataggtgtatggcattagccgaacatatatctgatagtattccaatatctgagctatctagactacgatacaatctatgtaagtatctacgcggacacactgagagcatagaggatgaatttgattattttgaagacgatgattcgtctacatgttctgccgtaaccgacagggaaacggatgtataattttttttatagcgtgaaggatatgataaaaaatataattgttgtatttatcccattccaatcaccttatatgattctgtaaaaaaattatactgtaacacaataaaggagtcttatagatgtatagaggtcagatactggtttgataaactgtttattccacataagtatgtttgactttatggttagacccgcatactttaacaaatcactgaaaattggagttaggtattgacctctcagaatcagttgccgttctggaacattaaatgtattttttatgatatactccaacgcatttatgtgggcatacaacaagtcattactaatggagtattccaagagttttagttgtctagtatttaacaagagaagagatttcaacagactgtttatgaactcgaacgccgcctcattgtcgcttatattgatgatgtcgaattctcccaatatcatcactgatgagtagctcatcttgttatcgggatccaagttttctaaagatgtcattaaaccctcgatcatgaatggatttatcatcatcgtttttatgttggacatgagcttagtccgtttgtccacatctatagacgacgatttctgaattatttcatatatccctctctttaactccaggaacttgtcaggatggtctactttaatatgttctcgtctaagagatgaaaatctttggatggttgcacgcgacttttctttaaaggatgacgttgcccaagatcctctcttaaatgaatccatcttatccttggacaagatggacagtctattttccttagatggtttaatatttttgttacccatgatctataaaggtagacctaatcgtctcggatgaccatatatttattttcagttttattatacgcataaattgtaaaaaatatgttaggtttacaaaaatgtctcgtggggcattaatcgtttttgaaggattggacaaatctggaaaaacaacacaatgtatgaacatcatggaatctataccggcaaacacgataaaatatcttaactttcctcagagatccactgtcactggaaagatgatagatgactatctaactcgtaaaaaaacctataatgatcatatagttaatctattattttgtgcaaatagatgggagtttgcatcttttatacaagaacaactagaacagggaattactttaatagttgatagatacgcattttctggagtagcgtatgccgccgctaaaggcgcgtcaatgactctcagtaagagttatgaatctggattgcctaaacccgacttagttatattcttggaatctggtagcaaagaaattaatagaaacgtcggcgaggaaatttatgaagatgttacattccaacaaaaggtattacaagaatataaaaaaatgattgaagaaggagatattcattggcaaattatttcttctgaattcgaggaagatgtaaagaaggagttgattaagaatatagttatagaggctatacacacggttactggaccagtggggcaactgtggatgtaatagtgaaattacattttttataaatagatgttagtacagtgttataaatggatgaagcatattactctggcaacttggaatcagtactcggatacgtgtccgatatgcataccgaactcgcatcaatatctcaattagttattgccaagatagaaactatagataatgatatattaaacaaggacattgtaaattttatcatgtgtagatcaaacttggataatccatttatctctttcctagatactgtatatactattatagatcaagagatctatcagaccgaattgattaattcattagacgacaatgaaattatcgattgtatagttaacaagtttatgagcttttataaggataacctagaaaatatagtagatgctatcattactctaaaatatataatgaataatccagattttaaaactacgtatgccgaagtactcggttccagaatagccgatatagatattaaacaagtgatacgtaagaatatactacaattgtctaatgatatccgcgaacgatatttgtgaaaaatattaaaaaaaaatactttttttattaaatgacgtcgcttcgcgaatttagaaaattatgctgtgatatatatcacgcatcaggatataaagaaaaatctaaattaattagagactttataacagatagggatgataaatatttgatcattaagctattgcttcccggattagacgatagaatttataacatgaacgataaacaaattataaaattatatagtataatatttaaacaatctcaggaagatatgctacaagatttaggatacggatatataggagacactattaggactttcttcaaagagaacacagaaatccgtccacgagataaaagcattttaactttagaagaagtggatagttttttaactacgttatcatccgtaactaaagaatcgcatcaaataaaattattgactgatgtagcatctgtttgtacatgtaatgatttaaaatgtgtagtcatgcttattgataaagatctaaaaattaaagcgggccctcggtacgtacttaacgctattagtcctcatgcctatgatgtgtttagaaaatctaataacttgaaagagataatagaaaatgcatctaaacaaaatctagactctatatctatttctgttatgactccaattaatcccatgttagcggaatcgtgtgattctgtcaataaggcgtttaaaaaatttccatcaggaatgtttgcggaagtcaaatacgatggtgaaagagtacaagttcataaaaataataacgagtttgccttctttagtagaaacatgaaaccagtactctctcataaagtggattatctcaaagaatacataccgaaagcatttaaaaaagctacgtctatcgtattggattctgaaattgttcttgtagacgaacataatgtaccgctaccgtttggaagtttaggaatacacaaaaagaaagaatataaaaactctaacatgtgtttgttcgtgtttgactgtttgtactttgatggattcgatatgacggacattccattgtacgaacgaagatcttttctcaaagatgttatggttgaaatacccaatagaatagtattctcagagttgacgaatattagtaacgagtctcagttaactgacgtattggatgatgcactaacgagaaaattagaaggattggtcttaaaagatattaatggagtatacgaaccgggaaagagaagatggttaaaaataaagcgagactatttgaacgagggttccatggcagattctgccgatttagtagtactaggtgcctactatggtaaaggagcaaagggtggtatcatggcagtctttctaatgggttgttacgacgatgaatccggtaaatggaagacggttaccaagtgttcaggacacgatgataatacgttaagggagttgcaagaccaattaaagatgattaaaattaacaaggatcccaaaaaaattccagagtggttagtagttaataaaatctatattcccgattttgtagtagaggatccgaaacaatctcagatatgggaaatttcaggagcagagtttacatcttccaagtcccataccgcaaatggaatatccattagatttcctagatttactaggataagagaggataaaacgtggaaagaatctactcatctaaacgatttagtaaacttgactaaatcttaatagttacatacaaactgaaaattaaaataacaccatttagttggtggtcgccatggatggtgttattgtatactgtctaaacgcgttagtaaaacatggcgaggaaataaatcatataaaaaatgatttcatgattaaaccatgttgtgaaagagtttgtgaaaaagtcaagaacgttcacattggcggacaatctaaaaacaatacagtgattgcagatttgccatatatggataatgcggtatccgatgtatgcaattcactgtataaaaagaatgtatcaagaatatccagatttgctaatttgataaagatagatgacgatgacaagactcctactggtgtatataattattttaaacctaaagatgttattcctgttatcatatctataggaaaggataaagatgtctgtgaactattaatctcatcagacatatcgtgtgcatgcgtggagttaaattcatatcacgtagccattcttcccatgaatgtttccttttttaccaaaggaaatgcctcgttgattattctcctgtttgatttctctatcgatgcagcacctctcttaagaagtgtaaccgataataatgttattatatctagacaccagcgtctacatgacgagcttccgagttccaattggttcaagttttacataagtataaagtccgactattgttctatattatatatggttgttgatggatctgtgatgcatgcgatagctgataatagaactcacgcaattattagcaaaaatatattagacaatactacaattaacgatgagtgtagatgctgttattttgaaccacagattaggattcttgatagagatgagatgctcaatggatcatcgtgtgatatgaacagacattgtattatgatgaatttacctgatgtaggcgaatttggatctagtatgttggggaaatatgaacctgacatgattaagattgctctttcggtggctggtaatttaataagaaatcgagactacattcccgggagacgaggctatagctactacgtttacggtatagcctctagataatttttttaagcacgaaataaaaaacataattttaaaccaatctatttcatactattttgtgtgatcaccatggacataaagatagatattagtatttctggtgataaatttacggtgactactaggagggaaaatgaagaaagaaaaaaatatctacctctccaaaaagaaaaaactactgatgttatcaaacctgattatcttgagtacgatgacttgttagatagagatgagatgtttactattctagaggaatattttatgtacagaggtctattaggcctcagaataaaatatggacgactctttaacgaaattaaaaaattcgacaatgatgcggaagaacaattcggtactatagaagaactcaagcagaaacttagattaaattctgaagagggagcagataactttatagattatataaaggtacaaaaacaggatatcgtcaaacttactgtatacgattgcatatctatgataggattgtgtgcatgcgtggtagatgtttggagaaatgagaaactgttttctagatggaaatattgtttacgagcgattaaactgtttattaatgatcacatgcttgataagataaaatctatactgcagaatagactagtatatgtggaaatgtcatagaaagttaatgagagcaaaaatatataaggttgtattccatatttgttattttttctgtaatagttaaaaaaatacattcgatggtctatctatcagattattatgtgttataaggtactttttctcataataaactagagtatgagtaagatagtgtttttcaaaacatataaatctaaaattgatggatgagatatacagctattaatttcgaaaatatataaatctaaaattgatggataagatatacagctattaatttcgaaaatatattttaatctgataactttaaacatggatttttgatggtggtttaacgttttaaaaaaagattttgttattgtagtatatgataatattaaaagatggatataaagaatttgctgactgcatgtactattttttacattactacattggctacggcagatatacctactccgccaccaacgggtcatgtgacaagggagaatatcttgataagaggcataatcaatgttgtaatcggtgtccacctggagaatttgccaaggttagatgtaatggtaacgataacacaaaatgtgaacgctgcccacctcatacatataccacaatccccaattattctaatggatgtcatcaatgtagaaaatgcccaaccggatcatttgataaggtaaagtgtaccggaacacagaacagtaaatgttcgtgtcttcctggttggtattgcgctactgattcttcacagactgaagattgttgaaattgtgtaccaaaaaggagatgtccatgcggatactttggtggaatagatgaacaaggaaatcctatttgtaaatcgtgctgtattggtgaatattgcaactacctacgtaattatagacttgatccattttctccatgcaaactatctaaatgtaattaattatgattttgatgataatgttaccatacattatatcgctacttggttagtgtattattcagtatgaagacctattaataattacttatcttttgacgatcttgttataattataatataaaaacttatggcatagtaactcataattgctgacgcgataaattcgtaataatctgttttgttcaaatttttataaggaatctacaggcataaaaataaaaatataatttataatatactcttacagcgcgccatcatgaatagcagcagtaaattaattgctgttattaatggatttagaaatagtggacgattttgtgatattaatatagttattaatgatgaaaggataaacgctcacagactcatcctatctggagcctccgaatatttttccattctgttttccaataattttatcgattctaatgaatacgaagttaatctaagtcatttagattatcaaagtgttaacgatttgatcgattacatttatgggatacctttgagcctaactaacgataacgtgaaatatattctttcaaccgctgattttttacaaattggatctgccattactgagtgcgaaaaatacatacttaaaaatctttgttctagaaactgtatcgatttctacatatacgctgataaatataataacaagaaaatagaatcagcgtcgtttaacacaatattacgaaatattttgagactcatcaacgatgaaaactttaaatacttaacagaggaatcaatgataaaaattttaagcgatgatatgttaaatataaaaaatgaggattttgcaccactaattctcattaaatggttagagagtactcaacaatcatgcaccgtcgagttacttagatgcctcagaatatcattgctttccccacaagttataaaatcactttatagtcatcaactggttagttcaatctacgaatgtataacattcttaaacaatatagcattcttggatgaatcatttcctagataccatagcatcgagttgatatctatcggtataagtaattcgcatgataagatttccataaactgctacaatcataaaaaaaatacatgggaaatgatatcttcacgtagatataggtgtagtttcgcagtggccgtcctggataatattatctatatgatgggtggatatgatcagtccccgtatagaagttcaaaggttatagcgtacaatacatgtacaaattcttggatatatgatataccagagctaaaatatcctcgttctaattgtgggggactggctgatgacgaatacatttattgtataggcggcatacgcgatcaggattcatcgttgacatctagtattgatagatggaagccatcaaaaccatattggcagaagtatgctaaaatgcgcgaaccaaaatgtgatatgggggttgcgatgttaaacggattaatatatgtcatgggtggaatcgttaaaggtgacacgtgtaccgacgcactagagagtttatcagaagatggatggatgaagcatcaacgtcttccaataaaaatgtccaatatgtcgacgattgttcatgatggcaagatttatatatctggaggttacaacaatagtagtgtagttaatgtaatatcgaatctagtccttagctataatccgatatatgatgaatggaccaaattatcatcattaaacattcctagaattaatcccgctctatggtcagcgcataataaattatatgtaggaggaggaatatctgatgatgttcgaactaatacatctgaaacatacgataaagaaaaagattgttggacattggataatggtcacgtgttaccacgcaattatataatgtataaatgcgaaccgattaaacataaatatccattggaaaaaacacagtacacgaatgattttctaaagtatttggaaagttttataggtagttgatagaacaaaatacataattttgtaaaaataaatcactttttatactaatatgacacgattaccaatacttttgttactaatatcattagtatacgctacaccttttcctcagacatctaaaaaaataggtgatgatgcaactctatcatgtaatcgaaataatacaaatgactacgttgttatgagtgcttggtataaggagcccaattccattattcttttagctgctaaaagcgacgtcttgtattttgataattataccaaggataaaatatcttacgactctccatacgatgatctagttacaactatcacaattaaatcattgactgctagagatgccggtacttatgtatgtgcattctttatgacatcaactacaaatgacactgataaagtagattatgaagaatactccacagagttgattgtaaatacagatagtgaatcgactatagacataatactatctggatctacacattcaccagaaactagttctgagaaaccagaggatatagataattttaattgctcgtcggtattcgaaatcgcgactccggaaccaattactgataatgtagaagatcatacagacaccgtcacatacactagtgatagcattaatacagtaagtgcatcatctggagaatccacaacagacgagactccggaaccaattactgataaagaagaagatcatacagtcacagacactgtctcatacactacagtaagtacatcatctggaattgtcactactaaatcaaccaccgatgatgcggatctttatgatacgtacaatgataatgatacagtaccaccaactactgtaggcggtagtacaacctctattagcaattataaaaccaaggactttgtagaaatatttggtattaccgcattaattatattgtcggccgtggcaatattctgtattacatattatatatataataaacgttcacgtaaatacaaaacagagaacaaagtctagatttttgacttacataaatgtctgggatagtaaaatctatcatattgagcggaccatctggttcaggaaagacagccatagccaaaagactatgggaatatatttggatttgtggtgtcccataccactagatttcctcgtcctatggaacgagaaggtgtcgattaccattacgttaacagagaggccatctggaagggaatagccgccggaaactttctagaacatactgagtttttaggaaatatttacggaacttctaaaactgctgtgaatacagcggctattaataatcgtatttgtgtgatggatctaaacatcgatggcgttagaagtcttaaaaatacgtacctaatgccttactcggtgtatataagacctacctctcttaaaatggttgagaccaagcttcgttgtagaaacactgaagcggatgatgagattcatcgtcgtgtgatgttggcaaaaactgacatggatgaggcaggtgaagccggtctattcgacactattatcattgaagatgatgtgaatttagcatatagtaagttaattcagatactacaggaccgtattagaatgtattttaacactaattagagacttaagacttaaaacttgataattaataatataactcgtttttatatgtggctatttcaacgtctaatgtattagttaaatattaaaacttaccacgtaaaacttaaaatttaaaatgatatttcattgacagatagatcacacattatgaactttcaaggacttgtgttaactgacaattgcaaaaatcaatgggtcgttggaccattaataggaaaaggtggattcggtagtatttatactactaatgacaataattatgtagtaaaaatagagcccaaagctaacggatcattatttaccgaacaggcattttatactagagtacttaaaccatccgttatcgaagaatggaaaaaatctcacaatataaagcacgtaggtcttatcacgtgcaaggcatttggtctatacaaatccattaatgtggaatatcgattcttggtaattaatagattaggtgcagatctagatgcggtgatcagagccaataataatagattaccaaaaaggtcggtgatgttgatcggaatcgaaatcttaaataccatacaatttatgcacgagcaaggatattctcacggagatattaaagcgagtaatatagtcttggatcaaatagataagaataaattatatctagtggattacggattggtttctaaattcatgtctaatggcgaacatgttccatttataagaaatccaaataaaatggataacggtactctagaatttacacctatagattcgcataaaggatacgttgtatctagacgtggagatctagaaacacttggatattgtatgattagatggttgggaggtatcttgccatggactaagatatctgaaacaaagaattgtgcattagtaagtgccacaaaacagaaatatgttaacaatactgcgactttgttaatgaccagtttgcaatatgcacctagagaattgctgcaatatattaccatggtaaactctttgacatattttgaggaacccaattacgacgagtttcggcacatattaatgcagggtgtatattattaagtgtggtgtttggtcgatgtaaaatttttgtcgataaaaattaaaaaataacttaatttattattgatctcgtgtgtacaaccgaaatcatggcgatgttttacgcacacgctctcggtgggtacgacgagaatcttcatgcctttcctggaatatcatcgactgttgccaatgatgtcaggaaatattctgttgtgtcagtttataataacaagtatgacattgtaaaagacaaatatatgtggtgttacagtcaggtgaacaagagatatattggagcactgctgcctatgtttgagtgcaatgaatatctacaaattggagatccgatccatgatcaagaaggaaatcaaatctctatcatcacatatcgccacaaaaactactatgctctaagcggaatcgggtacgagagtctagacttgtgtttggaaggagtagggattcatcatcacgtacttgaaacaggaaacgctgtatatggaaaagttcaacatgattattctactatcaaagagaaggccaaagaaatgaatgcactcagttcaggacctatcatcgattaccacgtctggataggagattgtatctgtcaagttactgctgtggacgtacatggaaaggaaattatgagaatgagattcaaaaagggtgcggtgctacagatcccaaatctggtaaaagttaaacttggggagaatgatacagaaaatctttcttctactatatcggcggcaccatcgaggtaaccacctctcaagaagaccgcgtgaataatgtactcatgaaacgtttggaaactatacgccatatgtggtctgttgtatatgatcattttgatattgtgaatggtaaagaatgctgttatgtgcatacgcattcatctaatcaaaatcctataccgagtactgtaaaaacaaatttgtacatgaagactatgggatcatgcattcaaatggattccatggaagctctagagtatcttagcgaactgaaggaatcaggtggatggagtcccagaccagaaatgcaggaatttgaatatccagatggagtggaagacactgaatcaattgagagattggtagaggagttcttcaatagatcagaacttcaggctggtaaattagtcaaatttggtaattctattaattgttaaacatacatctgtttcagctaagcaactaagaacacgtatacggcagcagcttccttttatactctcatcttttaccaacacaaagggtggatatttgttcattggagttgataataatacacacaaagtatttggattcacggtgggttacgactacctcagactgatagagaatgatatagaaaagcatatcaaaagactttgtgttgtgcatttctgtgagaagaaagaggacatcaagtacacgtgtcgattcatcaaggtatataaacctggggatgaggctacctcgacatacgtgtgcgctatcaaagtggaaagatgctgttgtgctgtgtttgcagattggccagaatcatggtatatggatactaatggtatcaagaagtattctccagatgaatgggtgtcacatataaaattttaattaatgtaactatagagaacaaataataggttgtaatatcatatagacaataactaacaattaattagtaactgttatctcttttttaactaaccaactaactatatacctattaatacatcgtaattatagttcttaacatctattaatcattgattcgcttctttaattttttataaactaacattgttaattgaaaagggataacatgttacagaatataaattatatatggatttttttaaaaaggaaatacttgactggagtgtatatttatctcttcattatatagcacgcgtgtgttccaattcttccacatcccatataatacaggattataatctcgttcgaacatacgagaaagtggataaaacaatagttgattttttatctaggttgccaaatttattccatattttagaatatggggaaaatattctacatatttattctatggatgatgctaatacgaatattataattttttttctagatagagtattaaatattaataagaacgggtcatttatacacaatctcaggttatcatcatccattaatataaaagaatatgtatatcaattagttaataatgatcatccagataataggataagactaatgcttgaaaatggacgtagaacaagacattttttgtcctatatatcagatacagttaatatctatatatgtattttaataaatcatggattttatatagatgcagaagacagttacggttgtacattattacatagatgtatatatcactataagaaatcagaatcagaatcatacaatgaattaattaagatattgttaaataatggatccgatgtagataaaaaagatacgtacggaaacacaccttttatcctattatgtaaacacgatatcaacaacgtggaattgtttgagatatgtttagagaatgctaatatagactctgtagactttaatagatatacacctcttcattatgtctcatgtcgtaataaatatgattttgtaaagttattaatttctaaaggagcaaatgttaatgcgcgtaataaattcggaactactccattttattgtggaattatacacggtatctcgcttataaaactatatttggaatcagacacagagttagaaatagataatgaacatatagttcgtcatttaataatttttgatgctgttgaatctttagattatctattatccagaggagttattgatattaactatcgtactatatacaacgaaacatctatttacgacgctgtcagttataatgcgtataatacgttggtctatctattaaacagaaatggtgattttgagacgattactactagtggatgtacatgtatttcggaagcagtcgcaaacaacaacaaaataataatggaagtactattgtctaaacgaccatctttgaaaattatgatacagtctatgatagcaattactaaaaataaacaacataatgcagatttattgaaaatgtgtataaaatatactgcgtgtatgaccgattatgatactcttatagatgtacagtcgctacagcaatataaatggtatattttaaaatgtttcgatgaaatagatatcatgaagagatgttatataaaaaataaaactgtattccaattagttttttgtatcaaagacattaatactttaatgagatatggtaaacatccttctttcgtgaagtgcactagtctcgacgtatacggaagtcgtgtacgtaatatcatagcatctattagatatcgtcagagattaattagtctattatccaagaagctggatgcgggagataaatggtcgtgttttcctaacgaaataaaatataaaatattggaaaactttaacgataacgaactatccacatatctaaaaatcttataaacactattaaaatataaaatctaagtaggataaaatcacactacatcattgtttccttttagtgctcgacagtgtatactatttttaacactcataaataaaaatgaaaacgatttccgttgttacgttgttatgcgtactacctgctgttgtttattcaacatgtactgtacccactatgaataacgctaaattaacgtctaccgaaacatcgtttaatgataaacagaaagttacatttacatgtgatcagggatatcattctttggatccaaatgctgtctgcgaaacagataaatggaaatacgaaaatccatgcaagaaaatgtgcacagtttctgattatgtctctgaattatatgataagccattatacgaagtgaattccaccatgacactaagttgcaacggcgaaacaaaatattttcgttgcgaagaaaaaaatggaaatacttcttggaatgatactgttacgtgtcctaatgcggaatgtcaacctcttcaattagaacacggatcgtgtcaaccagttaaagaaaaatactcatttggggaatatatgactatcaactgtgatgttggatatgaggttattggtgcttcgtacataagttgtacagctaattcttggaatgttattccatcatgtcaacaaaaatgtgatataccgtctctatctaatggattaatttccggatctacattttctatcggtggcgttatacatcttagttgtaaaagtggttttatactaacgggatctccatcatccacatgtatcgacggtaaatggaatcccatactcccaacatgtgtacgatctaacgaaaaatttgatccagtggatgatggtcccgacgatgagacagatttgagcaaactctcgaaagacgttgtacaatatgaacaagaaatagaatcgttagaagcaacttatcatataatcatagtggcgttaacaattatgggcgtcatatttttaatctccgttatagtattagtttgttcctgtgacaaaaataatgaccaatataagttccataaattgctaccgtaaatataaatccgttaaaataattaataatttaataacaaacaagtatcaaaagattaaagacttatagctagaatcaattgagatgtcttcttcagtggatgttgatatctacgatgccgttagagcatttttactcaggcactattataacaagagatttattgtgtatggaagaagtaacgccatattacataatatatacaggctatttacaagatgcgccgttataccgttcgatgatatagtacgtactatgccaaatgaatcacgtgttaaacaatgggtgatggatacacttaatggtataatgatgaatgaacgcgatgtttctgtaagcgttggcaccggaatactattcatggaaatgtttttcgattacaataaaaatagtatcaacaatcaactaatgtatgatataattaatagcgtatctataattctagctaatgagagatatagaagcgcttttaacgacgatggtatatacatccgtagaaatatgattaacaagttgtacggatacgcatctctaactactattggcacgatcgctggaggtgtttgttattatctgttgatgcatctagttagtttgtataaataattatttcaatatactagttaaaattttaagattttaaatgtataaaaaactaataacgtttttatttgtaataggtgcattagcatcctattcgaataatgagtacactccgtttaataaactgagtgtaaaactctatatagatggagtagataatatagaaaattcatatactgatgataataatgaattggtgttaaattttaaagagtacacaatttctattattacagagtcatgcgacgtcggatttgattccatagatatagatgttataaacgactataaaattattgatatgtataccattgactcgtctactattcaacgcagaggtcacacgtgtagaatatctaccaaattatcatgccattatgataagtacccttatattcacaaatatgatggtgatgagcaacaatattctattactgcagagggaaaatgctataaaggaataaaatatgaaataagtatgatcaacgatgatactctattgagaaaacatactcttaaaattggatctacttatatatttgatcgtcatggacatagtaatacatattattcaaaatatgatttttaaaaatttaaaatatattatcacttcagtgacagtagtcaaataacaaacaacaccatgagatatattataattctcgcagttttgttcattaatagtatacacgctaaaataactagttataagtttgaatccgtcaattttgattccaaaattgaatggactggggatggtctatacaatatatcccttaaaaattatggcatcaagacgtggcaaacaatgtatacaaatgtaccagaaggaacatacgacatatccgcatttccaaagaatgatttcgtatctttctgggttaaatttgaacaaggcgattataaagtggaagagtattgtacgggactatgcgtcgaagtaaaaattggaccaccgactgtaacattgactgaatacgacgaccatatcaatttgtacatcgagcatccgtatgctactagaggtagcaaaaagattcctatttacaaacgcggtgacatgtgtgatatctacttgttgtatacggctaacttcacattcggagattctaaagaaccagtaccatatgatatcgatgactacgattgcacgtctacaggttgcagcatagactttgtcacaacagaaaaagtgtgcgtgacagcacagggagccacagaagggtttctcgaaaaaattactccatggagttcgaaagtatgtctgacacctaaaaagagtgtatatacatgcgcaattagatccaaagaagatgttcccaatttcaaggacaaaatggccagagttatcaagagaaaatttaataaacagtctcaatcttatttaactaaatttctcggtagcacatcaaatgatgttaccacttttcttagcatgcttaacttgactaaatattcataactaatttttattaatgatacaaaaacgaaataaaactgcatattatacactggttaacgcccttataggctctaaccattttcaagatgaggtccctgattatagtccttctgttcccctctatcatctactccatgtctattagacgatgtgagaagactgaagaggaaacatggggattgaaaatagggttgtgtataattgccaaagatttctatcccgaaagaactgattgcagtgttcatctcccaactgcaagtgaaggattgataactgaaggcaatggattcagggatatacgaaacaccgataaattataaaaaaagcaatgtgtccgctgtttccgttaataatactattttcgtaactggcggattattcataaataactctaatagcacgatcgtggttaacaatatggaaaaacttgacatttataaagacaaacaatggtcgattatagaaatgcctatggctagggtatatcacggcatcgactcgacatttggaatgttatattttgccggaggtctatccgttaccgaacaatatggtaatttagagaaaaacaacgagatatcttgttacaatcctagaacgaataagtggtttgatatttcatatactatttataagatatccatatcatcattgtgtaaactaaataacgtcttctatgtatttagtaaggacattggatatgtggaaaagtatgatggtgcatggaagttagtacatgatcgtctccccgctataaaggcattatcaacttctccttattgattgaaaatgaaaatataaatagtttttatgtatagcagtattaccctatagttttattgcttactactaacatggatacagatgttacaaatgtagaagatatcataaatgaaatagatagagagaaagaagaaatactaaaaaatgtagaaattgaaaataataaaaacattaacaagaatcatccaagtggatatattagagaagcactcgttattaatacaagtagtaatagtgattccattgataaagaagttatagaatgtatcagtcacgatgtaggaatatagatcatatctactaatttttataatcgatacaaaacataaaaaacaactcgttattacatagcaggcatggaatccttcaagtattgttttgataacgatggcaagaaatggattatcggaaatactttatattctggtaattcaatactatataaggtcagaaaaaatttcactagttcgttctacaattacgtaatgaaaatagatcacaaatcacacaagccattgttgtctgaaatacgattctatatatctgtattggatcctttgactatcgacaactggacacgggaacgtggtataaagtatttggctattccagatctgtatggaattggagaaaccgatgattatatgttcttcgttataaagaattcgggaagagtattcgccccaaaggatactgaatcagtcttcgaagcatgcgtcactatgataaacacgttagagtttatacactctcgaggatttacccatggaaaaatagaaccgaggaatatactgattagaaataaacgtctttcactaattgactattctagaactaacaaactatacaagagtggaaactcacatatagattacaacgaggacatgataacttcaggaaatatcaattatatgtgtgtagacaatcatcttggagcaacagtttcaaaacgaggagatttagaaatgttgggatattgcatgatagaatggttcggtggcaaacttccatggaaaaacgaaagtagtataaaagtaataaaacaaaaaaaagaatataaaaaatttatagctactttctttgaggactgttttcctgaaggaaatgaacctctggaattagttagatatatagaattagtatacacgttagattattctcaaactcctaattatgacagactacgtaaactgtttatacaagattgaaattatattctttttttatagagtgtggtagtgttacggatatctaatattaatattagactatctctatcgcgctacacgaccaatatcgattactatggatatcttcagggaaatcgcatcttctatgaaaggagagaatgtattcatttctccagcgtcaatctcgtcagtattgacaatactgtattatggagctaatggatccactgctgaacagctatcaaaatatgtagaaacggaggagaacacggataaggttagcgctcagaatatctcattcaaatccatgaataaagtatatgggcgatattctgccgtgtttaaagattcctttttgagaaaaattggcgataagtttcaaactgttgacttcactgattgtcgcactatagatgcaatcaacaagtgtgtagatatctttactgaggggaaaatcaatccactattggatgaaccattgtctcctgatacctgtctcctagcaattagtgccgtatactttaaagcaaaatggttgatgccattcgaaaaggaatttaccagtgattatcccttttacgtatctccgacggaaatggtagatgtaagtatgatgtctatgtacggcaaggcatttaatcacgcatctgtaaaggaatcattcggcaacttttcaatcatagaactgccatatgttggagatactagtatgatggtcattcttccagacaagattgatggattagaatccatagaacaaaatctaacagatacaaattttaagaaatggtgtaactctctggaagctacgtttatcgatgttcacattcccaagtttaaggtaacaggttcgtataatcttgtggatactctagtaaagtcaggactgacagaggtgttcggttcaactggagattatagcaatatgtgtaattcagatgtgagtgtcgacgctatgattcacaaaacgtatatagatgtcaatgaagagtatacagaagcagctgcagcaacttgtgcactggtgtcagactgtgcatcaacaattacaaatgagttctgtgtagatcatccgttcatctatgtgattaggcatgttgatggaaaaattcttttcgttggtagatattgctctccgacaactaattgttaaccattttttttaaaaaaatagaaaaaacatgtggtattagtgcaggtcgttgttcttccaattgcaattggtaagatgacggccaactttagtacccacgtcttttcaccacagcactgtggatgtgacagactgaccagtattgatgacgtcagacaatgtttgactgaatatatttattggtcgtcctatgcataccgcaacaggcaatgcgctggacagttgtattccacactcctctcttttagagatgatgcggaatcagtgttcatcgacattcgcgagctggtaaaaaatatgccgtgggatgatgtcaaagattgtacagaaatcatccgttgttatataccggatgagcaaaaaaccatcagagagatttcggccatcatcggactttgtgcatatgctgctacttactggggaggtgaagaccatcccactagtaacagtctgaacgcattgtttgtgatgcttgagatgctcaattacgtggattataacatcatattccggcgtatgaattgatgagttgtacatcttgacattttctttcttctcttctccctttcttctcttctcccttcctccctcttctccctttcccagaaacaaacttttttacccactataaaataaaatgagtatactacctattatatttcttcctatatttttttattcttcattcgttcagacttttaacgcgcctgaatgtatcgacaaagggcaatattttgcatcattcatggagttagaaaacgagccagtaatcttaccatgtcctcaaataaatacgctatcatccggatataatatattagatattttatgggaaaaacgaggagcggataatgatagaattataccgatagataatggtagcaatatgctaattctgaacccgacacaatcagactctggtatttatatatgcattaccacgaacgaaacctactgtgacatgatgtcgttaaatttgacaatcgtgtctgtctcagaatcaaatatagatcttatctcgtatccacaaatagtaaatgagagatctactggcgaaatggtatgtcccaatattaatgcatttattgctagtaacgtaaacgcagatattatatggagcggacatcgacgccttagaaataagagacttaaacaacggacacctggaattattaccatagaagatgttagaaaaaatgatgctggttattatacatgtgttttagaatatatatacagaggtaaaacatataacgtaaccagaattgtaaaattagaggtacgggataaaataataccttctactatgcaattaccagatggcattgtaacttcaataggtagtaatttgactattgcgtgtagagtatcgttgagacctcccacaacggatgcagacgtcttttggataagtaatggtatgtattacgaagaagatgatggggacggagacggtagaataagtgtagcaaataaaatctatatgaccgataagagacgtgttattacatcccggttaaacattaatcctgtcaaggaagaagatgctacaacgtttacgtgtatggcgtttactattcctagcatcagcaaaacagttactgttagtataacgtgaatgtatgttgttacatttccatgtcaattgagtttataagaatttttatacattatcttccaacaaacaattgacgaacgtattgctatgattaactcccacgatactatgcatattattaatcattaacttgcagactatacctagtgctattttgacatactcatgttcttgtgtaattgcggtatctatattattaaagtacgtaaatctagctatagttttattatttaattttagataatataccgtctccttatttttaaaaattgccacatcctttattaaatcatgaatgggaatttctatgtcatcgttagtatattgtgaacaacaagagcagatatctataggaaagggtggaatgcgatacattgatctatgtagttttaaaacacacgcgaactttgaagaatttatataaatcattccatcgatacatccttctatgttgacatgtatatatccaggaattcttttattaatgtcaggaaatgtataaactaaaacattgcccgaaagcggtgcctctatctgcgttatatccgttcttaacttacaaaatgtaaccaatacctttgcatgacttgttttgttcggcaacgttagtttaaacttgacgaatggattaattacaatagcatgatccgcgcatctattaagtttttttactttaacgcccttgtatgtttttacagagactttatctaaatttctagtacttgtatgtgttataaatataacgggatatagaactgaatcacctaccttagatacccaattacattttatcagatccagataataaacaaattttgtcgccctaactaattctatattgttatatattttacaattggttatgatatcatgtaataacttggagtctaacgcgcatcgtcgtacgtttatacaattgtgatttagtgtagtatatctacacatgtatttttccgcactatagtattctggactagtgataaaactatcgttatatctgtcttcaatgaactcatcgagatattgctctctgtcatattcatacacctgcataaactttctagacatcttacaatccgtgttattttaggatcatatttacatatttacgggtatatcaaagatgttagattagttaatgggaatcgtctataataatgaatattaaacaattatatgaggacttttaccacaaagcatcataaaaatgagtcgtcgtctgatttatgttttaaatatcaaccgcaaatcaactcataaaatacaagagaatgaaatatatacatattttagtcattgcaatatagaccatacttctacagaacttgattttgtagttaaaaactatgatctaaacagacgacaacatgtaactgggtatactgcactacactgctatttgtataataattactttacaaacgatgtactgaagatattattaaatcatgacgtaaatgtaacgatgaaaaccagtagcggacgtatgcctgtttatatattgcttactagatgttgcaatatttcacatgatgtagtgatagatatgatagacaaagataaaaaccacttattacatagagactattccaacctattactagagtatataaaatctcgttacatgttattaaaggaagaggatatcgatgagaacatagtatccactttattagataagggaatcgatcctaactttaaacaagacggatatacagcgttacattattattatttgtgtctcgcacacgtttataaaccaggtgagtgtagaaaaccgataacgataaaaaaggccaagcgaattatttctttgtttatacaacatggagctaatctaaacgcgttagataattgtggtaatacaccattccatttgtatcttagtattgaaatgtgtaataatattcatatgactaaaatgctgttgacttttaatccgaatttcaaaatatgtaataatcatggattaacgcctatactatgttatataacttccgactacatacaacacgatattcttgttatgttaatacatcactatgaaacaaatgttggagaaatgccgatagatgagcgtcgtatgatcgtattcgagtttatcaaaacatattctacacgtccggcagattcgataacttatttgatgaataggtttaaaaatataaatatttatacccgctatgaaggaaagacattattacacgtagcatgtgaatataataatacacacgtaatagattatcttatacgtatcaacggagatataaatgcgttaaccgacaataacaaacacgctacacaactcattatagataacaaagaaaattccccgtataccatcgattgtttactgtatatacttagatatattgtagataagaatgtgataagatcgttggtggatcaacttccatctctacctatcttcgatataaaatcatttgagaaattcatatcctactgtatacttttagatgacacattttacgataggcacgttaagaatcgcgattctaaaacgtatcgatacgcattttcaaaatacatgtcgtttgataaatacgatggtataataactaaatgtcacgacgaaacaatgttactcaaactgtccactgttctagacactacactatatgcagttttaagatgccataattcgaaaaagttaagaagatacctcaacgagttaaaaaaatataataacgataagtcctttaaaatatattctaatattatgaatgagagataccttaatgtatattataaagatatgtacgtgtcaaaggtatatgataaactatttcctgttttcacagataaaaattgtctactaacattactaccttcagaaattatatacgaaatattatacatgctgacaattaacgatctttataatatatcgtatccacctaccaaagtatagttgtatttttctcatgcgatgtgtgtaaaaaaactgatattatataaatattttagtgccgtataataaagatgacgatgaaaatgatggtacatatatatttcgtatcattattgttattgctattccacagttacgccatagacatcgaaaatgaaatcacagaattcttcaataaaatgagagatactctaccagctaaagactctaaatggttgaatccagcatgtatgttcggaggcacaatgaatgatatagccgctctaggagagccattcagcgcaaagtgtcctcctattgaagacagtcttttatcgcacagatataaagactatgtggttaaatgggagaggctagaaaagaatagacggcgacaggtttctaataaacgtgttaaacatggtgatttatggatagccaactatacatctaaattcagtaaccgtaggtatttgtgtaccgtaactacaaagaatggtgactgtgttcagggtatagttagatctcatattaaaaaacctccttcatgcattccaaaaacatatgaactaggtactcatgataagtatggcatagacttatactgtggaattctttacgcaaaacattataataatataacttggtataaagataataaggaaattaatatcgacgacattaagtattcacaaacgggaaagaaattaattattcataatccagagttagaagatagtggaagatacaactgttacgttcattacgacgacgttagaatcaagaatgatatcgtagtatcaagatgtaaaatacttacggttataccgtcgcaagaccacaggtttaaactaatactagatccaaaaatcaacgtaacgataggagaacctgccaatataacatgcactgctgtgtcaacgtcattattgattgacgatgtactgattgaatgggaaaatccatccggatggcttataggattcgattttgatgtatactctgttttaactagtagaggcggtattaccgaggcgaccttgtactttgaaaatgttactgaagaatatataggtaatacatataaatgtcgtggacacaactattattttgaaaaaacccttacaactacagtagtattggagtaaatacacaatgcatttttatatacattactgaataattattattattatttatatcgtatttgtgctataacgcgactatctaggtatttgtatctcactgatagagaacatataaatatagactctattaaacagttgtgtaaaatatcaaatcctaatagatgtggatgtacggctttacatgagtacttttataattatagatcagtcaacggaaaatacaagtatagatacaacggttactatcaatattatttatctagcgattatgaaaattataatgaatattattatgatgattatgatagaactggtatgaacagtgagagtgataatatatcaatcaaaacagaatatgaattctatgatgaaacacaagatcaaagtacacaactagtaggttacgacattaaactcaaaaccaatgaggatgattttatggctatgatagatcagtgggtgtccatgattatatagatgaatcaattaataaagtagtatatggaagagagtctcacgtaagatggcgggatatatggcaagaacataatgatggcgtatacagtataggaaaggagtgcatagataatatatacgaagacaaccataccgtagacgaattctacaagatagacagcgtatcagatgtagatgacgcggaacacatatctccgataactaatgatgtatctacacaaacatgggaaaagaaatcagagttagatagatacatggaaatgtatcctcgtcatagatatagtaagcattctgtctttaagggattttctgacaaagttagaaaaaatgatttagacatgaatgtggtaaaagaattactttctaacggtgcatctctaacaattaaggatagcagtaataaggatccaataaccgtttattttcgaagaacgataatgaatttagaaatgattgatattattaacaaacatacaactattgatgaacgaaagtatatagtacactcctatctaaaaaattataaaaatttcgattatccatttttcaggaagttagttttgactaataaacattgtctcaacaattattataatataagcgacagcaaatatggaacaccgctacatatattggcgtctaataaaaaattaataactcctaattacatgaagttattagtgtataacggaaatgatataaacgcacgaggtgaagatacacaaatgcgaactccattacacaaatatttgtgtaaatttgtatatcataatattgaatatggtatccgatactataatgaaaagattatagacgcatttatagagttaggagccgatctaactattccaaataacgatggaatgataccagtagtttactgtatacactcaaatgcagaatatggttataacaatattactaacataaagataatacgtaaactacttaatcttagtagacgtgcgtcacataatctatttagagatcgagtcatgcacgattatataagtaatacatatattgatcttgagtgtttagatattattagatcgttggatggattcgatatcaatggttactttgaaggacgtacaccacttcattgcgctatacaacataacttcactcagattgctaagtacttattagatcgaggagctgatatagtcgtacccaacacattgattatacatcagtacatacagtaaatagcatagatatggaggaggatacaaatatttcaaataaagttataaggtacaacactgtcaataatatatggaagacattacctaacttctggactggaactataaatccaggcgtggtctcgcataaagatgatatatatgttgtatgcgacatcaaagatgaaaaaaatgttaagacttgtatatttagatataacacgaatacgtataacggatgggaattggttacgacgacagaaagcagattatcagctctgcatactattcttcatgacaataccataatgatgttacattgttatgaatcgtatatgttacaagatacatttaatgtgtacactcgcgaatggaatcatatgtgtcatcaacattcgaatagttatatcatgtacaatatactacccatctactaaatataatagaataaaataaatgagtatgatcattttagataacgattgattttatcattaccgcttcattcttatattctttgcttacggaacctatatttagaaacatctactaacgattttttatgcttgcattattaatggtatgtaatatgattgattgtgtacgcaataccaatttgttaagtatgaatacggggtacaaacataaactgaaatttaacattatttatttatgatatatatcgttatcgttattgtttggtctataccatggatatctttaaagaactaatcttaaaacaccctgatgaaaatgttttgatttctccagtttctattttatctactttatctattctaaatcatggagcagctggttctacagctgaacaactatcaaaatatatagagaatatgaatgagaatacacccgatgataagaaggatgacaataatgacatggacgtagatattccgtattgtgcgacactagctaccgcaaataaaatatacggtagcgatagtatcgagttccacgcctccttcctacaaaaaataaaagacgattttcaaactgtaaactttaataatgctaaccaaacaaaggaactaatcaacgaatgggttaagacgatgacaaatggtaaaattaattccttattgactagtccgctatccattaatactcgtatgacagttgttagcgccgtccattttaaagcaatgtggaaatatccattttctaaacatcttacatatacagacaagttttatatttctaagaatatagttaccagtgttgatatgatggtgggtaccgagaataacttgcaatatgtacatattaatgaattattcggaggattctctattatcgatattccatacgagggaaactctagtatggtaattatactaccggacgacatagaaggtatatataacatagaaaaaaatataacagatgaaaaatttaaaaaatggtgtggtatgttatctactaaaagtatagacttgtatatgccaaagtttaaagtggaaatgacagaaccgtataatctggtaccgattttagaaaatttaggacttactaatatattcggatattatgcagattttagcaagatgtgtaatgaaactatcactgtagaaaaatttctacatacgacgtttatagatgttaatgaggagtatacagaagcatcggccgttacaggagtatttatgactaacttttcgatggtatatcgtacgaaggtctacataaaccatccattcatgtacatgattaaagacaacacaggacgtatactttttatagggaaatactgctatccgcaataaatataaacaaatagacttttatcacgtttatctatgtctaaatattacaaatagtaatagtataaactaaagctgataatacttaaaaaaataataatatcatttacaattaatagtataaactaaaaattaaacaaatcgttattataagtaatatcaaaatgatgatatacggattaatagcgtgtcttatattcgtgacttcatccatcgctagtccactttatattcccgttattccacccattacggaagataaatcgttcaatagtgtagaggtattagtttccttgtttagagatgaccaaaaagactatacggtaacttctcagttcaataactacactatcgataccaaagactggactatcggcgtactatccacacctgatggtttggatataccattgactaatataacttattggtcacggtttactataggtcgtgcattgttcaaatcagagtctgaggatattttccaaaagaaaatgagtattctaggtgtttctatagaatgtaagaagtcgtcgacattacttacttttttgaccgtgcgtaaaatgactcgagtatttaataaatttccagatatggcttattatcgaggagactgtttaaaagccgtttatgtaacaatgacttataaaaatactaaaactggagagactgattacacgtacctctctaatggggggttgcctgcatactatcgtaatggggtcgatggttgattattgattagtatattccttattcacacaaaaagaacatttttataaacatgaaaccactgtctaaatgtaattatgatcttgatttatagatgaagatcagcctttagaggattttaaccagtatgtttaatatgaaaaaaataaacataacatattttgagattaagcgctattgtgcttaattattttgctctataaactgaatatatagccacaattattgacgggcttgtttatgaccggcaatcatgaatttacagaaattatctctggctatatatcttactgcgacatgttcgtggtgttatgaaacatgcataagaaaaactgcgttgtatcatgacattcaattggagcatgtagaagacaataaagatagtgtagcgtcgctaccgtacaagtagtcaatcaaagagaacgtagtagattgttggctacatttaattggacagatatagctgagggtgttagaaatgagttcattaaaatatgtgatatcaacggaacatatttatataattatactattgctgttagtataattattgattccacggaagaactaccaacagttactccaattacaacaacatatgaaccttctacatataattatactatcgatgatagcactgttattactactgaagaactacaagtgactcctcatatggatctccatcgatgatacatgtattaaaatactttccgaataagtcttttaaatattgtattaattatgaaaaactatgctatgcgagtatgatgcaaagatgtttaatgatacgatactagattttatctctagcgagagatgtcgttagaatcatttatcataactacgtttaataataattcatcaacgaatatcgataacatgtgtcatttatacgttaaagtctgtccgtcttctctattgtttagactgtttgtagaatgctgtgatataaacaaactagtagaaggtacgactccgttacactgttatctaatgaatgaaggatttgaatcatctgttttaaaaaacctattaaaggagtatgtcatgaatacgtttaatgttcatgacatccattacacaaatatttaactcatgatgaagttgagaatgatatgctttctgatagtatagatagctttagctaatataaaaatatattaatccactatatattctagacttgatttaaaaccgataaactactactacgtactgtataagttgttaaaaaaaggagcagaccctaattatgtagatgatagaggtaatacttttcttcattacttctgcatctatatgtccacttatgagaaaacgtcatttaataagatgcatcgtgaaaagaaatttattaaagagttggtaaaatatgaaaccgaaagtaaataatataggaaatacacctctacataactacgtatctcaatatgatatcactctcattcctcatccacaacccattaaaaaaatggaaattaaagccctctattagcataaacggctacaggtctacctttacaatggcctctccttgtgcccagttcagaccctgtcattgccacgctactaaggactccctgaataccgtggccgacgtcagacattgtctgactgaatacatcctgtgggtttctcatagatggacccatagagaaagcgcagggtctctctacaggcttctcatctctttcagaactgatgcaacggagctctttggtggtgagttgaaggattcacttccgtgggacaatatcgacaattgcgtggagatcattaaatgtttcatcagaaatgactccatgaaaaccgccgaagaacttcgtgcaatcattggactttgtactcaatcagctatcgtctctggaagagtcttcaacgataagtatatcgacatactacttatgctgcgaaagattctgaacgagaacgactatctcaccctcttggatcatatccgcactgctaaatactaaatctccttcatgctctctcactacactttttatcatcttatgaggaatgattgccttcatcatttttcgtgaaataggaataattagcaccagaatagctatggattgcacatgtattctatgtcgtctactggatgaagatgtgacgtacaaaaaaataaaactagaaattgaaacgtgtcacaacttatcaaaacatatagatagacgaggaaacaatgcgctacattgttacgtcttcaataaatgcgatacagacattaagattgttcgactgttactctctcgcggagtcgagagactttgtagaaacaacgaaggattaactccgctaggagcatacagtaagcatagatacgtaaaatctcaaattgtgcatctactgatatccagctattcgaattcctctaacgaactcaagtcgaatataaatgatttcgatctgtattcgtatatgtcttcggataatatcgacttacgtctgctaaaatacctaattgtggataaacggatacgtccgtccaagaatacgaattatgcaatcaatggtctcggattggtggatatatacgtaacgacgcctaatccgagaccagaagtattgctatggcttcttaaatcagaatgttacagcaccggttacgtatttcgtacctgtatgtacgacagtgatatgtgtaagaactctcttcattactatatatcgtctcatagagaatctcaatctctatccaaggatgtaattaaatgtttgatcaataacaatgtttccatccatggcagagacgaaggaggatctttacccatccaatactactggtcttgctcaaccatagatatagagattgttaaattattaataaaggatgtggacacgtgtagagtatacgacgtcagccctatattagaggcggattatctaaacaagcgatttagagtaaccccatataatgtagacatggaaatcgttaatcttcttattgagagacgtcatactcttgtcgacgtaatgcgtagtattacttcttacgattccagagactataaccactacatcatcgataacattctaaagagatttagacaacaggatgaatccatcgtacaagccatgttgataaactacttacattacggcgatatggtcgttcgatgcatgttagataacggacaacaactatcctctgcacgactactttgttaataataatctcgtcgatgtaaacgtcgtaaggtttatcgtggaaaataatggacacatggctgtaaatcacgtatcgaacaatggccgtctatgtatgtacggtctgatattatcgagatttaataattgcgggtatcactgttatgaaaccatactaatagatgtatttgatatactaagcaagtacatggataatatagatatgatcgataatgagaataaaactctactatattacgcggtcgatgtcaataatatacaatttgcaaagcggttattggaatatggagcgagtgttacaacatcacgctcgataatcaatacggccatccagaaaagtagttacagaagagaaaacaaaacgaggatagttgatttattacttagctaccatcccactctagagactatgattgacgcatttaatagagatatacgctatctatatcctgaaccattattcgcctgtatcagatacgccttaatcctagatgatgattttccttctaaagtaagtatgatatctccggtcgtcataaggaactaaagcgctatagagtagacattaatagaatgaagaatgcctacatatcaggcgtctccatgtttgatatattatttaaacgaagcaaacgccacagattgagatacgcaaagaatccgacatcaaatggtacaaaaaagaactaacgtccatcattacagaaactgtaaagaacaatgagaggatcgactccatagtggacaacattaatacagacgataacttgatttcgaaattacccatggagatactttattactccattaaataatttatcatggagcgataatgtcctgtttcatttgtttccatgacatattacaaaatcgattccgtccaagatgataaaaacatttaccggcatcataaacacggagtttattttatatgtctcgcataaacattactaaaaaaatatattgttcggttttctttcacatctttaattatgaaaaagtaaatcattatgagatggacgagattgtacgcatcgttcgcgacagtatgtggtacatacctaacgtatttatggacgacggtaagaatgaaggtcacgtttctgtcaacaatgtttgtcatatgtattttacgttctttgatgtggatacatcgtctcatctgtttaagctagttattaaacactgcgatctgaataaacgaggtaactctccattacattgctatacgatgaatacacgatttaatccatctgtattaaagatattgttacaccacggcatgcgtaactttgatagcaaggatgaaaaaggacatattcctctacaccactatctgattcattcactatcaatcgataacaagatctttgatatactaacggacaccattgatgactttagtaaatcatccgatctattgctgtgttatcttagatataaattcaatgggagcttaaactattacgttctgtacaaaggatccgaccctaattgcgtcgacgaggatggactcacttctcttcattactactgtaaacacatatccacgttctacaaaagcaattattacaagttaagtcacactaagatgcgagccgagaagcgattcatctacgcgataatagattatggagcaaacattaacgcggttacacacttaccttcaacagtataccaaacatagtcctcgtgtggtgtatgctcttttatctcgaggagccgatacgaggatacgtaataatcttgattgtacacccatcatggaacgattgtgcaacaggtcatattctcataatgttactcaattggcacgaacaaaaggaagaaggacaacatctactttatctattcataaaacataatcaaggatacactctcaatatactacggtatctactagataggttcgacattcagaaagacgaatactataataccgcctttcaaaattgtaacaacaatgttgcctcatacatcggatacgacatcaaccttccgactaaagacggtattcgacttggtgtttgaaaacagaaacatcatatacaaggcggatgttgtgaatgacatcatccaccacagactgaaagtatctctacctatgattaaatcgttgttctacaagatgtcagaattctctccctacgacgattactacgtaaaaaagatactagcctactgcctattaagggacgagtcattcgcggaactacatagtaaattctgtttaaacgaggactataaaagtgtatttatgaaaaatatatcattcgataagatagattccatcatcgtgacataagtcgccttaaagagattcgaatctccgacaccgacctgtatacggtatcacagctatcttaaagccatacattcggacagacacatttcatttcccatgtacgacgatctcatagaacagtgccatctatcgatggagcataaaagtaaactcgtcgacaaagcactcaataaattagagtctaccatcggtcaatctagactatcgtatttgcctccggaaattatgcgcaatatcatctaaacagtatgttgtacggaaagaaccattacaaatattatccatgatagaaagaaaatatctatatgattggagaagtaggaaacaggaacaagacgacgattactacattattaaatcatgaagtccgtattatactcgtatatattgtttctctcatgtataataataaacggaagagatatagcaccgcatgcaccatccgatggaaagtgtaaagacaacgaatacaaacgccataatttgtgtccgggaacatacgcttccagattatgcgatagcaagactaacacacgatgtacaccctgtggttcgggtaccttcacatctcgcaataatcatttacccgcttgtctaagttgtaacggaagacgcgatcgtgtaacacgactcacaatagaatctgtgaatgctctcccggatattattgtcttctcaaaggatcatccggatgcaaggcatgtgtttcccaaacaaaatgtggaataggatacggagtatccggagacgtcatctgttctccgtgtggtctcggaacatattctcacaccgtctcttccgcagataaatgcgaacccgtacccagtaatacctttaactatatcgatgtggaaattaatctgtatcccgtcaacgacacgtcgtgtactcggacgaccactaccggtctcagtgaatccatctcaacgtcggaactaactattactatgaatcataaagactgtaatcccgtatttcgtgaggaatacttctctgtccttaataaggtagcaacttcaggtttctttacaggagaaaggtgtgcactctgaatttcgagattaaatgcaataacaaagattcttcctccaaacagttaacgaaagcaaagaatgatgacggtatcatgccgcattcggagacagtaactctagtgggcgactgtatatctagcgtcgacatctatatactatatagtaataccaatactcaagactacgaaactgatacaatctcttatcatgtgggtaatgttctcgatgtcgatagccatatgcccggtagttgcgatatacataaactgatcactaattccaaacccacccgctttttatagtaagtttttcacccataaataataaatacaataattaatttctcgtaaaagtagaaaatatattctaatttattgcatggtaaggaagtagaatcataaagaacagtactcaatcaatagcaattatgaaacaatatatcgtcctggcatgcatgtgcctgccagtcttcagcaatcatcctcatcctcatcctcgtgtacggaagaagaaaacaaacatcatatgggaatcgatgttattatcaaagtcacaaagcaagaccaaacaccgaccaatgataagatttgccaatccgtaacggaaattacagagtccgagtcagatccaaatcccgaggtggaatcagaagatgattccacatcagtcgaggatgtagatcctcctaccacttattactccatcatcggtggaggtctgagaatgaactttggattcaccaaatgtcctcagattaaatccatctcagaatccgctgatggaaacacagtgaatgctagattgtccagcgtgtccccaggacaaggtaaggactctcccgcgatcactcatgaagaagctcttgctatgatcaaagactgtgaggtgtctatcgacatcagatgtagcgaagaagagaaagacagcgacatcaagacccatccagtactcgggtctaacatctctcataagaaagtgagttacgaagatatcatcggttcaacgatcgtcgatacaaaatgtgtcaagaatctagagtttagcgttcgtatcggagacatgtgcaaggaatcatctgaacttgaggtcaaggatggattcaagtatgtcgacggatcggcatctgaaggtgcaaccgatgatacttcactcatcgattcaacaaaactcaaagcgtgtgtctgaatcgataactctattcatctgaaattggatgagtagggttaatcgaacgattcaggcacaccacgaattaaaaaagtgtaccggacactatattccggtttgcaaaacaaaaatgttcttaactacattcacaaaaagttacctctcgcgacttcttctttttctgtctcaatagtgtgatacgattatgacactattcctattcctattcctatttcctttcagggtatcacaaaaatattaaacctctttctgatggtctcataaaaaaagttttacaaaaatatttttattctctttctctctttgatggtctcataaaaaaagttttacaaaaatatttttattctctttctctctttgat

SEQ ID NO: 5 - DNA, 196285 bp, Vaccinia virus
  source 1..196285: mol_type = other DNA
  misc_feature 1..196285: note = VIR27
atcaaagagagaaagagaataaaaatatttttgtaaaactttttttatgagaccatcaaagagagaaagagaataaaaatatttttgtaaaactttttttatgagaccatcagaaagaggtttaatatttttgtgataccctgaaaggaaataggaataggaataggaatagtgtcataatcgtatcacactattgagacagaaaaagaagaagtcgcgagaggtaactttttgtgaatgtagttaagaacatttttgttttgcaaaccggaatatagtgtccggtacacttttttaattcgtggtgtgcctgaatcgttcgattaaccctactcatccaatttcagatgaatagagttatcgattcagacacacgctttgagttttgttgaatcgatgagtgaagtatcatcggttgcaccttcagatgccgatccgtcgacatacttgaatccatccttgacctcaagttcagatgattccttgcacatgtctccgatacgaacgctaaactctagattcttgacacattttgtatcgacgatcgttgaaccgatgatatcttcgtaactcactttcttatgagagatgttagacccgagtactggatgggtcttgatgtcgctgtctttctcttcttcgctacatctgatgtcgatagacacctcacagtctttgatcatagcaagagcttcttcatgagtgatcgcgggagagtccttaccttgtcctggggacacgctggacaatctagcattcactgtgtttccatcagcggattctgagatggatttaatctgaggacatttggtgaatccaaagttcattctcagacctccaccgatgatggagtaataagtggtaggaggatctacatcctcgactgatgtggaatcatcttctgattccacctcgggatttggatctgactcggactctgtaatttccgttacggattggcaaatcttatcattggtcggtgtttggtcttgctttgtgactttgataataacatcgattcccatatgatgtttgttttcttcttccgtacacgaggatgaggatgaggatgattgctgaagactggcaggcacatgcatgccaggacgatatattgtttcataattgctattgattgagtactgttctttatgattctacttccttaccatgcaataaattagaatatattttctacttttacgagaaattaattattgtatttattatttatgggtgaaaaacttactataaaaagcgggtgggtttggaattagtgatcagtttatgtatatcgcaactaccgggcatatggctatcgacatcgagaacattacccacatgataagagattgtatcagtttcgtagtcttgagtattggtattactatatagtatatagatgtcgacgctagatatacagtcgcccactagagttactgtctccgaatgcggcatgataccgtcatcattctttgctttcgttaactgtttggaggaagaatctttgttattgcatttaatctcgaaattcagagtgcacacctttctcctgtaaagaaacctgaagttgctaccttattaaggacagagaagtattcctcacgaaatacgggattacagtctttatgattcatagtaatagttagttccgacgttgagatggattcactgagaccggtagtggtcgtccgagtacacgacgtgtcgttgacgggatacagattaatttccacatcgatatagttaaaggtattactgggtacgggttcgcatttatctgcggaagagacggtgtgagaatatgttccgagaccacacggagaacagatgacgtctccggatactccgtatcctattccacattttgtttgggaaacacatgccttgcatccggatgatcctttgagaagacaataatatccgggagagcattcacagattctattgtgagtcgtgttacacgatcgcgtcttccgttacaacttagacaagcgggtaaatgattattgcgagatgtgaaggtacccgaaccacagggtgtacatcgtgtgttagtcttgctatcgcataatctggaagcgtatgttcccggacacaaattatggcgtttgtattcgttgtctttacactttccatcggatggtgcatgcggtgctatatctcttccgtttattattatacatgagagaaacaatatatacgagtataatacggacttcatgatttaataatgtagtaatcgtcgtcttgttcctgtttcctacttctccaatcatatagatattttctttctatcatggataatatttgtaatggttctttccgtacaacatactgtttagatgatattgcgcataatttccggaggcaaatacgatagtctagattgaccgatggtagactctaatttattgagtgctttgtcgacgagtttacttttatgctccatcgatagatggcactgttctatgagatcgtcgtacatgggaaatgaaatgtgtctgtccgaatgtatggctttaagatagctgtgataccgtatacaggtcggtgtcggagattcgaatctctttaaggcgacttatgtcacgatgatggaatctatcttatcgaatgatatatttttcataaatacacttttatagtcctcgtttaaacagaatttactatgtagttccgcgaatgactcgtcccttaataggcagtaggctagtatcttttttacgtagtaatcgtcgtagggagagaattctgacatcttgtagaacaacgatttaatcataggtagagatactttcagtctgtggtggatgatgtcattcacaacatccgccttgtatatgatgtttctgttttcaaacaccaagtcgaataccgtctttagtcggaaggttgatgtcgtatccgatgtatgaggcaacattgttgttacaattttgaaaggcggtattatagtattcgtctttctgaatgtcgaacctatctagtagataccgtagtatattgagagtgtatccttgattatgttttatgaatagataaagtagatgttgtccttcttccttttgttcgtgccaattgagtaacattatgagaatatgacctgttgcacaatcgttccatgatgggtgtacaatcaagattattacgtatcctcgtatcggctcctcgagataaaagagcatacaccacacgaggactatgtttggtatactgttgaaggtaagtgtgtaaccgcgttaatgtttgctccataatctattatcgcgtagatgaatcgcttctcggctcgcatcttagtgtgacttaacttgtaataattgcttttgtagaacgtggatatgtgtttacagtagtaatgaagagaagtgagtccatcctcgtcgacgcaattagggtcggatcctttgtacagaacgtaatagtttaagctcccattgaatttatatctaagataacacagcaatagatcggatgatttactaaagtcatcaatggtgtccgttagtatatcaaagatcttgttatcgattgatagtgaatgaatcagatagtggtgtagaggaatatgtcctttttcatccttgctatcaaagttacgcatgccgtggtgtaacaatatctttaatacagatggattaaatcgtgtattcatcgtatagcaatgtaatggagagttacctcgtttattcagatcgcagtgtttaataactagcttaaacagatgagacgatgtatccacatcaaagaacgtaaaatacatatgacaaacattgttgacagaaacgtgaccttcattcttaccgtcgtccataaatacgttaggtatgtaccacatactgtcgcgaacgatgcgtacaatctcgtccatctcataatgatttactttttcataattaaagatgtgaaagaaaaccgaacaatatatttttttagtaatgtttatgcgagacatataaaataaactccgtgtttatgatgccggtaaatgtttttatcatcttggacggaatcgattttgtaatatgtcatggaaacaaatgaaacaggacattatcgctccatgataaattatttaatggagtaataaagtatctccatgggtaatttcgaaatcaagttatcgtctgtattaatgttgtccactatggagtcgatcctctcattgttctttacagtttctgtaatgatggacgttagttcttttttgtaccatttgatgtcggattctttgcgtatctcaatctgtggcgtttgcttcgtttaaataatatatcaaacatggagacgcctgatatgtaggcattcttcattctattaatgtctactctatagcgctttagttccttatgacgaccggagatatcatacttactttagaaggaaaatcatcatctaggattaaggcgtatctgatacaggcgaataatggttcaggatatagatagcgtatatctctattaaatgcgtcaatcatagtctctagagtgggatggtagctaagtaataaatcaactatcctcgttttgttttctcttctgtaactacttttctggatggccgtattgattatcgagcgtgatgttgtaacactcgctccatattccaataaccgctttgcaaattgtatattattgacatcgaccgcgtaatatagtagagttttattctcattatcgatcatatctatattatccatgtacttgcttagtatatcaaatacatctattagtatggtttcataacagtgatacccgcaattattaaatctcgataatatcagaccgtacatacatagacggccattgttcgatacgtgatttacagccatgtgtccattattttccacgataaaccttacgacgtttacatcgacgagattattattaacaaagtagtcgtgcagaggatagttgttgtccgttatctaacatgcatcgaacgaccatatcgccgtaatgtaagtagtttatcaacatggcttgtacgatggattcatcctgttgtctaaatctctttagaatgttatcgatgatgtagtggttatagtctctggaatcgtaagaagtaatactacgcattacgtcgacaagagtatgacgtctctcaataagaagattaacgatttccatgtctacattatatggggttactctaaatcgcttgtttagataatccgcctctaatatagggctgacgtcgtatactctacacgtgtccacatcctttattaataatttaacaatctctatatctatggttgagcaagaccagtagtattggatgggtaaagatcctccttcgtctctgccatggatggaaacattgttattgatcaaacatttaattacatccttggatagagattgagattctctatgagacgatatatagtaatgaagagagttcttacacatatcactgtcgtacatacaggtacgaaatacgtaaccggtgctgtaacattctgatttaagaagccatagcaatacttctggtctcggattaggcgtcgttacgtatatatccaccaatccgagaccattgattgcataattcgtattcttggacggacgtatccgtttatccacaattaggtattttagcagacgtaagtcgatattatccgaagacatatacgaatacagatcgaaatcatttatattcgacttgagttcgttagaggaattcgaatagctggatatcagtagatgcacaatttgagattttacgtatctatgcttactgtatgctcctagcggagttaatccttcgttgtttctacaaagtctctcgactccgcgagagagtaacagtcgaacaatcttaatgtctgtatcgcatttattgaagacgtaacaatgtagcgcattgtttcctcgtctatctatatgttttgataagttgtgacacgtttcaatttctagttttatttttttgtacgtcacatcttcatccagtagacgacatagaatacatgtgcaatccatagctattctggtgctaattattcctatttcacgaaaaatgatgaaggcaatcattcctcataagatgataaaaagtgtagtgagagagcatgaaggagatttagtatttagcagtgcggatatgatccaagagggtgagatagtcgttctcgttcagaatctttcgcagcataagtagtatgtcgatatacttatcgttgaagactcttccagagacgatagctgattgagtacaaagtccaatgattgcacgaagttcttcggcggttttcatggagtcatttctgatgaaacatttaatgatctccacgcaattgtcgatattgtcccacggaagtgaatccttcaactcaccaccaaagagctccgttgcatcagttctgaaagagatgagaagcctgtagagagaccctgcgctttctctatgggtccatctatgagaaacccacaggatgtattcagtcagacaatgtctgacgtcggccacggtattcagggagtccttagtagcgtggcaatgacagggtctgaactgggcacaaggagaggccattgtaaaggtagacctgtagccgtttatgctaatagagggctttaatttccatttttttaatgggttgtggatgaggaatgagagtgatatcatattgagatacgtagttatgtagaggtgtatttcctatattatttactttcggtttcatattttaccaactctttaataaatttcttttcacgatgcatcttattaaatgacgttttctcataagtggacatatagatgcagaagtaatgaagaaaagtattacctctatcatctacataattagggtctgctcctttttttaacaacttatacagtacgtagtagtagtttatcggttttaaatcaagtctagaatatatagtggattaatatatttttatattagctaaagctatctatactatcagaaagcatatcattctcaacttcatcatgagttaaatatttgtgtaatggatgtcatgaacattaaacgtattcatgacatactcctttaataggttttttaaaacagatgattcaaatccttcattcattagataacagtgtaacggagtcgtaccttctactagtttgtttatatcacagcattctacaaacagtctaaacaatagagaagacggacagactttaacgtataaatgacacatgttatcgatattcgttgatgaattattattaaacgtagttatgataaatgattctaacgacatctctcgctagagataaaatctagtatcgtatcattaaacatctttgcatcatactcgcatagcatagtttttcataattaatacaatatttaaaagacttattcggaaagtattttaatacatgtatcatcgatggagatccatatgaggagtcacttgtagttcttcagtagtaataacagtgctatcatcgatagtataattatatgtagaaggttcatatgttgttgtaattggagtaactgttggtagttcttccgtggaatcaataattatactaacagcaatagtataattatataaatatgttccgttgatatcacatattttaatgaactcatttctaacaccctcagctatatctgtccaattaaatgtagccaacaatctactacgttctctttgattgactacttgtacggtagcgacgctacactatctttattgtcttctacatgctccaattgaatgtcatgatacaacgcagtttttcttatgcatgtttcataacaccacgaacatgtcgcagtaagatatatagccagagataatttctgtaaattcatgattgccggtcataaacaagcccgtcaataattgtggctatatattcagtttatagagcaaaataattaagcacaatagcgcttaatctcaaaatatgttatgtttatttttttcatattaaacatactggttaaaatcctctaaaggctgatcttcatctataaatcaagatcataattacatttagacagtggtttcatgtttataaaaatgttctttttgtgtgaataaggaatatactaatcaataatcaaccatcgaccccattacgatagtatgcaggcaaccccccattagagaggtacgtgtaatcagtctctccagttttagtatttttataagtcattgttacataaacggcttttaaacagtctcctcgataataagccatatctggaaatttattaaatactcgagtcattttacgcacggtcaaaaaagtaagtaatgtcgacgacttcttacattctatagaaacacctagaatactcattttcttttggaaaatatcctcagactctgatttgaacaatgcacgacctatagtaaaccgtgaccaataagttatattagtcaatggtatatccaaaccatcaggtgtggatagtacgccgatagtccagtctttggtatcgatagtgtagttattgaactgagaagttaccgtatagtctttttggtcatctctaaacaaggaaactaatacctctacactattgaacgatttatcttccgtaatgggtggaataacgggaatataaagtggactagcgatggatgaagtcacgaatataagacacgctattaatccgtatatcatcattttgatattacttataataacgatttgtttaatttttagtttatactattaattgtaaatgatattattatttttttaagtattatcagctttagtttatactattactatttgtaatatttagacatagataaacgtgataaaagtctatttgtttatatttattgcggatagcagtatttccctataaaaagtatacgtcctgtgttgtctttaatcatgtacatgaatggatggtttatgtagaccttcgtacgatataccatcgaaaagttagtcataaatactcctgtaacggccgatgcttctgtatactcctcattaacatctataaacgtcgtatgtagaaatttttctacagtgatagtttcattacacatcttgctaaaatctgcataatatccgaatatattagtaagtcctaaattttctaaaatcggtaccagattatacggttctgtcatttccactttaaactttggcatatacaagtctatacttttagtagataacataccacaccattttttaaatttttcatctgttatatttttttctatgttatatataccttctatgtcgtccggtagtataattaccatactagagtttccctcgtatggaatatcgataatagagaatcctccgaataattcattaatatgtacatattgcaagttattctcggtacccaccatcatatcaacactggtaactatattcttagaaatataaaacttgtctgtatatgtaagatgtttagaaaatggatatttccacattgctttaaaatggacggcgctaacaactgtcatacgagtattaatggatagcggactagtcaataaggaattaattttaccatttgtcatcgtcttaacccattcgttgattagttcctttgtttggttagcattattaaagtttacagtttgaaaatcgtcttttattttttgtaggaaggaggcgtggaactcgatactatcgctaccgtatattttatttgcggtagctagtgtcgcacaatacggaatatctacgtccatgtcattattgtcatccttcttatcatcgggtgtattctcattcatattctctatatattttgatagttgttcagctgtagaaccagctgctccatgatttagaatagataaagtagataaaatagaaactggagaaatcaaaacattttcatcagggtgttttaagattagttctttaaagatatccatggtatagaccaaacaataacgataacgatatatatcataaataaataatgttaaatttcagtttatgtttgtaccccgtattcatacttaacaaattggtattgcgtacacaatcaatcatattacataccattaataatgcaagcataaaaaatcgttagtagatgtttctaaatataggttccgtaagcaaagaatataagaatgaagcggtaatgataaaatcaatcgttatctaaaatgatcatactcatttattttattctattatattaacacatacatttttaacagcaacacattcaatattgtattgttatttttatattatttacacaattaacaatatattattagtttatattactgaattaataatataaaattcccaatcttgtcataaacacacactgagaaacagcataaacacaaaatccatcaaaaatgtcgatgaaatatctgatgttgttgttcgctgctatgataatcagatcattcgccgatagtggtaacgctatcgaaacgacattgccagaaattacaaacgctacaacagatattccagctatcagattatgcggtccagagggagatggatattgtttacacggtgactgtatccacgctagagatatcgacggtatgtattgtagatgctctcatggttatacaggcattagatgtcagcatgtagtattagtagactatcaacgttcagaaaaaccaaacactacaacgtcatatatcccatctcccggtattgtgcttgtattagtaggcattattattatgtgttgtctattatctgtttataggttcactcgaagaactaataaactacctctacaagatatggttgtgccataatttttataaatttttttatgagtatttttacaaaaaaaatgtataaagtgtatgtcttatgtatatttataaaaatgctaagtatgcgatgtatctatgttatttgtatttatctaaacaatacctctacctctagatattatacaaaaattttttatttcggcatattaaagtaaaatctagttaccttgaaaatgaatacagtgggtggttccgtatcaccagtaagaacataatagtcgaatacagtatccgattgagattttgcatacaatactagtctagaaagaaatttgtaatcattttctgtgacgggagtccatatatctgtatcatcgtctagtttatcagtgtcccatgctatatttctgttatcatcattagttaatgaaaataactctcgtgcttcagaaaagtcaaatattgtatccatacatacatctccaaaactatcgcttatacgtttatctttaacgatacctatacctagatggttatttactaacagacattttccagatctattgactataactcctatagtttccacatcaaccaagtaatgatcatctattgttatataacaataacataactcttttccatttttatcagtatgtatatctatatcaacgtcgtcgttgtagtgaatagtagtcattgatctattatatgaaacggatatgtctagaacggcaattgtcttacgtccagttaacactttcgttgatttaaagtctagagtctttgcaaacataatatccttatccgactttatatttcctgtagggtggtataattttattttgcctccacatatcggtgtttccaaatatattactagacaatattccatatagttattagttaagggtacccaattagaacacgtacgcttattatcatcatttggatcgtatttcataaaagttattgtactatcgatgtcaacacattctacattttttaatcgtctatatagtatttttctgatattttctataatatcagaattgtcttccatcggaagttgtatactatcggaatcagttacatgtttaaataattctctgatgtcattccttatacaatcaaattcattattaaacagtttaatagtctgtagacctttatcgtcgtaaatatccattgtcttattagttacgcttatttttatgtgttttacgttgctttattatattttataagaatgattgtttgacgaatcacgagaactattaagacacattattaggtatatattataaaaaagtttttgattacgatgttataagaggaaagaggacacattaacatcatacatcaattaactacattcttataacatcgtaatcaaaagaattgcaattttgatgtataacaactgtcaatgggttatggaattgtatattacatattatacggtatgttggtaacgacaaataccgatcggtaatcgtttgccggtgtaatagaattatatatatctatctattacaccggctgagtatacataataataagttgtggtagtatgatctccatatttataatttaggactttgtattcagtatttttggaatcataaaaaataaaaaaaagttttactaatttaaaatttaaaaagtatttacatttttttcactgtttagtcgcggatatggaattcgatcctgccaaaatcaatacatcatctatagatcatgtaacaatattacaatacatagatgaaccaaatgatataagactaacagtatgcattatccgaaatattaataacattacatattatatcaatatcacaaaaataaatacacatttggctaatcaatttcgggcttggaaaaaacgtatcgccggaagggactatatgactaacttatctagagatacaggaatacaacaatcaaaacttactgaaactatacgtaactgtcaaaaaaatagaaacatatatggtctatatatacactacaatttagttattaatgtggttattgattggataaccgatgtgattgttcaatcaatattaagagggttggtaaattggtacatagctaataatacctatactccaaatacacccaataatacaacaaccatttctgagttggatatcatcaaaatactaaataaatacgaggacgtgtatagagtaagtaaagaaaaagaatgtggaatttgctatgaagttgtttactcaaaacgattagaaaacgatagatactttggtttattggattcgtgtactcatatattttgcataacatgcatcaatatatggcataaaacacgaagagaaaccggtgcgtcggataattgtcctatatgtcgtacccgttttagaaacataacaatgagcaagttctataagctagttaactaataaataaaaagtttaatttgttgacgacgtatgtcgttattttttctcgtataaaagattaatttgattctaatataatctttagtattggataaatatcaattcaaattaattccattagattatatcataaataaaaatagtagcacgcactacttcagccaaatattcttttttgaaacgccatctatcgtagtgaggacacaagtgaacctataatgagcaaatttattagtatcggttacatgaaggactttacgtagagtggtgattccactatctgtggtacgaacggtttcatcttctttgatgccatcacccagatgttctataaacttggtatcctcgtccgatttcatatcctttgccaaccaatacatatagctaaactcaggcatatgttccacacatcctgaacaatgaaattctccagaagatgttacaatgtctagatttggacatttggtttcaaccgcgttaacatatgagtgaacacacccatacatgaaagcgatgagaaataggattttcatcttgccaaaatatcactagaaaaaatttatttatcaattttaaaggtataaaaaatacttattgttgctcgaatattttgtatttgatggtatacggaagattagaaatgtaggtattatcatcaactgattctatggttttatgtattctatcatgtttcactattgcgttggaaataatatcatatgcttccacatatattttattttgttttaactcataatactcacgtaattctggattattggcatatctgtgaataattttagctccatgatcagtaaatattaatgagaacatagtattaccacctaccattatttttttcatttcgttcaattcttgattgcaaagatctatataatcattatagcgttgacttatggactctggaatcttagacgatgtacagtcatctataatcatggcatatttaatacattgttttatagcatagtagttatctacgatgttagatatttctctcaatgaatcaatcacacaatctaatgtaggtttatgacataatagcattttcagcagttcaatgtttctagattcgttgatggcaatggctatacatgtatatccgttatttgatctaatgttgacatctgaaccggattctagcagtaaagatactagagattgtttattatatctaacagccttgtgaagaagtgtttctcctcgtttgtcaatcatgttaatgtctttaagataaggtaggcaaatgtttatagtactaagaattgggcaagcataagacatgtcacaaagaccctttttgtatgtataagtgtagaaattataacatccatagttggatttacataggtgtccaatcgggatctctccatcatcgagatgattgacggcatctcccccttccttttttagtagatatttcatcgtgtaagaatcaatattaatatttctaaagtatccgtgtatagcctctttatttaccacagctccatattccaacatgcattccactaaagggatatcgatatcgccgaatgtcatatactcaattagtatatgttggaggacatccgagttcattgttttcaatatcaaagagatggtttccttatcatttctccatagtggtacaatactacacattattccgtgaggctttccattctccaaaaacaatttgaccaaatctacatctttattgtatctataatcactatttagataatcagccataattcctcgagtgcaacatgttagatcgtctatatatgaataagccgtgttatctattcctttcattaacaatttaacgatgtctatatctatatgagatgacttaatataatattgaagagctgtacaatagtttttatctatagaagacggcttgattccgtgattaattagacatttaacaacttccggacgcacatatgctctcgtatccgactctgaatacagatgagagatgatatacagatgcaatacggtaccgcaatttcgtagttgataatcatcatacgcgtatccgtactcgtcctcataaagaacactgcagccattttctatgaacaaatcaataattttaggaacaggatcattgtcattacataattttctataactgaacgatggttttcacatttaacactcaagtcaaatccatgttctaccaacacctttatcaagtcaacgtctacatttttggatttcatatagctgaatatattaaagtcatttatgttgctaaatccagtggcttctagtagagccatcgctatatcctttaactttaacatgtctactatttgtgtattcttctaatggggtagctgtctccaatttttgcgtaatggattagtgccactgtctagtagtagtttgacgacctcgacattattacaatgctcattaaaaaggtatgcgtgtaaagcattattcttgaattggttcctggtatcattaggatctctgtctctcaacatctgtttaagttcatcgagagccacctcctcattttccaaatagtcaaacattttgactgaatagaagtgaatgagctactgtgaactctatacacccacacaactaatgtcattaaatattatttttttgaatgtatttataccatgtcaaaaacttgtacaattattaataaaaataatttagtgtttaaattttaccagttccagattttacacctccgttaaccccactttttacaccactggacgaccctcctccccacattccaccgccaccagatgtataagttttagatcctttattactaccatcatgtccatggataaagacactccacatgccgccactaccccctttagaagacatattaataagacttaagagttaaggacaagtttaacaataaaattaatcacgagtaccctactaccaacctacactattatatgattatagtttctatttttacagtaccttaactaaagtttctagtcacaagagcaatactaccaacctacactattatatgattatagtttctatttttataggaacgcgtacgagaaaatcaaatgtctaatttctaacggtagtgttgataaacgattatcgtcaatggatacctcctctatcatgtcgtctattttcttactttgttctattaacttattagcattatatattatttgattataaaacttatattgcttattagcccaatctgtaaatatcggattattaacatatcgtttctttgtaggtttatttaacttgtacatcactgtaagcatgtccgtaccatttattttaatttgacgcatatccgcaatttctttttcgcagtcggttataaattctatatatgatggatacatgctacatgtgtacttataatcgactaatatgaagtacttgatacatattttcagtaacgatttattattaccacctatgaataagtacctgtgatcgtctaggtaatcaactgttttcttaatacattcgatggttggtaatttactcagaataatttccaatatcttaatatataattctgctatttctggaatatatttatctgccagtataacacaaatagtaatacatgtaaacccatattttgttattatattaatgtctgcgccattatctattaaccattctactaggctgacactatgcgacttaatacaatgataaagtatactacatccatgtttatctattttgtttatatcatcaatatacggcttacaaagttttagtatcgataacacatccaactcacgcatagagaaggtagggaataatggcataatatttattaggttatcatcattgtcattatctacaactaagtttccattttttaaaatatactcgacaactttaggatctctattgccaaatttttgaaaatatttatttatatgcttaaatctatataatgtagctccttcatcaatcatacatttaataacattgatgtatactgtatgataagatacatattctaacaatagatcttgtatagaatctgtatatcttttaagaattgtggatattaggatattattacgtaaactattacacaattctaaaatataaaacgtatcacggtcgaataatagttgatcaactatataattatcgattttgtgatttttcttcctaaactgtttacgtaaatagttagatagaatattcattagttcatgaccactatagttactatcgaataacgcgtcaaatatttcccgtttaatatcgcatttgtcaagataataatagagtgtggtatgttcacgataagtataataacgcatctctttttcgtgtgaaattaaatagtttatcacgtccaaagatgtagcataaccatcttgtgacctagtaataatataataatagagaactgttttacccattctatcatcataatcagtggtgtagtcgtaatcgtaatcgtctaattcatcatcccaattataatattcaccagcacgtctaatctgttctattttgatcttgtatccatactgtatgttgctacatgtaggtattcctttatccaataatagtttaaacacatctacattgggatttgatgttgtagcgtatttctctacaatattaataccatttttgatactatttatttctatacctttcgaaattagtaatttcaataagtctatatcgatgttatcagaacatagatattcgaatatatcaaaatcattgatatttttatagtcgactgacgacaataacaaaatcacaacatcgtttttgatattattatttttcttggtaacgtatgcctttaatggagtttcaccatcatactcatataatggatttgcaccactttctatcaatgattgtgcactgctggcatcgatgttaaatgttttacaactatcatagagtatcttatcgttaaccatgattggttgttgatgctatcgcattttttggtttctttcatttcagttatgtatggatttagcacgtttgggaagcataagctcatatgatttcagtactgtagtgtcagtactattagtttcgatcagatcaatgtctagatctatagaatcaaaacacgataggtcagaagataatgaatatctgtaggcttcttgttgtactgtaacttctcgttttgttagatggttgcatcgtgctttaacatcaatggtacaaattttatcctcgctttgtgtatcatattcgtccctactataaaattgtatattcagattatcatgagatgtgtatacgctaacggtatcaataaacggagcacaccatttagtcataaccgtaatccaaaaatttttaaagtatatcttaacgaaagaagttgtgtcattgtctacggtgtatggtactagatcctcataagtgtatatatctagagtaatgtttaatttatcaaatggttgataatatggatcctcatggcaatttcctaagacgaaaataagacataaacacgcaataaatctaattgcggacatggttactccttaaaaaaatactaataatcaccttggctatttagtaagtgtcatttaacactatactcatattaatccatggactcataatctctatacgggattaacggatgttctatatacggggatgagtagttctcttctttaactttatactttttactaatcatatttagactgatgtatgggtaatagtgtttgaagagctcgttctcatcatcagaataaatcaatatctctgtttttttgttatacagatgtattacagcctcatatattacgtaatagaacgtgtcatctaccttattaactttcaccgcatagttgtttgcaaatacggttaatcctttgacctcgtcgatttccgaccaatctgggcgtataatgaatctaaactttaatttcttgtaatcattcgaaataatttttagtttgcatccgtagttatcccctttatgtaactgtaaatttctcaacgcgatatctccattaataatgatgtcgaattcgtgctgtatacccatactgaatggatgaacgaataccgacggcgttaatagtaatttactttttcatctttacatattgggtactagttttactatcataagtttataaattccacaagctactatggaataagccaaccatcttagtataacacacatgtcttaaagtttattaattaattacatgttgttttatatatcgctacgaatttaaacagagaaatcagtttaggaaaaaaaattatctatctacatcatcacgtctctgtattctacgatagagtgctactttaagatgagacatatccgtgtcatcaaaaatatactccattaaaatgattattccggcagcgaacttgatattggatatatcacaacctttgttaatatctacgacaatagacagcagtcccatggttccataaacagtgagtttatctttctttgaagagatattttgtagagatcttataaaactgtcgaatgacatcgcatttatatctttagctaaatcgtatatgttaccatcgtaatatctaaccgcgtctatcttaaacgtttccatcgctttaaagacgtttccgatagatggtctcatttcatcagtcatactgagccaacaaatataatcgtgtataacatctttgatagaatcagactctaaagaaaacgaatcggctttattatacgcattcatgataaacttaatgaaaaatgtttttcgttgtttaagttggatgaatagtatgtcttaataattgttattatttcattaattaatatttagtaacgagtacactctataaaaacgagaatgacataactaatcataactagttatcaaagtgtctaggacgcgtaattttcatatggtatagatcctgtaagcattgtctgtattctggagctattttctctatcgcattagtgagttcagaatatgttataaatttaaatcgaataacgaacataactttagtaaagtcgtctatattaactcttttattttctagccatcgtaataccatgtttaagatagtatattctctagttactacgatctcatcgttgtctagaatatcacatactgaatctacatccaattttagaaattggtctgtgttacatatctcttctatattattgttgatgtattgtcgtagaaaactattacgtagaccattttctttataaaacgaatatatagtactccaattatctttaccgatatatttgcacacataatccattctctcaatcactacatctttaagattttcgttgttaagatatttggctaaactatataattctattagatcatcaacagaatcagtatatatttttctagatccaaagacgaactctttggcgtcctctataatattcccagaaaagatattttcgtgttttagtttatcgagatctgatctgttcatatacgccatgattgtacggtacgttatgataaccgcataaaataaaaatccattttcatttttaaccaatactattcataattgagattgatgtaatactttgttactttgaacgtaaagacagtacacggatccgtatctccaacaagcacgtagtaatcaaatttggtgttgttaaacttcgcaatatttatcaatttagatagaaacttatactcatcatctgttttaggaatccatgtattattaccactttccaacttatcattatcccaggctatgtttcgtccatcatcgttgcgcagagtgaataattcttttgtattcggtagttcaaatatataatccatgcatagatcggtaaagctattgtagatgtgatttttcctaaatctaatataaaactcgtttactagcaaacactttcctgatttatcgaccaagacacatatggtttctaaatctatcaagtggtggggatccatagttatgacgcagtaacatagattattaccttcttaactgtcgctaatatctatatatttattgttatcgtattggattctgcatatagatggcttgtatgtcaaagatatagaacacataaccaatttatagtcgcgctttacattctcgaatctaaagttaagagatttagaaaacattatatcctcggatgatgttatcactgtttctggagtaggatatattaaagtctttacagatttcgtccgattcaaataaatcactaaataatatcccacattatcatctgttagagtagtatcattaaatctattatattttatgaaagatatatcactgctcacctctatatttcgtacatttttaaactgtttgtataatatctctctgatacaatcagatatatctattgtgtcggtagacgataccgttacatttgaattaatggtgttccattttacaacttttaacaagttgaccaattcatttctaatagtatcaaacgctccatgattaaatattttaatagtatccattttatatcactacggacacaaagtagctgacataaaccattgtataatttttatgttttatgtttattagcgtacacattttggaagttccggcttccatgtatttcctggagagcaagtagatgatgaggaaccagataggttatatccgtacttgcacttaaagtttacattgtcgttgtatgagtatgatcttttaaacccgctagacaagtatccgtttgatattgtaggatgtggacatttaacaatctgacacgtgggtggatcggaccattctcctcctgaacacaggacaccagagttaccaatcaacgaatatccactattgcaactataagttacaacgcttccatcggtataaaaatcctcgtatccgttatgtcttccgttggatatagatggaggggattggcatttaacagattcacaaataggtgcctcgggattccataccatagatccagtagatcctaattcacaatacgatttagattcaccgatcaaatgatatccgctattacaagagtacgttatactagagccaaagtctactccgccaatatcaagttggccattatcgatatctcgaggcgatgggcatctccgtttaatacattgattaaagagtgtccatccagtacctgtacatttagcatatataggtcccattttttgctttctgtatccaggtagacatagatattctatagtgtctcctatgttgtaattagcattagcatcagtctccacactattcttaaatttcatattaatgggtcgtgacggaatagtacagcatgatagaacgcatcctattcccaacaatgtcaggaacgtcacgctctccaccttcatatttatttatccgtaaaaatgttatcctggacatcgtacaaataataaaaagcccatatatgttcgctattgtagaaattgtttttcacagttgctcaaaaacgatggcagtgacttatgagttacgttacactttggagtctcatctttagtaaacatatcataatattcgatattacgagttgacatatcgaacaaattccaagtatttgattttggataatattcgtattttgcatctgctataattaagatataatcaccgcaagaacacacgaacatctttcctacatggttaaagtacatgtacaattctatccatttgtcttccttaactatatatttgtatagataattacgagtctcgtgagtaattccagtaattacatagatgtcgccgtcgtactctacagcataaactatactatgatgtctaggcatgggagacttttttatccaacgatttttagtgaaacattccacatcgtttaatactacatatttttcatacgtggtataaactccacccattacatatatatcatcgtttacgaataccgacgcgcctgaatatctaggagtaattaagtttggaagtcttatccatttcgaagtgccgtgtttcaaatattctgccacacccgttgaaatagaaaattctaatcctcctattacatataactttccattgttaacacaagtactaacttctgattttaacgacgacatattagtaaccgttttccattttttcgtttcaagatctacccgcgatacggaataaacatgtctattgttaatcatgccgccaataatgtatagacaattatgtaaaacatttgcattatagaattgtctatctgtattaccgactatcgtccaatattctgttctaggagagtaatgggttattgtggatatataatcagagtttttaatgactactatattatgttttataccatttcgtgtcactggctttgtagatttggatatagttaatcccaacaatgatatagcattgcgcatagtattagtcataaacttgggatgtaaaatgttgatgatatctacatcgtttggatttttatgtatccactttaataatatcatagctgtaacatcctcatgatttacgttaacgtcttcgtgggataagatagttgtcagttcatcctttgataattttccaaattctggatcggatgtcaccgcagtaatattgttgattatttctgacatcgacgcattatatagttttttaattccatatcttttagaaaagttaaacatccttatacaatttgtggaattaatattatgaatcatagtttttacacatagatctactacaggcggaacatcaattattatggcagcaactagtatcatttctacattgtttatggtgatgtttatcttcttccagcgcatatagtctaatagcgattcaaacgcgtgatagtttataccattcaatataatcgcttcatcctttagatggtgatcctgaatgcgtttaaaaaaattatacggagatgccgtaataatttccttattcacttgtataatttccccattgatagaaaatatcacgctttccattcttgaagtactataagtaattatagtataatgtaaaggtttatatattcaatattttttataaaaaaatcatttcgacattaattcctttttaaatttccgtctatcatctatagaaacatattctatgaatttataaaatgcttttacgtgtcctatcgtaggcgatagaaccgctaaaaagcctattgaatttctacaaaagaatctattatatggtatagggagagtataaaacattaaatgcccgtacttattaaagtattcagtagccaatcctaactctttcgaatacttattaatggctcttgttctgtacgaatctatttttttgaacaacggacctagtggtatatcttgttctatgtatctaaaataatgtctgactagatccgttagtttaatatcctcagtcatcttgtctagaatggcaaatctaactgcgggtttaggctttagtttagtttttatatctacatctatgtctttatctaacaccaaaaatataatagctaatattttattacaatcatccggatattcttctacgatctcactaactaatgtttctttggttatactagtatagtcactatcggacaaataaagaaaatcagatgatcgatgaataatacatttaaattcatcatctgtaagatttttgagatgtctcattaaaatattattagggtcagtactcattatcattaggcagctattacttattttattatttttcaccatatagatcaatcattagatcatcaaaatatgtttcaatcatcctaaagagtatggtgaatgactcttcccatctaatttctgaacgttcaccaatgtctctagccactttggcactaatagcgatcattcgcttagcgtcttctatattattaactggttgattcaatctatctagcaatggaccgtcggacagcgtcattctcatgttcttaatcaatgtacatacatcgccgtcatctaccaattcatccaacaacataagctttttaaaatcatcattataataggtttgatcgttgtcatttctccaaagaatatatctaataagtagagtcctcatgcttagtaatttaactattttagttaacaactattttttatgttaaatcaattagtacaccgctatgtttaatacttattcatattttagtttttaggattgagaatcaatacaaaaattaatgcatcattaattttagaaatacttagtttccacgtagttaatgaaacatttgaactcatcgtacaagacgttctcgtacaggacgtaactataaaccggtttatatttgttcaagatagatacaaatccgataactttttttacgaattctacgggatccactttaaaagtgtcataccgggttctttttatttttttaaacagatcaatggtgtgatgttgattaggtcttttacgaatttgatatagaatagcgtttacatattctccataatggtcaatcgccatttgttcgtatgtcataaattctttaattatatgacactgtgtattgtttagttcatccttgttcattgttaggaatctatccaaaatggcaattatactagaactataggtgcgttgtatacacatattgatgtgtctgtttatacaatccatgatatttggatccatgctactaccttcgggtaaaattgtagcatcatataccatttctagtactttaggttcattattatccattgcagaggacgtcatgatcgcatcctaaaaaaatatattatttttatgttattttgttaaaaataatcatcgaatacttcgtaagatactccttcatgaacataatcagttacaaaacgtttatatgaagtaaagtatctacgatttttacaaaagtccggatgcataagtacaaagtacgcgataaacggaataataatagatttatctagtctatctttttctatagctttcatagttagatacatggtctcagaagtaggattatgtaacatcagcttcgataaaatgactgggttatttagtcttacacattcgctcatacatgtatgaccgttaactacagagtctacactaaaatgattgaacaatagatagtctaccattgtttcgtattcagatagtacagcgtagtacatggcatcttcacaaattatatcattgtctaatagatatttgacgcatcttatggatcccacttcaacagccatcttaaaatcggtaaaatcatattgctttcctttatcattaataatttctaaaacatcatctctatcataaaagatacaaatattaactgtttgatccgtaataacattgctagtcgatagcaatttgttaataagatgcgctgggctcaatgtcttaataagaagtgtaagaggactatctccgaatttgttttgtttattaacatccgttgatggaagtaaaagatctataatgtctacattcttgactgttttagagcatacaatatggagaggtgtatttccatcatgatctggttttgagggactaattcctagtttcatcatccatgagattgtagaagcttttggattgtctgacataagatgtctatgaatatgatttttgccaaatttatccactatcctggcttcgaatccgatggacattatttttttaaacactctttctgaaggatctgtacacgccaacaacggaccacatccttcttcatcaaccgagttgttaatcttggctccatactgtaccaataaatttattctctctatgacttcatcatctgttcccgagagataatatagaggcgttttatgctgtttatcacacgcgtttggatctgcgccgtgcgtcagcagcatcgcgactattctattattattaattttagaagctatatgcaatggataatttccatcatcatccgtctcatttggagagtatcctctatgaagaagttcttcgacaaatcgttcatctagtcctttaattccacaatacgcatgtagaatgtgataattatttccagaaggttcgatagcttgtagcatattcctaaatacatctaaatttttactattatatttggcataaagagatagataatactcggccgacataatgttgtccattgtagtataaaaattaatatttctatttctatttctgtatatttgcaacaatttactctctataacaaatatcataacttagttcttttatgtcaagaaggcactggtttagttcatctataaatgtcacgccataactaccacgcatgctatactcagaattatgataaagatatttatccttggggtgtaggtaatggggattaatctttgttggatcagtctctaagttaacacatgtcacacatgatccatttatagttatatcacacgatgatgatttatgaattgattccggaagatcgctatcgtattttgtggttccacaattcatttccatacatgttattgtcacactaatattatgatgaactttatctagccgctgagtggtaaacaacagaacagatagtttattatctttaccaacaccctcagccgctgccacaaatctctgatccgtatccatgatggtcatgtttatttctagtccgtatccagtcaacactatgttagcatttctgtcgatatagctttcactcatatgacactcaccaataatagtagaattaatgtcgtaatttacaccaatagtgagttcggcggcaaagtaccaataccggtaatcttgtcgaggaggacatatagtattcttgtattctaccgaatacccgagagatgcgatacaaaagagcaagactaatttgtaaaccatcttactcaaaatatgtaacaatagtacgatgcaatgagtaagacaataggaaatctatcttatatacacataattattctatcaattttaccaattagttagtgtaatgttaacaaaaatgtgggagaatctaattagtttttctttacacaattgacgtacatgagtctgagttccttgtttttgctaattatttcatccaatttattattcttgactatatcgagatcttttgtataggagtcagacttgtattcaacatgcttttctataatcattttagctatttcggcatcatccaatagtacattttccagattagcagaatagatattaatgtcgtatttgaacagagcctgtaacatctcaatgtctttattatctatagccaatttaatgtccggaatgaagagaagggaattattggtgtttgtcgacgtcatatagtcgagcaagagaatcatcatatccacgtgtccattttttatagtggtgtgaatacaactaaggagaatagccagatcaaaagtagatggtatttctgaaagaaagtatgatacaatacttacatcattaagcatgacggcatgataaaatgaagttttccatccagttttcccatagaacatcagtctccaatttttcttaacaaacagttttaccgtttgcatgttaccactatcaaccgcataatacaatgcagtgtttcccttgtcatcaaattgtgaatcatccagtccactgaatagcaaaatctttactattttggtatcttccaatgtggctgcctgatgtaatggaaattcattctctagaagatttttcaatgctccagcgttcaacaacgtacatactagacgcacgttattatcagctattgcataatacaaggcactatgtccatggacatccgccttaaatgtatctttactagagagaaagcttttcagctgcttagacttccaagtattaattcgtgacagatccatgtctgaaacgagacgctaattagtgtatattttttcattttttataattttgtcatattgcaccagaattaataatatctctaatagatctgattagtagatacatggctatcgcaaaacaacatatacacatttaataaaaataatatttattaagaaaattcagatttcacgtacccatcaatataaataaaataatgattccttacaccgtacccatattaaggagattccaccttacccataaacaatataaatccagtaatatcatgtctaatgatgaacacaaatggtgtattaaattccagtttttcaggagatgatctcgccgtagctaccataatagtagatgcctctgctacagttccttgttcgtcgacatctatctttgcattctgaaacattttataaatatataatgggtccctagtcatatgtttaaacgacgcattatctggattaaacatactaggagccatcatttcggctatcgacttaatatccctcttattttcgatagaaaatttagggagtttaagattgtacactttattccctaattgaaacgaccaatagtctaattttgcagccgtaatagaatctgtgaaatgggtcatattatcacctattgccaggtacatactaatattagcatccttatacggaaggcgtaccatgtcatattctttgtcatcgattgtgattgtatttccttgcaatttagtaactacgttcatcatgggaaccgttttcgtaccgtacttattagtaaaactagcattgcgtgttttagtgatatcaaacggatattgccatgtacctttaaaatatatagtattaatgattgcccatagagtattattgtcgagcatattagaatctactacattagacataccggatctacgttctactatagaattaattttattaaccgcatctcgtctaaagtttaatctatataggccgaatctatgatattgttgataatacgacggtttaatacacacagtattatctacgaaactttgataagttagatcagtgtacgtatatttagatgttttcagcttagctaatcctgatattaattctgtaaatgctggacccagatctctttttctcaaatccatagtcttcaataattctattctagtattacctgatgcaggcaatagcgacataaacatagaaaacgaatagccaaacggcgagaagacaatattatcatcttgaatatttttatacgctactataccggcattggtaaatccttgcagacgataggtagacgctgaacacgttaacgatagtatcaataacgcaatcatgattttatggtattaataattaaccttatttttatgttcggtataaaaaaattattgatgtctacacatccttttgtaattgacatctatatatccttttgtataatcaactctaatcactttaacttttacagttttccctaccagtttatccctatattcaacatatctatccatatgcatcttaacactctctgccaagatagcttcagagtgaggatagtcaaaaagataaatatatagagcataatccttctcgtatactctgccctttattacatcgcccgcattgggcaacgaataacaaaatgcaagcatcttgttaacgggctcgtaaattgggataaaaattatgtttttatatctattttattcaagagaatattcaggaatttctttttccggttgtatctcgtcgcagtatatatcatttgtacattgtttcatattttttaatagtttacaccttttagtaggactagtatcgtacaattcatagctgtattttgaattccaatcacgcataaaaatatcttccaattgttgacgaagacctaatccatcatccggtgtaatattaatagatgctccacatgtatccgtaaagtaatttcctgtccaatttgaggtacctatataggccgttttatcggttaccatatatttggcatggtttaccctagaatacggaatgggaggatcagcatctggtacaataaatagctttacttctatatctatgtttttagattttagcatagcgatagatcttaaaaagtttctcatgataaacgaagatcgttgccagcaactaatcaatagcttaacggatacttgtctgtctatagcggatcttcttaattcatcttctatataaggccaaaacaaaattttacccgccttcgaataaataatagggataaagttcataacagatacataaacgaatttactcgcatttctaatacatgacaataaagcggttaaatcattggttctttccatagtacatagttgttgcggcgcagaagcaataaatacagagtgtggaacaccacttacgttaatactaagaggatgatctgtattataatacgacggataaaagtttttccaattatatggtagattgttaactccaagataccagtatacctcaaaaatttgagtgagatccgctgccaagttcctattattgaagatcgcaatacccaattctttgacctgagttagtgatctccaatccatgttagcgcttcctaaataaatatgtgtattatcagatatccaaaattttgtatgaagaactcctcctaggatatttgtaatatctatgtatcgtacttcaactccggccatttgtagtctttcaacatcctttaatggtttgttagatttattgacggctactctaactcttactcctcttttgggtaattgtacaatctcgtttaatattatcgtgccgaaattcgtacccacttcatccgataaactccaataaaaagatgatatatctagtgtttttgtggtattggatagaatttccctccacatgttaaatgtagacaaatatactttatcaaattgcatacctataggaatagtctctgtaatcactgcgattgtattatccggattcattttatttgttaaaaaataatcctatatcacttcactctattaaaaatccaagtttctatttctttcatgactgattttttaacttcatccgtttccttatgaagatgatgtttggcaccttcataaatttttatttctctattacaatttgcatgttgcatgaaataatatgcacctaaaacatcgctaatctcattgtttgttccctggagtatgagagtcgggggggtgttaatcttggaaattatttttctaaccttgttggtagccttcaagacctgactagcaaatccagccttaattttttcatgattgattaatgggtcgtattggtatttataaactttatccatatctctagatactgattctggacatagctttccgactggcgcatttggtgtgatggttcccataagtttggcagctagcagattcagttttgaaacagcatctgcattaactagaggagacattagaatcattgctgtaaacaagtttggattatcgtaagaggctagtatagaaattgttgctcccatggaatgacccaataagtagatttaatagttaccacgtgctgtaccaaagtcatcaatcatcattttttcaccattacttcttccatgtccaatatgatcatgtgagaatactaaaattcctaacgatgatatgttttcagctagttcgtcataacgtccagaatgtttaccagctccatgacttatgaatactaatgccttaggatatgtaataggtttccaatatttacaatatatgtaatcattgtccagattgaacatacagtttgcactcatgattcacgttatataactatcaatattaacagttcgtttgatgatcatattatttttatgttttattgataattgtaaaaacatacaattaaatcaatatagaggaaggagacggatactgtcttttgtgagatagtcatggcgactaaatcagattatgaggatgctgttttttactttgtggatgatgataaaatatgtagtcgcgactccatcatcgatctaatagatgaatatatcacgtggagaaatcatgttatagtgtttaacaaagatattaccagttgtggaagactgtacaaggaattgatgaagttcgatgatgccgctatacagtactatggtattgataaaattaatgagattgtcgaagctatgagcgaaggagaccactacatcaattttacaaaagtccatgatcaggaaagtttattcgctaccataggaatatgtgctaaaatcactgaacattggggatacaaaaagatttcagaatctagattccaatcattgggaaacattacagatctgatgaccgacgataatataaacatcttgatactttttctagaaaaaaaattgaattgatgatataggggtcttcataacgcataattattacgttagcattctatatccgtgttaaaaaaaattatcctatcatgtatttgagagttttatatgtagcaaacatgatagctgtgatgccaataagctttagatattcacgcgtgctagtgttagggatggtattatctggtggtgaaatgtccgttatataatctacaaaacaatcatcgcatatagtatgcgatagtagagtaaacatttttatcgtttctactgggttcatacatcgtctacccaattcggttatgaatgaaattgtcgccaatcttacacccaaacccttgttatccattagcatagtattaacttcgttatttatgtcataaactgtaaatgattctgtagatgccatatcatacatgatattcatgtccctattataatcattactaactttatcacaatatatgttgataatatctatatatgatctagtctttgtgggcaactgtctatacaagtcgtctaaacgttgtttactcatatagtatcgaacagccatcattacatggtcccgttccgttgatagataatcgagtatgttagtggacttgtcaaatctatataccatattttctggaagtggatatacatagtcgtgatcaacattattgctagcctcatcttctatatcctgtactataccattatctatatcatctacataatctacgatattattatacataaacatcgacaacatactattgtcaattatctaagtcctgttgatccaaacccttgatctcctctatctgtactatctagagattgtacttcttccagttctggataatatatacgttgatagattagctgggctattctatcccccgtatttacattaaacgtacattttccattattaataagaataactcctatgtttcccctataatcttcgtctattacaccgcctcctatatcaatgccttttagggacagaccagacctaggagctattctaccatagcagaacttaggcatggacatactaatatctgtcttaattaactgtcgttctccaggagggatagtataatcgtaagcgctatataaatcatatccggcggcgtaaggtgattgcctagtaggagatttagctctgttagtttccttaacaaatctaactggtgagttaatattcatgttgaacataaaactaatattttatttcaaaattatttaccatcccatatattccatgaataagtgtgatgattgtacacttctatagtatctatatacgattcacgataaaatcctcctatcaatagcagtttattatccactatgatcaattctggattatccctcggataaataggatcatctatcagagtccatgtattgctggattcacaataaaattccgcatttctaccaaccaagaataaccttctaccgaacactaacgcgcatgatttataatgaggataataagtggatggtccaaactgccactgatcatgattgggtagcaaatattctgtagttgtatcagtttcagaatgtcctcccattacgtatataacattgtttatagatgccactgctggattacatctaggtttcagaagactcggcatattaacccaagcagcatccccgtggaaccaacgctcaacagatgtgggatttggtagacctcctactacgtataatttattgttagcgggtatcccgctagcatacagtctggggctattcatcggaggaattggaatccaattgtttgatatataatttacagctatagcattgttatgtatttcattgttcatccatccaccgatgagatatactacttctccaacatgagtacttgtacacatatggaatatatctataatttgatccatgttcataggatactctatgaatggatacttgtatgatttgcgtggttgtttatcacaatgaaatattttggtacagtctagtatccattttacattatttatacctctgggagaaagataatttgacctgattacatttttgataaggagtagcagatttcctaatttatttcttcgctttatataccacttaatgacaaaatcaactacataatcctcatctggaacatttagttcatcgctttctagaataagtttcatagatagataatcaaaattgtctatgatgtcatcttccagttccaaaaagtgtttggcaataaagtttttagtatgacataagagattggatagtccgtattctatacccatcatgtaacactcgacacaatattcctttctaaaatctcgtaagataaagtttatacaagtgtagatgataaattctacagaggttaatatagaagcacgtaataaattgacgacgttatgactatctatatatacctttccagtatatgagtaaataactatagaagttaaactgtgaatgtcaaggtctagacaaacccttgtaactggatctttatttttcgtgtatttttgacgtaaatgtgtgcgaaagtaaggagataactttttcaatatcgtagaattgactattatattgccacctatagcatcaataattgttttgaatttcttagtcatagacaatgctaatatattcttacagtacacagtattaacaaatatcggcatttatgtttctttaaaagtcaacatctagagaaaaatgattatctttttgagacataactcccattttttggtattcacccacacgtttttcgaaaaaattagtttttccttccaatgatatattttccatgaaatcaaacggattggtaacattataaatttttttaaatcccaattcagaaatcaatctatccgcgacgaattctatatatgttttcatcatttcacaattcattcctataagtttaactggaagagccgcagtaagaaattcttgttcaatggatactgcatctgttataatagatctaacggtttcttcactcggtggatacaataaatgtttaaacatcaaacatgcgaagtcgcagtgtagaccctcgtctctactaattagttcgttggaaaacgtgagtccgggcattaggccacgctttttaagccaaaatatggaagcgaatgatccggaaaagaagattccttctactgcagcaaaggcaataagtctctctccataaccggcgctgtcatgtatccacttttgagcccaatcggccttcttttttacacaaggcattgtttctatggcattaaagagatagtttttttcattactatctttaacataagtatcgatcaaaagactatacatttccgaatgaatgttttcaatggccatctgaaatccgtagaaacatctagcctcggtaatctgtacttctgtacaaaatcgttccgccaaattttcattcactattccgtcactggctgcaaaaaacgccaatacatgttttataaaatatttttcgtctggtgttagtttattccaatcattgatatctttagatatatctacttcttccactgtccaaaatgatgcctctgcctttttatacatgttccagatgtcatgatattggattgggaaaataacaaatctatttggatttggtgcaaggatgggttccataactaaattaacaatatcaataaattttttttcagttatctatatgcctgtacttggattttttgtacatcgatatcgccgcaatcactacaataattacaagtattattgatagcattgttattagtactatcataattaaattatcgacattcatgggtgctgaataatcgttattatcatcattatcattttgtaattgtgacatcatactaaataaatcgtttgcgagattgttgtgggaagcgggcatggaggatgcattatcattattatttaacgccttccatttggattcacaaatatggcgcgcgttcaacattttatggaaactataattttgtgaaaacagataacaagaaaactcgtcatcgttcaaatttttaacgatagtaaaccgattaaacgtcgagctaatttctaacgctagcgactctgttggatatgggtttccagatatatatcttttcagttcccctacgtatctataatcatctgtaggaaatggaagatatttccatttatctactgttcctaatatcatatgtggtggtgtagtagaaccattaagcgcgaaagatgttatttcgcatcgtattttaacttcgcaataatttctggttagataacgcactctaccagtcaagtcaatgatattagcctttacagatatattcatagtagtcgtaacgatgactccatcttttagatgcgatactcctttgtatgtaccagaatcttcgtacctcaaactcgatatatttaaacaagttaatgagatattaacgcgttttatgaatgatgatatataaccagaagttttatcctcggtggctagcgctataaccttatcattataataccaactagtgtgattaatatgtgacacgtcagtgtgggtacaaatatgtacattatcgtctacgtcgtattcgatacatccgcatacagccaacaaatataaaatgacaaatactctaacgccgttcgtacccatcttgatgcggtttaataaatgttttgatttcaatttattgtaaaaaaagattcggttttatactgttcgatattctcattgcttatattctcatctatcatctccacacagtcaaatccgtggttagcatgcacctcatcaaccggtaaaagactatcggactcttctatcattataactctagaatatttaatttggtcattattaatcaagtcaattatcttatttttaacaaacgtgagtattttactcattttttataaaaacttttagaaatatacagactctatcgtgtgtctatatcttctttttatatccaatgtatttatgtctgatttttcttcatttatcatatataatggtccaaattctacacgtgcttcggattcatccagatcattaaggttcttataattgtaacatccttctcttccctcttctacatcttccttcttattcttattcttagcgtcacagaatctaccacagcaggatcccatgacgagcgtcatattaaactaatccattttcaattataatatatgattagtaatgaccattaaaataaaaaatattcttcataaccggcaagaaagtgaaaagttcacattgaaactatgtcagtagtatacatcatgaaatgatgatatatatatactctattttggtggaggattatatgatataattcgtggataatcattcttaagacacatttcttcattcgtaaatcttttcacgttaaatgagtgtccatattttgcaatttcttcatatgatggcggtgtacgtggacgaggctgctcctgttcttgttgtggtcgccgactgtcgtgtttgcgtttatccctccattatcgcgattgcgtagatggagtactattatataccttgtaattaaatttttttattaattaaacgtataaaaacgttccgtatctgtatttaagagccagatttcgtctaatagaacaaatagctacagtaaaaataactagaataattgctacacccactagaaaccacggatcgtaatacggcaatcggttttcgataataggtggaacgtatattttatttaaggacttaacaattgtctgtaaaccacaatttgcttccgcggatcctgtattaactatctgtaaaagcatatgttggccgggcggagccgaacattctccgatatccaatttctgtatatctataatattattaacctccgcatacgcattacagttcttttctagcttggataccgcactaggtacatcgtctagatctattcctatttcctcagcgatagctcttctatccttttccggaagcaatgaaatcacttcaataaatgattcaaccatgagtgtgaaactaagtcgagaattactcatgcatttgttagttattcggagcgcgcaatttttaaactgtcctataacctctcctatatgaatagcacaagtgacattagtagggatagaatgttgagctaatttttgtaaataactatctataaaaagattatacaaagttttaaactctttagtttccgccatttatccagtctgagaaaatgtctctcataataaatttttccaagaaactaattgggtgaagaatggaaacctttaatctatatttatcacagtctgttttggtacacatgatgaattcttctaatgccgtactaaattcgatatctttttcgatttctggatatgtttttaataaagtatgaacaaagaaatggaaatcgtaataccagttatgtttaactttgaaattgttttttattttcttgttaatgattccagccacttgggaaaagtcaaagtcgtttaatgccgatttaatacgttcattaaaaacaaactttttatcctttagatgaattattattggttcattggaatcaaaaagtaagatattatcgggtttaagatctgcgtgtaaaaagttgtcgcagcatggtagttcgtagattttaatgtataacagagccatctgtaaaaagataaactttatgtattgtaccaaagatttaaatcctaatttgatagctaactcggtatctactttatctgccgaatacagtgctaggggaaaaattataatgtttcctctttcgtattcgtagttagttctcttttcatgttcgaaaaagtgaaacatgcggttaaaatagtttataacattaatattactgttaataactgccgggtaaaagtgggatagtaatttcacgaatttgatactgtcctttctctcgttaaacgcctttagaaaaactttagaagaatatctcaatgatagttcctgaccatccatagtttgtatcaataatagcaacatatgaagaacacgtttatacagagtatgtaaaaatgttaatttatagtttaatcccatggcccacgcacacacgattaattttttttcatctccctttagattgttgtatagaaatttgggtactgtgaactccgccgtagtttccatgggactatataattttgtggcctcgaatacaaattttactacatagttatctatcttaaaaactataccatatcctcctgtagatatgtgataaaaatcgtcgtttataggataaaatcgtttatccttttgttggaaaaaggatgaattaatgtaatcattctcttctatctttagtagtgtttccttattaaaattcttaaaataatttaacaatctaactgacggagcccaattttggtgtaaatctaattgggacattatattgttaaaatacaaacagtctcctaatataacagtatctgataatctatggggagacatccattgatattcaggggatgaatcattggcaacacccatttattgtacaaaaagccccaatttacaaacgaaagtccaggtttgatagagacaaactattaactattttgtctctgtttttaacacctccacagtttttaatttctttagtaatgaaattattcacaatatcagtatcttctttatctaccagagattttactaacttgataaccttggctgtctcattcaatagggtagtaatatttgtatgtgtgatattgatatctttttgaattgtttcttttagaagtgattctttgatggtgccagcatacgaattacaataatgcagaaactcggttaacatgcaggaattatagtaagccaattccaattgttgcctgtgttgtattagagtgtcaatatgagcaatggtgtccttgcgtttctctgatagaatgcgagcagcgattttggcgttatcatttgacgatatttctggaatgacgaatcctgtttctactaactttttggtaggacaaagtgaaacaatcaagaagatagcttctcctcctatttgtggaagaaattgaactcctctagatgatctactgacgatagtatctccttgacagatattggaccgaattacagaagtacctggaatgtaaagccctgaaaccccctcattttttaagcagattgttgccgtaaatcctgcactgtgaccaagatagagagctcctttggtgaatccatctctatgtttcagtttaaccaagaaacagtcagctggtctaaaatttccatctctatctaatacagcatctaacttgatgtcaggaactatgaccggtttaatgttatatgtaacattgagtaaatccttaagttcataatcatcactgtcatcagttatgtacgatccaaacaatgtttctactggcatagtggatacgaagatgctatccatcagaatgtttccctgattagtattttctatatagctattcttctttaaacgattttccaaatcagtaactatgttcatttttttaggagtaggacgcctagccagtatggaagaggattttctagatcctctcttcaacatctttgatctcaatggaatgcaaaaccccatagtgaaacaaccaacgataaaaataatattgtttttcactttttataattttaccatctgactcatggattcattaatatctttataagagctactaacgtataattctttataactgaactgagatatatacaccggatctatggtttccataattgagtaaatgaatgctcggcaataactaatggcaaatgtataaaacaacgaaattatactagagttgttaaagttaatattttctatgagctgttccaataaattatttgttgtgactgcgttcaagtcataaatcatcttgatactatccagtaaacagtctttaagttctggaatattatcatcccattgtaaagcccctaattcgactatcgaatatcctgctctgatagcagtttcaatatcgacggacgtcaatactgtaataaaggtggtagtattgtcatcatcgtgataaactacgggaatatggtcgttagtaggtacggtgactttacacaacgcgatatataactttccttttgtaccatttttaacgtagttgggacgtcctgcagggtattgttttgaagaaatgatatcgagaacagatttgatacgatatttgttggattcctgattattcactataatataatctagacagatagatgattcgataaatagagaaggtatatcgttggtaggataatacatccccattccagtattctcggatactctattgatgacactagttaagaacatgtcttctattctagaaaacgaaaacatcctacatggactcattaaaacttctaacgctcctgattgtgtctcgaatgcctcgtacaaggatttcaaggatgccatagattctttgaccaacgatttagaattgcgtttagcatctgatttttttattaaatcgaatggtcggctctctggtttgctaccccaatgataacaatagtcttgtaaagataaaccgcaagaaaatttatacgcatccatccaaataaccctagcaccatcggatgatattaatgtattattatagattttccatccacaattattgggccagtatactgttagcaacggtatatcgaatagattactcatgtaacctactagaatgatagttcgtgtactagtcataatatctttaatccaatctaagaaatttaaaattagattttttacactgttaaagttaacaaaggtattacccggatacgtggatatcatatatggcattggtccattatcagtaatagctccataaactgatacggcgatggtttttatatgtgtttgatctaacgaggaagaaattcgcgcccacaattcatctctagatatgtatttaatatcaaacggtaacacatcaatttcgggacgcgtatatgtttctaaatttttaatccaaatataatgatgacctatatgccctattatcatactgtcaactatagtacacctagagaacttacgatacatctgtttcctataatcgttaaattttacaaatctataacatgctaaaccttttgacgacaaccattcattaatttctgatatggaatctgtattctcgataccgtattgttctaaagccagtgctatatctccctgttcgtgggaacgctttcgtataatatcgatcaacggataatctgaagtttttggagaataatatgactcatgatctatttcgtccataaacaatctagacataggaattggaggcgatgatcttaattttgtgcaatgagtcgtcaatcctataacttctaatattgtaatattcatcatcgacataacactatctatgttatcatcgtatattagtataccacggccttcttcatttcgtgccaaaataatatacagtcttaaataattacgcaatatctcaatagtttcataattgttagctgttttcatcaaggtttgtatcctgtttaacatgatggcgttctataacgtctctattttctatttttaattttttaaatttttaacgatttactgtggctagatacccaatctctctcaaatatttttttagcctcgcttacaagctgtttatctatactattaaaactgacgaatccgtgattttggtaatgggttccgtcgaaatttgccgaagtgatatgaacatattcgtcgtcgactatcaacaattttgtattattctgaatagtgaaaaccttcacagatagatcattttgaacacacaacgcgtctagacttctggcggttgccatagaatatacgtcgttcttatcccaattaccaactagaagtctgatcttaactcctctattaatggctgcttctataatggagttgtaaatgtcaggccaatagtagctattaccgtcgacacgtgtagtgggaactatggccaaatgttcaatatctatactagtcttagccgacttgagtttatcaataactacatcagtgtctagatctctagaatatcccaataggtgttctggagaatcagtaaagaacactccacctataggattcttaatatgatacgcagtgctaactggcagacaacaagccgcagagcataaattcaaccatgaattttttgcgctattaaaggctttaaaagtatcaaatcttctacgaagatctgtggccagcgggggataatcagaatatacacctaacgttttaatcgtatgtatagatcctccagtaaatgacgcgtttcctacataacatctttcatcatctgacacccaaaaacaaccgagtagtagtcccacattattttttttatctatattaacggttataaaatttatatccgggcagtgactttgtagctctcccagatttcttttccctcgttcatctagcaaaactattattttaatccctttttcagatgcctcttttagtttatcaaaaataagcgcgcccctagtcgtactcagaggattacaacaaaaagatgctatgtatatatatttcttagctagagtgataatttcgttaaaacattcaaatgttgttaaatgatcggatctaaaatccatattttctggtagtgtttctaccagcctacattttgctcccgcaggtaccggtgcaaatggccacatttagttaacataaaaacttatacatcctgttctatcaacgattctagaatatcatcggctatatcgctaaaattttcatcaaagtcgacatcacaacctaactcagtcaatatattaagaagttccatgatgtcatcttcgtttatttctatatccgtatccattgtagattgttgaccgattatcgagtttaaatcattactaatactcaatccttcagaatacaatctgtgtttcattgtaaatttataggcggtgtatttaagttggtagattttcaattatgtatcaaagaagtgtctgctttatggccttataagctccctcaagctcaacagctgctcccaagaaatcggcttcctttttatagaagttattgtacctggatcgagagttaatttccctgtcgttaaccatatccccgatagtcttgactatgcatttcaaggcaatgagatcgttttcttcgacgaattccttcgctttatttacaaattttttagaagcctcaacaaactttgaatctacaaacttactactgattacgtcaaatgactctatgtacgcaagagccacggacttgcggagcttctcgtaggaatcggcaacatgtcgagcattagacacatcgttatcgacggcctggtccagttctatagcaaagtcatcgatcagtttgctcaggaacattggtttgtactcttcgatgatcttttccaattctttgaacttattgactatcttgttatcctttttaagaatggatatggcttggtttactttagatttatcggagctggtgccctcgctgtatgtcattatataggtcattatatcgttgtacgccccggtatattcactgtagatagcgtccaatttaatagagtaatatttggctttttccacgaaaattttaagttcatcaatatttctttgattaagtctagacacatcgcaagaaccacctccccctgatcctccgccaccggaccctcctccaccatatagcaacagtagttcttgctcctccttgattctagcatcctcttcattattttcttctacgtacataagcatgtccaatacgttagacaacacaccgacgatggcggccgccacagacacgaatatgactagaccgatgaccatttaaaaacccctctctagctttcacttaaactgtatcgattattcttttagaacatgtataatataaaaacattattctatttcgaatttaggcttccaaaaatttttcatccgtaaaccgataataatatatatagacttgttaatagtcggaataaatagattaatgcttaaactatcatcatctccacgattagagatacaatatttacattctttttgctgtttcgaaactttatcaatacacgttaatacaaacccaggaaggagatattgaaactgaggctgttgaaaatgaaacggtgaatacaataattcagataatgtaaaatcatgattccgtattctgatgatattagaactgctaatggatgtcgatggtatgtatctaggagtatctattttaacaaagcatcgatttgctaatatacaattatcattttgattaattgttattttattcatattcttaaaaggtttcatatttatcaattcttctacattaaaaatttccatttttaatttatgtagccccgcaatactcctcattacgtttcattttttgtctataatatccattttgttcatctcggtacatagattatccaattgagaagcgcatttagtagttttgtacattttaagtttattgacgaatcgtcgaaaactagttatagttaacattttattatttgataccctgatattaatacccctgccgttactattatttataactgatgtaacccacgtaacattagaattaattatcgatagtaatgcatcgacgcttccaaaattgtctattataaactcaccgataatttttttattgcatgttttcatattcattaggattatcaaatctttaatcttattacgattgtatgcgttgatattacaagacgtcattctaaaagacggaggatctccatcaaatgccagacaatcacgtacaaagtacatggaaataggttttgttctattgcgcatcatagattcatatagaacacccatagaaatactaatttgttttactctataaaatactaatgcatctatttcatcgttttgtataacgtctttccaagtgccaaattccaaatttttttcattgatagtaccaaattcttctatctctttaactacttgcatagataggtaattacagtgatgcctacatgccgttttttgaaactgaatagatgcgtctagaagcgatgctacactagtcacaatcaccactttcatatttagaatatatgtatgtaaaaatatagtagaatttcattttgtttttttctatgctataaatgaattctcattttgcatctgctcatactccgttttatatcaataccaaagaaggaagatatctggttctaaaagccgttaaagtatgcgatgttagaactgtagaatgcgaaggaagtaaagcttcctgcgtactcaaagtagataaaccctcatcgcccgcgtgtgagagaagaccttcgtccccgtccagatgcgagagaatgaataaccctggaaaacaagtcccgtttatgaggacggacatgctacaaaatatgttcgcggctaatcgcgataatgtagcttctagacttttgtcctaaaatactattatatccttttcgatattaataaatccgtgtcgtccaggttttttatctctttcagtatgtgaatagataggtattttatctctattcatcatcgaatttaagagatccgataaacattgtttgtattctccagatgtcagcatctgatacaacaatatatgtgcacataaacctctggcacttatttcatgtaccttccccttatcactaaggagaatagtatttgagaaatatgtatacatgatattatcatgaattagatatacagaatttgtaacactctcgaaatcacacgatgtgtcggcgttaagatctaatatatcactcgataacacattttcatctagatacactagacattttttaaagctaaaatagtctttagtagtgacagtaactatgcgattattttcatcgatgatacatttcatcggcatattattacgcttaccatcaaagactataccatgtgtatatctaacgtattctagcatggttgccatacgtgcattaaacttttcaggatctttggatagatcttccaatctatctatttgagaaaacatttttatcatgttcaatagttgaaacgtcggatccactatatagatattatctataaagattttaggaactacgttcatggtatcctggcgaatattaaaactatcaatgatatgattatcgttttcatcttttatcaccatatagtttctaagatatgggattttacttaatataatattatttcccgtgataaattttattagaaaggccaaatctataagaaaagtcctagaattagtctgaagaatatctatatcgccgtaccgtatatttggattaattagatatagagaatatgatccgtaacatatacaacttttattatggcgtctaagatattcttccatcaacttattaacatttttgactagggaagatacattatgacgtcccattacttttgccttgtctattactgcgacgttcatagaatttagcatatctcttgccaattcttccattgatgttacattataagaaattttagatgaaattacatttggagctttaatagtaagaactcctaatatgtccgtgtatgtggtcactaatacagattgtagttctataatcgtaaataatttacctatattatatgtttgagtctgtttagaaaagtagctaagtatacgatcttttatttctgatgcagatgtatcaacatcggaaaaaaatctttttttattcttttttactaaagatacaaatatgtctttgttaaaaacagttattttctgaatatttctagcttgtaattttaacatatgatattcgttcacactaggtactctgcctaaataggtttctataatctttaatgtaatattaggaagagtattctgatcaggattcctattcattttgaggatttaaaactctgattattgtctaatatggtctcaacacaaactttttcacagagcgatagagtttttgataactcgtttttcttaagaaatataaaactactgtttccagagctcgctctatcttttattttatctaattcgatacaaactcctgatactggttcagaaagtaattcattaattttcagtcctttatagaagatatttaatatagataatacaaaattttcagttcttgatatcgatctgattgatcctagaactagatatattaataacgtgctcattaggcagtttatggcagcttgataattagatatagtatattccagttcatatttattagataccgcattgcccagattttgatattctatgaattcctctgaaaataaatccaaaataactagacattctattttttgtggattagtgtactctcttccctctatcatgttcactactggtgtccacgatgataaatatctagagggaatataatatagtccataggatgccaatctagcaatgtcgaataactgtaatttgattcttcgttcttcattatgaattgattcttgaggtataaacctaacacaaattatattattagacttttcgtatgtaatgtctttcatgttataagtttttaatcctggaatagaatctattttaatgaggcttttaaacgcagagttctccaacgagtcaaagcataatactctgttgtttttcttatatacgatgttacgattttcttctttgaatggaataggtttttgaattagtttataattacaacataatagataaggaagtgtgcaaatagtacgcggaaaaaacataatagctcccctgttttcatccatggttttaagtaaatgatcactggcttctttagtcaatggatattcgaacattaaccgtttcatcatcattggacagaatccatatttcttaatgtaaagagtgatcaaatcattgtgtttattgtaccatcttgttgtaaatgtgtattcggttatcggatctgctcctttttctattaaagtatcgatgtcgatctcgtctaagaattcaactatatcgacatatttcatttgtatacacataaccattactaacgtagaatgtataggaagagatgtaacgggaacagggtttgttgattcgcaaactattctaatacataattcttctgttaatacgtcttgcacgtaatctattatagatgccaagatatctatataattattttgtaagatgatgttaactatgtgatctatataagtagtgtaataattcatgtatttcgatatatgttccaactctgtctttgtgatgtctagtttcgtaatatctatagcatcctcaaaaaatatattcgcatatattcccaagtcttcagttctatcttctaaaaaatcttcaacgtatggaatataataatctattttacctcttctgatatcattaatgatatagtttttgacactatcttctgtcaattgattcttattcactatatctaagaaacggatagcgtccctaggacgaactactgccattaatatctctattatagcttctggacataattcatctattataccagaattaatgggaactattccgtatctatctaacatagttttaagaaagtcagaatctaagacctgatgttcatatattggttcatacatgaaatgatctctattgatgatagtgactatttcattctctgaaaattggtaactcattctatatatgctttccttgttgatgaaggatagaatatactcaatagaatttgtaccaacaaactgttctcttatgaatcgtatatcatcatctgaaataatcatgtaaggcatacatttaacaattagagacttgtctcctgttatcaatatactattcttgtgataatttatgtgtgaggcaaatttgtccacgttctttaattttgttatagtagatatcaaatccaatggagctacagttcttggcttaaacagatatagtttttctggaacgaattctacaacattattataaaggactttgggtagataagtgggatgaaatcctattttaattaatgcgatagccttgtcctcgtgcagatatccaaacgcttttgtgatagtatggcattcattgtctagaaacgctctacgaatatctgtgacagatatcatctttagagaatatactagtcgcgttaatagtactacaatttgtattttttaatctatctcaataaaaaaattaatatgtatgattcaatgtataactaaactactaactgttattgataactagaatcagaatctaatgatgacgtaaccaagaagtttatctactgccaatttagctgcattatttttagcatctcgtttagattttccatctgccttatcgaatactcttccgtcgatgtctacacaggcataaaatgtaggagagttactaggccccactgattcaatacgaaaagaccaatctctcctagtaatttggcagtactcattaataacggtgacagggttagcacctttccaatcaataatttttttagccggaataacatcatcaaaagacttatgatcctctctcattgatttttcgcgggatacatcatctattatggcgtcagccataacatcagcatccggcttatccgcctccgttgtcataaaccaacgaggaggaatatcgtcggagctgtacaccatagcactacgttgaagatcgtacagagctttattaacttctcgcttctccatattaagttgtctagttagttgtgcagcagtagctccttcgattccaatggttttaatagcctcacacacaatctctgcgttagaacgttcgtcgatatagattttagacatttttagagagaactaacacaaccagcaataaaactgaacctactttatcatttttttattcatcatcctctggtggttcgtcgttcctatcgaatgtggatctgattaacccgtcatctataggtgatgctggttctggagattctggaggagatggattattatctggaagaatctctgttatttccttgttttcatgtatcgattgcgttgtaacattaagattgcgaaatgctctaaatttgggaggcttaaagtgttgtttgcaatctctacacgcatgtctaactagtggaggttcgtcagcggctctagtttgaatcatcatcggcgtagtattcctacttttacagttaggacacggtgtattgtatttctcgtcgagaacgttaaaataatcgttgtaactcacatcctttattttatctatattgtattctactcctttcttaatgcattttataccgaataagagatagcgaaggaattctttttcggtgccgctagtacccttaatcatatcacatagtgttttatattccaaatttgtggcaatagacggtttatttctatacgatagtttgtttctggaatcctttgagtattctataccaatattattctttgattcgaatttagtttcttcgatattagattttgtattacctatattcttgatgtagtactttgatgatttttccatggcccattctattaagtcttccaagttggcatcatccacatattgtgatagtaattctcggatatcagtagcggctaccgccattgatgtttgttcattggatgagtaactactaatgtatacattttccatttataacacttatgtattaactttgttcatttatattttttcattattatgttgatattaacaaaagtgaatatatatgttaataattgtattgtggttatacggctacaatttcataatgagtggaagtcagtgtccgatgatcaatgacgatagctttactctgaaaagaaagtatcaaatcgatagtgcggagtcaacaataaaaatggataagaagaggataaagtttcagaatagagccaaaatggtaaaagaaataaatcagacaataagagcagcacaaactcattacgagacattgaaactaggatacataaaatttaagagaatgattaggactactactctagaagatatagcaccatctattccaaataatcagaaaacttataaactattctcggacatttcagccatcggcaaagcatcacagaatccgagtaagatggtatatgctctgctgctttacatgtttcccaatttgtttggagatgaccatagattcattcgttatagaatgcatccaatgagtaaaatcaaacacaagatcttctctcctttcaaacttaatcttattagaatattagtggaagaaagattctataataatgaatgcagatctaataaatggagaataattggaacacaagttgataaaatgttgatagctgaatctgataaatatacaatagatgcaaggtataacctaaaacccatgtatagaatcaagggaaaatctgaagaagataccctcttcatcaaacagatggtagaacaatgtgtgacatcccaggaattggtggaaaaagtgttgaagatactgtttagagatttgttcaagagtggagaatacaaagcatacagatacgatgatgatgtagaaaatggatttattggattggatacactaaaattaaacattgttcatgatatagttgaaccatgtatgcctgttcgtaggccagtggctaagatactgtgtaaagaaatggtaaataaatactttgagaatccgctacatattattggtaaaaatcttcaagagtgcattgactttgttagtgaataggcatttcatctttctccaatactaattcaaattgttaaattaataatggatagtataaatagttattagtgataaaatagtaaaaataattattagaataagagtgtagtatcatagataactctcttctataaaaatggattttattcgtagaaagtatcttatatacacagtagaaaataatatagattttttaaaggatgatacattaagtaaagtaaacaattttaccctcaatcatgtactagctctcaagtatctagttagcaattttcctcaacacgttattactaaggatgtattagctaataccaatttttttgttttcatacatatggtacgatgttgtaaagtgtacgaagcggttttacgacacgcatttgatgcacccacgttgtacgttaaagcattgactaagaattatttatcgtttagtaacgcaatacaatcgtacaaggaaaccgtgcataaactaacacaagatgaaaaatttttagaggttgccgaatacatggacgaattaggagaacttataggcgtaaattatgacttagttcttaatccattatttcacggaggggaacccatcaaagatatggaaatcatttttttaaaactgtttaagaaaacagacttcaaagttgttaaaaaattaagtgttataagattacttatttgggcatacctaagcaagaaagatacaggcatagagtttgcggataatgatagacaagatatatatactctatttcaacaaactggtagaatcgtccatagcaatctaacagaaacgtttagagattatatctttcccggagataagactagctattgggtgtggttaaacgaaagtatagctaatgatgcggatatcgttcttaatagacacgccattaccatgtatgataaaattcttagttatatatactctgagataaaacaaggacgcgttaataaaaacatgcttaagttagtttatatctttgagcctgaaaaagatatcagagaacttctgctagaaatcatatatgatattcctggagatatcctatctattattgatgcaaaaaacgacgattggaaaaaatattttattagtttttataaagctaattttattaacggtaatacatttattagtgatagaacgtttaacgaggacttattcagagttgttgttcaaatagatcccgaatatttcgataatgaacgaattatgtctttattctctacgagtgctgcggacattaaacgatttgatgagttagatattaataacagttatatatctaatataatttatgaggtgaacgatatcacattagatacaatggatgatatgaagaagtgtcaaatctttaacgaggatacgtcgtattatgttaaggaatacaatacatacctgtttttgcacgagtcggatcccatggtcatagagaacggaatactaaagaaactgtcatctataaaatccaagagtagacggctgaacttgtttagcaaaaacattttaaaatattatttagacggacaattggctcgtctaggtcttgtgttagatgattataaaggagacttgttagttaaaatgataaaccatcttaagtctgtggaggatgtatccgcattcgttcgattttctacagataaaaaccctagtattcttccatcgctaatcaaaactattttagctagttataatatttccatcatcgtcttatttcaaaggtttttgagagataatctatatcatgtagaagaattcttggataaaagcatccatctaaccaagacggataagaaatatatacttcaattgataagacacggtagatcatagaacagaccaaatatattattaataatttgtatatacatagatataattatcacatattaaaaattcacacatttttgataaatgggaactgctgcaacaattcagactcccaccaaattaatgaataaagaaaatgcagaaatgattttggaaaaaattgttgatcatatagttatgtatattagtgacgaatcaagtgattcagaaaataatcctgaatatattgattttcgtaacagatacgaagactatagatctctcattataaaaagtgatcacgagtttgtaaagctatgtaaaaatcatgcagagaaaagttctccagaaacgcaacaaatgattatcaaacacatatacgaacaatatcttattccagtatctgaagtactattaaaacctataatgtccatgggtgacataattacatataacggatgtaaagacaatgaatggatgctagaacaactctctaccctaaactttaacaatctccgcacatggaactcatgtagcataggcaatgtaacgcgtctgttttatacattttttagttatctgatgaaagataaactaaatatataagtataatcccattctaatactttaacctgatgtattacctgcatcttattagaatattaacctaactaaaagacataacataaaaactcattacatagttgataaaaagcggtaggatataaatattatggctgccaccgttccgcgttttgacgacgtgtacaaaaatgcacaaagaagaattctagatcaagaaacattttttagtagaggtctaagtagaccgttaatgaaaaacacatatctatttgataattacgcgtatggatggataccagaaactgcaatttggagtagtagatacgcaaacttagatgcaagtgactattatcccatttcgttgggattacttaaaaagttcgagtttctcatgtctctatataaaggtcctattccagtatacgaagaaaaagtaaatactgaattcatagccaatggatcgttctctggtagatacgtatcatatcttcgaaagttttctgctcttccaacaaacgagtttattagttttttgttactgacttccattccaatctataatatcttgttctggtttaaaaatactcagtttgatattactaaacacacattattcagatacgtctatacagataatgccaaacacctggcgttggctaggtatatgcatcaaacaggagactataagcctttgtttagtcgtctcaaagagaattatatatttaccggtcccgttccaataggtatcaaagatatagatcaccctaatcttagtagagcaagaagtccatccgattatgagacattagctaatattagtactatattgtactttaccaagtatgatccggtattaatgtttttattgttttacgtacctgggtattcaattactacaaaaattactccagccgtagaatatctaatggataaactgaatctaacaaagagcgacgtacaactgttgtaaattattttatgcttcgtaaaatgtaggttttgaaccaaacattctttcaaagaatgagatgcataaaactttattatccaatagattgactatttcggacgtcaatcgtttaaagtaaacttcgtaaaatattctttgatcactgccgagtttaaaacttctatcgataattgtctcatatgttttaatatttacaagttttttggtccatggtacattagccggacaaatatatgcaaaataatatcgttctccaagttctatagtttctggattatttttattatattcagtaaccaaatacatattagggttatctgcggatttataatttgagtgatgcattcgactcaacataaataattctagaggagacgatctactatcaaattcggatcgtaaatctgtttctaaagaacggagaatatctatacatacctgattagaattcatccgtccttcagacaacatctcagacagtctggttttgtacatcttaatcatattcttatgaaacttggaaacatctcttctagtttcactagtacctttattaattctctcaggtacagattttgaattcgacgatgccgagtatttcatcgttgtatatttcttcttcgattgcataatcagattcttatataccgcctcaaactctattttaaaattattaaacaatactctactattaatcagtcgttctaactctttcgctatttctatagacttatctacatcttgactgtctatctctgtaaacacggagtcggtatctccatacacgctacgaaaacgaaatctgtaatctataggcaacgatgttttcacaatcggattaatatctctatcgtccatataaaatggattacttaatggattggcaaaccgtaacataccgttagataactctgctccatttagtaccgattctagatacaagatcattctacgtcctatggatgtgcaactcttagccgaagcgtatgagtatagagcactatttctaaatcccatcagaccatatactgagttggctactatcttgtacgtatattgcatggaatcataaatggccttttcagttgaactggtagcctgttttaacatctttttatatctggctctctctgccaaaaatgttcttaatagtctaggaatggttccttctatcgatctatcgaaaattgctatttcagagatgaggttcggtagtctaggttcacaatgaaccgtaatatatctaggaggtggatatttctgaagcaatagctgattatttatttcttcttccaatctattggtactaacaacgacaccgactaatgtttccggagatagatttccaaagatacacacattaggatacagactgttataatcaaagattaatacattattactaaacattttttgttttggagcaaataccttaccgccttcataaggaaacttttgttttgtttctgatctaactaagatagttttagtttccaacaatagctttaacagtggacccttgatgactgtactcgctctatattcgaataccatggattgaggaagcacatatgttgacgcacccgcgtctgtttttgtttctactccataatactcccacaaatactgacacaaacaagcatcatgaatacagtatctagccatatctaaagctatgtttagattataatccttatacatctgagctaaatcaacgtcatcctttccgaaagataatttatatgtatcattaggtaaagtaggacataatagtacgactttaaatccattttcccaaatatctttacgaattactttacatataatatcctcatcaacagtcacataattacctgtggttaaaacctttgcaaatgcagcggctttgcctttcgcgtccgtagtatcgtcaccgatgaacgtcatttctctaactcctctatttaatactttacccatgcaactgaacgcgttcttggatatagaatccaatttgtacgaatccaatttttcagatttttgaatgaatgaatatagatcgaaaaatatagttccattattgttattaacgtgaaacgtagtattggccatgccgcctactcccttatgactagactgatttctctcataaatacagagatgtacagcttcctttttgtccggagatctaaagataatcttctctcctgttaataactctagacgattagtaatatatctcagatcaaagttatgtccgttaaaggtaacgacgtagtcgaacgttagttccaacaattgtttagctattcgtaacaaaactatttcagaacatagaactagttctcgttcgtaatccatttccattagtgactgtatcctcaaacatcctctatcgacggcttcttgtatttcctgttccgttaacatctcttcattaatgagcgtaaacaataatcgtttaccacttaaatcgatataacagtaacttgtatgcgagattgggttaataaatacagaaggaaacttcttatcgaagtgacactctatatctagaaataagtacgatcttgggatatcgaatctaggtatttttttagcgaaacagttacgtggatcgtcacaatgataacatccattgttaatctttgtcaaatattgctcgtccaacgagtaacatccgtctggagatatcccgttagaaatataaaaccaactaatattgagaaattcatccatggtggcattttgtatgctgcgtttctttggctcttctatcaaccacatatctgcgacggagcattttctatctttaatatctagattataacttattgtctcgtcaatgtctatagttctcatctttcccaacggcctcgcattaaatggaggaggagacaatgactgatatatttcgtccgtcactacgtaataaaagtaatgaggaaatcgtataaatacggtctcaccatttcgacatctggatttcagatataaaaatctgttttcaccgtgactttcaaaccaattaatgcaccgaacatccatttatagaatttagaaatatattttcatttaaatgaatcccaaacattggggaagagccgtatggaccattatttttatagtactttcgcaagcgggtttagacggcaacatagaagcgtgtaaacgaaaactatatactatagtcagcactcttccatgtcctgcatgtagacggcacgcgactatcgctatagaggacaataatgtcatgtctagcgatgatctgaattatatttattattttttcatcagattatttaacaatttggcatctgatcccaaatacgcgatcgatgtgacaaaggttaaccctttataaacttaacccattataaaacttatgattagtcacaactgaaataaccgcgtgattattttttggtataattctacacggcatggtttctgtaactatgaattcaacccccgttacattagtgaaatctttaacaaacagcaagggttcgtcaaagacataaaactcattgtttacaatcgaaatagaccccctatcacacttaaaataaaaaatatccttatcctttaccaccaaataaaattctgattggtcaatgtgaatgtattcacttaacagttccacaaatttatttattaactccgaggcacatacatcgtcggtattttttatggcaaactttactcttccagcatccgtttctaaaaaaatattaacgagttccatttatatcatccaatattattgaaatgacgttgatggacagatgatacaaataagaaggtacggtacctttgtccaccatctcctccaattcatgctctattttgtcattaactttaatgtatgaaaacagtacgccacatgcttccatgacagtgtgtaacactttggatacaaaatgtttgacattagtataattgttcaagactgtcaatctataatagatagtagctataatatattctatgatggtattgaagaagatgacaaccttggcatattgatcatttaacacagacatggtatcaacagatagcttgaatgaaagagaatcagtaattggaataagcgtcttctcgatagagtgtccgtataccaacatgtctgatattttgatgtattccattaaattatttagttttttctttttattttcgttaaacagcatttctgtcaacggaccccaacatcgttgaccgattaagttttgattgatttttccgtgtaatgcgtatctagtcagatcgtatagcctatccaataatccatcatctgtgcgtagatcacatcgtacactttttaattctctatagaagagcgacagacatctggagcaattacagacagcaatttctttattctctacagatgtaagatacttgaagacattcctatgatgatgcagaattttggataacacggtattgatggtatctgttaccataattcctttgatggctgatagtgtcagagcacaagatttccaatctttgacaatttttagcaccattatctttgttttgatatctatatcagacagcatggtgcgtctgacaacacagggattaagacggaaagatgaaatgattctctcaacatcttcaatggataccttgctattttttctggcattatctatatgtgcgagaatatcctctagagaatcagtatcctttttgatgatagtggatctcaatgacatgggacgtctaaaccttcttattttatcaccagattgcatggtgatttgtcttctttcttttatcataatgtaatctctaaattcatcggcaaattgtctatatctaaaatcataatatgagatgtttacctctacaaatatctgttcgtccaatgttagagtatctacatcagttttgtattccaaattaaacatggcaacggatttaattttatattcctctattaagtcctcgtcgataataacagaatgtagataatcatttaatccatcgtacatggttggaagatgcttgttgacaaaatctttaattgtcttgatgaaggtgggactatatctaacatcttgattaataaaatttataacattgtccataggatactttgtaactagttttatacacatctcttcatcggtaagtttagacagaatatcgtgaacaggtggtatattatattcatcagatatacgaagaacaatgtccaaatctatattgtttaatatattatatagatgtagcgtagctcctacaggaatatctttaactaagtcaatgatttcatcaaccgttagatctattttaaagttaatcatataggcattgatttttaaaaggtatgtagccttgactacattctcattaattaaccattccaagtcactgtgtgtaagaagattatattctatcataagcttgactacatttggtcccgataccattaaagaattcttatgatataaggaaacagcttttaggtactcatctactctacaagaattttggagagccttaacgatatcagtgacgtttattatttcaggaggaaaaaacctaacattgagaatgtcggagttaatagcttccagatacagtgattttggcaatagtccgtgtaatccataatccagtaacacgagctggtgcttgctagacaccttttcaatgtttaatttttttgaaataagctttgataaagccttcctcgcaaattccggatacatgaacatgtcggcgacatgattaagtattgttttttcattatttttatattttctcaacaagttctcaataccccaatagatgatagaatatcacccaatgcgtccatgttgtctatttccaacaggtcgctatatccaccaatagaagtttttccaaaaaagattctaggaacagttctaccaccagtaatttgttcaaaatagtcacgcaattcattttcgggtttaaattctttaatatcgacaatttcatacgctcctcttttgaaactaaacttatttagaatatccagtgcatttctacaaaaaggacatgtatacttgacaaaaattgtcactttgttattggccaacctttgttgtacaaattcctcggccattttaatatttaagtgatataaaactatctcgacttatttaactctttagtcgagatatatggacgcagatagctatatgatagccaactacagaaggcaaacgctataaaaaacataattacgacgagcatatttataaatatttttattcagcattacttgatatagtaatattaggcacagtcaaacattcaaccactctcgatacattaactctctcattttctttaacaaattctgcaatatcttcgtaaaaagattcttgaaactttttagaatatctatcgactctagatgaaatagcgttcgtcaacatactatgttttgtatacataaaggcgcccattttaacagtttctagtgacaaaatgctagcgatcctaggatcctttagaatcacatagattgacgattcgtctctcttagtaactctagtaaaataatcatacaatctagtacgcgaaataatattatccttgacttgaggagatctaaacaatctagttttgagaacatcgataagttcatcgggaatgacatacatactatctttaatagaactcttttcatccagttgaatggattcgtccttaaccaactgattaatgagatcttctattttatcattttccagatgatatgtatgtccattaaagttaaattgtgtagcgcttctttttagtctagcagccaatactttaacatcactaatatcgatatacaaaggagatgatttatctatggtattaagaattcgtttttcgacatctgtcaaaaccaattcctttttgcctgtatcatccagttttccatcctttgtaaagaaattattttctactagactattaataagactgataaggattcctccataattgcacaatccaaactttttaacaaaactagactttacaagatctacaggaatgcgtacttcaggtttcttagcttgtgattttttcttttgtggacattttcttgtgaccaactcatctaccatttcattgattttagcagtgaaataagctttcaatgcacgggcactgatactattgaaaacgagttgatcttcaaattccgccatttaagttcaccaaacaacttttaaatacaaatatatcaatagtagtagaataagaactataaaaaaaataataattaaccaataccaaccccaacaaccggtattattagttgatgtgactgttttctcatcacttagaacagatttaacaatttctataaagtctgtcaaatcatcttccggagaccccataaatacaccaaatatagcggcgtacaacttatccatttatacattgaatattggcttttctttatcgctatcttcatcatattcatcatcaatatcaacaagtcccagattacgagccagatcttcttctacattttcagtcattgatacacgttcactatctccagagagtccgataacgttagccaccacttctctatcaatgattagtttcttgagtgcgaatgtaatttttgtttccgttccggatctatagaaaactacaggtgtgataattgccttggccaattgtctttctcttttactgagtgattctagttcaccttctatagatctgagaatggatgattctccagtcgaaacatattctaccatggatccgtttaatttgttgatgaagatggattcatccttaaatgttttctctgtaatagtttccaccgaaagactatgcaaagaatttggaatgcgttccttgtgcttaatgtttccatagacggcttctagaagttgatacaacataggactagccgcggtaacttttatttttagaaagtatccatcgcttctatcttgtttagatttatttttataaagtttagtctctccttccaacataataaaagtggaagtcatttgactagataaactatcagtaagttttatagagatagacgaacaattagcgtattgagaagcatttagtgtaacgtattcgatacattttgcattagatttactaatcgattttgcatactctataacacccgcacaagtctgtagagaatcgctagatgcagtaggtcttggtgaagtttcaactctcttcttgattaccttactcatgattaaacctaaataattgtactttgtaatataatgatatatattttcactttatctcatttgagaataaaaatgtttttgtttaaccactgcatgatgtacagatttcggaatcgcaaaccaccagtggttttattttatccttgtccaatgtgaattgaatgggagcggatgcgggtttcgtacgtagatagtacattcccgtttttagaccgagactccatccgtaaaaatgcatactcgttagtttggaataactcggatctgctatatggatattcatagattgactttgatcgatgaaggctcccctgtctgcagccatttttatgatcgtcttttgtggaatttcccaaatagttttataaactcgcttaatatcttctggaaggtttgtattctgaatggatccaccatctgccataatcctattcttgatctcatcattccataattttctctcggttaaaactctaaggagatgcggattaactacttgaaattctccagacaatactctccgagtgtaaatattactggtatacggttccaccgactcattatttcccaaaatttgagcagttgatgcagtcggcataggtgccaccaataaactatttctaagaccgtatgttctgattttatcttttagaggttcccaattccaaagatccgacggtacaacattccaaagatcatattgtagaataccgttactggcgtacgatcctacatatgtatcgtatggtccttccttctcagctagttcacaactcgcctctaatgcaccgtaataaatggtttcgaagatcttcttatttagatcttgtgcttccaggctatcaaatggataatttaagagaataaacgcgtccgctaatccttgaacaccaataccgataggtctatgtctcttattagagatttcagcttctggaataggataataattaatatctataattttattgagatttctgacaattactttgaccacatccttcagtttgagaaaatcaaatcgcccatctattacaaacatgttcaaggcaacagatgccagattacaaacggctacctcattagcatccgcatattgtattatctcagtgcaaagattactacacttgatagttcctaaattttgttgattactctttttgttacacgcatccttataaagaatgaatggagtaccagtttcaatctgagattctataatcgctttccagacgactcgagcctttattatagatttgtatctcctttctctttcgtatagtgtatacaatcgttcgaactcgtctccccaaacattgtccaatccaggacattcatccggacacatcaacgaccactctccgtcatccttcactcgtttcataaagagatcaggaatccaaagagctataaatagatctctggttctatgttcctcgtttcctgtattctttttaagatcgaggaacgccataatatcagaatgccacggttccaagtatatggccataactccaggccgtttgtttcctccctgatctatgtatctagcggtgttattataaactctcaacattggaataataccgtttgatataccattggtaccggagatatagcttccactggcacgaatattactaattgatagacctattccccctgccattttagagattaatgcgcatcgttttaacgtgtcatagataccctctatgctatcatcgatcatgttaagtagaaaacagctagacatttggtgacgactagttcccgcattaaataaggtaggagaagcgtgcgtaaaccatttttcagaaagtagattgtacgtctcaatagctgagtctatatcccattgatgaattcctactgcgacacgcattaacatgtgctgaggtctttcaacgatcttgttgtttattttcaacaagtaggatttttccaaagttttaaaaccaaaatagttgtatgaaaagtctcgttcgtaaataataaccgagttgagtttatccttatatttgttaactatatccatggtgatacttgaaataatcggagaatgtttcccatttttaggattaacatagttgaataaatcctccatcacttcactaaatagtttttttgtttccttgtgtagatttgatacggctattctggcggctagaatggcataatccggatgttgtgtagtacaagtggctgctatttcggctgccagagtgtccaattctaccgttgttactccattatatattccttgaataaccttcatagctattttaataggatctatatgatccgtgtttaagccataacataattttctaatacgagacgtgattttatcaaacatgacattttccttgtatccatttcgtttaatgacaaacatttttgttggtgtaataaaaaaattatttaacttttcattaatagggatttgacgtatgtagcgtacaaaattatcgttcctggtatatagataaagagtcctatatatttgaaaatcgttacggctcgattaaactttaatgattgcatagtgaatatatcattaggatttaactccttgactatcagggcggcaccagaaattaccatcaaaagcattaatacagttatgccgatcgcagttagaacggttatagcatccaccatttatatctaaaaattagatcaaagaatatgtgacaaagtcctagttgtatactgagaattgacgaaacaatgtttcttacatatttttttcttattagtaactgacttaatagtaggaactggaaagctagacttgattattctataagtatagatacccttccaaataatattctctttgataaaagttccagaaaatgtagaattttttaaaaagttatcttttgctattaccaagattgtgtttagacgcttattattaatatgagtgatgaaatccacaccgcctctagatatcgcttttatttccacattagatggtaaatccaatagtgaaactatctttttaggaatgtatggactcgcgtttagaggagtgaacgtcttaggcgtcggaaaggatgattcatcaaacgaataaacaatttcacaaatggatgttaatgtattagtaggaaattttttgacgctagtggaattgaagattctaatggatgatgttctacctatttcatccgataacatgttaatttccgacaccaacggttttaatatttcgatgatatacggtagtctctctttcggacttatatagcttattccacaatacgagtcattatatactccaaaaaacaaaataactagtataaaatctgtatcgaatgggaaaaacgaaattatcgacataggtatagaatctggaacattgaacgtattaatacttaattctttttctgtggtaagtaccgataggttattgacattgtatggttttaaatattctataacttgagacttgatagatattagtgatgaattgaaaattatttttatcaccacgtgtgtttcaggatcatcgtcgacgcccgtcaaccaaccgaatggagtaaaataaatatcattaatatatgctctagatattagtatttttatcaatcctttgattatcatcttctcgtaggcgaatgattccatgatcaagagtgatttaagaacatcctccggagtattaatgggcttagtaaacagtccatcgttgcaataataaaagttatccaagttaaaggatattatgcattcgtttaaagatatcacctcatctgacggagacaattttttggtaggttttagagactttgaagctacttgtttaacaaagttattcatcgtcgtttactattctatttaattttgtagttaatttatcacatatcacattaattgactttttggtccatttttccatacgtttatattcttttaatcctgcgttatccgtttccgttatatccagggatagatcttgcaagttaaatagaatgctcttaaataatgtcatttttttatccgctaaaaatttaaagaatgtataaacttttttcaaagatttaaaacttttaggtggagttctagtacacaatatcataaacaaactaataaacatcccgcattcagattccaacagctgattaacttccacattaatacagcctattttcgctccaaatgtacattcgaaaaatctgaataaaacatcgatgtcacaatttgtattatccaatacagaatgtctgtgattcgtgttaaaaccatcggagaaggaatagaaataaaaattattatagtggtggaattcagttggaatattgcctccggagtcataaaaggatactaaacattgttttttatcataaattacacatttccaatgagacaaataacaaaatccaaacattacaaatctagaggtagaacttttaattttgtctttaagtatatacgataagatatgtttattcataaacgcgtcaaatttttcatgaatcgctaaggagtttaagaatctcatgtcaaattgtcctatataatccacttcggatccataagcaaactgagagactaagttcttaatacttcgattgctcatccaggctcctctctcaggctctattttcatcttgacgacctttggattttcaccagtatgtattcctttacgtgataaatcatcgattttcaaatccatttgtgagaagtctatcgccttagatactttttcccgtagtcgaggtttaaagaaatacgctaacggtatactagtaggtaactcaaagacatcatatatagaatggtaacgcgtctttaactcgtcggttaactctttcttttgatcgagttcgtcgctactattgggtctgctcaggtgccccgactctactagttccaacatcataccgataggaatacaagacactttgccagcggttgtagatttatcatatttctccactacatatccgttacaatttgttaaaaatttagatacatctatattgctacataatccagctagtgaatatatatgacataataaattggtaaatcctagttctggtattttactaattactaaatctgtatatctttccatttatcatggaaaagaatttaccagatatcttcttttttccaaactgcgttaatgtattctcttacaaatattcacaagatgaattcagtaatatgagtaaaacggaacgtgatagtttctcattggcggtgtttccagttataaaacatagatggcataacgcacacgttgtaaaacataaaggaatatacaaagttagtacagaagcacgtggaaaaaaagtatctcctccatcactaggaaaacccgcacacataaacctaaccgcgaagcaatatatatacagtgaacacacaataagctttgaatgttatagttttctaaaatgtataacaaatacagaaatcaattcgttcgatgagtatatattaagaggactattagaagctggtaatagtttacagatattttccaattccgtaggtaaacgaacagatactataggtgtactagggaataagtatccatttagcaaaattccattggcctcattaactcctaaagcacaacgagagatattttcagcgtggatttctcatagacctgtagttttaactggaggaactggagtgggtaagacgtcacaggtacccaagttattgctttggtttaattatttatttggtggattctctactctagataaaatcactgactttcacgaaagaccagtcattctatctcttcctaggatagctttagttagattgcatagcaataccattttaaaatcattgggatttaaggtactagatggatctcctatttctttacggtacggatctataccggaagaattaataaacaaacaaccaaaaaaatatggaattgtattttctacccataagttatctctaacaaaactatttagttatggcactcttattatagacgaagttcatgagcatgatcaaataggagatattattatagcagtagcgagaaagcatcatacgaaaatagattctatgtttttaatgactgccacgttagaggatgacagggaacggctaaaagtatttttacctaatcccgcatttatacatattcctggagatacactgtttaaaattagcgaggtatttattcataataagataaatccatcttccagaatggcatacatagaagaagaaaagagaaatttagttactgctatacagatgtatactcctcctgatggatcatccggtatagtctttgtggcatccgttgcacagtgtcacgaatataaatcatatttagaaaaaagattaccgtatgatatgtatattattcatggtaaggtcttagatatagacgaaatattagaaaaagtgtattcatcacctaatgtatcgataattatttctactccttatttggaatccagcgttactatacacaatgttacacacatttatgatatgggtagagtttttgtccccgctccttttggaggatcgcaacaatttatttctaaatctatgagagatcaacgaaaaggaagagtaggaagagttaatcctggtacatacgtctatttctatgatctgtcttatatgaagtctatacagcgaatagattcagaatttctacataattatatattgtacgctaataagtttaatctaacactccccgaagatttgtttataatccctacaaatttggatattctatggcgtacaaaggaatatatagactcgttcgatattagtacagaaacatggaataaattattatccaattattatatgaagatgatagagtatgctaaactttatgtactaagtcctattctcgctgaggagttggataactttgagaggacgggagaattaactagtattgtacgagaagccattttatctctaaatttacgaattaagattttaaattttaaacataaagatgatgatacgtatatacacttttgtaaaatattattcggtgtctataacggaacaaacgctactatatattatcatagacctctaacgggatatatgaatatgatttcagatactatatttgttcctgtagataataactaaaaatcaaactctaatgaccacatctttttttagagatgaaaaattttctacatctccttttgtagacacgactaaacattttgcagaaaaaagtttattagtgtttagataatcgtatacttcatcagtgtagatagtaaatgtgaacagataaaaggtattcttgctcaatagattggtaaattccatagaatatattaatcctttcttcttgagatcccacatcatttcaaccagagacgttttatccaatgatttacctcgtactataccacatacaaaactagattttgcagtgacgtcgtacctggtattcctaccaaacaaaattttacttttagttcttttagaaaattctaaggtagaatctctatttgccaatatgtcatctatggaattaccactagcaaaaaatgatagaaatatatattgatacatcgcagctggttttgatctactatactttaaaaacgaatcagattccataattgcctgtatatcatcagctgaaaaactatgttttacacgtattccttcggcatttctttttaatgatatatcttgtttagacaatgataaagttatcatgtccatgagagacgcgtctccgtatcgtataaatatttcattagatgttagacgcttcattaggggtatacttctataaggtttcttaatcagtccatcattggttgcgtcaagaactactatcggatgttgttgggtatctctagtgttacacatggccttactaaagtttgggtaaataactatgatatctctattaattatagatgcatatatttcattcgtcaaggatattagtatcgacttgctatcgtcattaatacgtgtaatgtaatcatataaatcatgcgatagccaaggaaaatttaaatagatgttcatcatataatcgtcgctataattcatattaatacgttgacattgactaatttgtaatatagcctcgccacgaagaaagctctcgtattcagtttcatcgataaaggataccgttaaatataactggttgccgatagtctcatagtctattaagtggtaagtttcgtacaaatacagaatccctaaaatattatctaatgttggattaatctttaccataactgtataaaatggagacggagtcataactattttaccgtttgtacttactggaatagatgaaggaataatctccggacatgctggtaaagacccaaatgtctgtttgaagaaatccaatgttccaggtcctaatctcttaacaaaaattacgatattcgatcccgatatcctttgcattctatttaccagcatatcacgaactatattaagattatctatcatgtctattctcccaccgttatataaatcgcctccgctaagaaacgttagtatatccatacaatggaatacttcatttctaaaatagtattcgttttctaattctttaatgtgaaatcgtatactagaaagggaaaaattatctttgagttttccgttagaaaagaaccacgaaactaatgttctgattgcgtccgattccgttgctgaattaatggatttacaccaaaaactcatataacttctagatgtagaagcattcgctaaaaaattagtagaatcaaaggatataagtagatgttccaacaagtgagcaattcccaagatttcatctatatcattctcgaatccgaaattagaaattcccaagtagatatcctttttcatccgatcgttgatgaaaatacgaactttattcggtaagacaatcatttactaaggagtaaaataggaagtaatgttcgtatgtcgttatcatcgtataaattaaaggtgtgttttttaccattaagtgacattataattttaccaatattggaattataatataggtgtatttgcgcactcgcgacggttgatgcatcggtaaatatagctgtatctaatgttctagtcggtatttcatcatttcgctgtctaataatagcgttttctctatctgtttccattacagctgcctgaagtttattggtcggataatatgtaaaataataagaaatacatacgaataacaaaaataaaataagatataataaagatgccatttagagatctaattttgttcaacttgtccaaattcctacttacagaagatgaggaatcgttggagatagtgtcttccttatgtagaggatttgaaatatcttatgatgacttgataacttactttccagataggaaataccataaatatatttataaagtatttgaacatgtagatttatcggaggaattaagtatggaattccatgatacaactttgcgagatttagtttatcttagattgtacaagtattccaagtgtatacggccgtgttataaattaggagataatctaaaaggcatagttgttataaaggacaggaatatttatattagggaagcaaatgatgacttgatagaatatctcctcaaggaatacactcctcagatttatacatattctaatgagcgcgtccccataactggttcaaaattaattctttgtggattttctcaagttacatttatggcgtatacaacgtcgcatataacaacaaataaaaaggtagatgttctcgtttccaaaaaatgtatagatgaactagtcgatccaataaattatcaaatacttcaaaatttatttgataaaggaagcggaacaataaacaaaatactcaggaagatattttattcggtaaccggtggccaaactccataggtagctttttctatttcggattttagaatttccaaattcaccagcgatttatcggttttggtgaaatccaaggatttattaatgtccacaaatgccatttgttttgtctgtggattgtatttgaaaatggaaacgatgtagttagatagatgcgctgcgaagtttcctattagggttccgcgcttcacgtcacccagcatacttgaatcaccatcctttaaaaaaaatgataagatatcaacatggagtatatcatactcggattttaattcttctactgcatcactgacattttcacaaatactacaatacggtttaccgaaaataatcagtacgttcttcatttatgggtatcaaaaacttaaaatcgttactgctggaaaataaatcactgacgatattagatgataatttatacaaagtatacaatggaatatttgtggatacaatgagtatttatatagccgtcgccaattgtgtcagaaacttagaagagttaactacggtattcataaaatacgtaaacggatgggtaaaaaagggagggcatgtaaccctttttatcgatagaggaagtataaaaattaaacaagacgttagagacaagagacgtaaatattctaaattaaccaaggacagaaaaatgctagaattagaaaagtgtacatccgaaatacaaaatgttaccggatttatggaagaagaaataaaggcaaaaatgcaattaaaaatcgataaacttacatttcaaatatatttatctgattctgataacataaaaatatcattgaatgagatactaacacatttcaacaataatgagaatgttacattattttattgtgatgaacgagacgcagaattcgttatgtgtctcgaggctaaaacacatttctctaccacaggagaatggccgttgataataagtaccgatcaggatactatgctatttgcatctactgataatcatcctaagatgataaaaaacttaactcaactgtttaaatttgttccctcggcagaggataactatttagcaaaattaacggcgttagtgaatggatgtgatttctttcctggactctatggggcatctataacacccaccaacttaaacaaaatacaattgtttagtgattttacaatcgataatatagtcactagtttggcaattaaaaattattatagaaagactaactctaccgtagacgtgcgtaatattgttacgtttataaacgattacgctaatttagacgatgtctactcgtatgttcctccttgtcaatgcactgttcaagaatttatattttccgcattagatgaaaaatggaatgaatttaaatcatcttatttagagaccgttccgttaccctgtcaattaatgtacgcgttagaaccacgtaaggagattgatgtttcagaagttaaaactttatcatcttatatagatttcgaaaatactaaatcagatatcgatgttataaaatctatatcctcgatttttggatattctaacgaaaactgtaacacgatagtattcggcatctataaggataatttactactgagtataaataattcattttactttaacgatagtctgttaataaccaatactaaaagtgataatataataaatataggttactagattaaaaatggtgttccaactcgtgtgctctacatgcggtaaagatatttctcacgaacgatataaattgattatacgaaaaaaatcattaaaggatgtactcgtcagtgtaaagaacgaatgttgtaggttaaaattatctacacaaatagaacctcaacgtaacttaacagtgcaacctctattggatataaactaatatggatccggttaattttatcaagacatatgcgcctagaggttctattatttttattaattataccatgtcattaacaagtcatttgaatccatcgatagaaaaacatgtgggtatttattatggtacgttattatcggaacacttggtagttgaatctacctatagaaaaggagttcgaatagtcccattggatagtttttttgaaggatatcttagtgcaaaagtatacatgttagagaatattcaagttatgaaaatagcagctgatacgtcattaactttattgggtattccgtatggatttggtcatgatagaatgtattgttttaaattggtagctgactgttataaaaatgccggtgttgaaacatcgtctaaacgaatattaggtaaagatatttttctgagccaaaacttcacagacgataatagatggataaagatatatgattctaataatttaacattttggcaaattgattaccttaaagggtgagttaatatgcataactactcctccgttgttttttccctcgttctttttcttaacgttgtttgccatcactctcataatgtaaagatattctaaaatggtaaacttttgcatatcggacgcagaaattggtataaatgttgtaattgtattatttcccgtcaatggactagtcacagctccatcagttttatatcctttagagtatttctcactcgtgtctaacattctagagcattccatgatctgtttatcgttgatattggccggaaagatagattttttattttttattatattactattggcaattgtagatataacttctggtaaatatttttctaccttttcaatctcttctattttcaagccggctatatattctgctatattgttgctagtatcaataccttttcttgctaagaagtcatatgtggtattcactatatcagttttaactggtagttccattagcctttccacttctgcagaataatcagaaattggttctttaccagaaaatccagctactataataggctcaccgatgatcattggcaaaatcctatattgtaccagattaatgagagcatatttcatttccaataattctgctagttcttgagacattgatttatttgatgaatctagttggttctctagatactctaccatttctgccgcatacaataacttgttagataaaatcagggttatcaaagtgtttagcgtggctagaatagtgggcttgcatgtattaaagaatgcggtagtatgagtaaaccgttttaacgaattatatagtctccagaaatctgtggcgttacatacatgagccgaatgacatcgaagattgtccaatatttttaatagctgctctttgtccattatttctatatttgactcgcaacaattgtagataccattaatcactgattcctttttcgatgccggacaatagcacaattgtttagctttggactctatgtattcagaattaatagatatatctcttaatacagattgcactatacattttgaaactatgtcaaaaattgtagaacgacgctgttctgcagccatttaactttaaataatttacaaaaatttaaaatgagcatccgtataaaaatcgataaactgcgccaaattgtggcatatttttcagagttcagtgaagaagtgtctataaatgtagactcgacggatgagttaatgtatatttttgccgccttgggcggatctgtaaacatttgggccattatacctctcagtgcatcagtgttctaccgcggagccgaaaatattgtgtttaatcttccggtgtccaaggtaaaatcgtgtttgtgtagttttcacaatgatgccatcatagatatagaacctgatctggaaaataatctagtaaaactttctagttatcatgtagtaagtgtcgattgtaacaaggaactgatgcctattaggacagatactactatttgtctaagtatagatcaaaagaaatcttacgtgtttaattttcacaagtatgaagaaaaatgttgtggtagaaccgtcattcatttagaatggttgttgggctttatcaagtgtattagtcagcatcagcatttggctattatgtttaaagatgacaatattattatgaagactcctggtaatactgatgcgttttccagggaatattctatgactgaatgttctcaagaactacaaaagttttctttcaaaatagctatctcgtctctcaacaaactacgaggattcaaaaagagagtcaatgtttttgaaactagaatcgtaatggataatgacgataacattctaggaatgttgttttcggatagagttcaatcctttaagatcaacatctttatggcgtttttagattaatactttcaatgagataaatatgggtggcggagtaagtgttgagctccctaaacgggatccgcctccgggagtacccactgatgagatgttattaaacgtggataaaatgcatgacgtgatagctcccgctaagcttttagaatatgtgcatataggaccactagcaaaagataaagaggataaagtaaagaaaagatatccagagtttagattagtcaacacaggacccggtggtctttcggcattgttaagacaatcgtataatggaaccgcacccaattgctgtcgcacttttaatcgtactcattattggaagaaggatggaaagatatcagataagtatgaagagggtgcagtattagaatcgtgttggccagacgttcacgacactggaaaatgcgatgttgatttattcgactggtgtcagggggatacgttcgatagaaacatatgccatcagtggatcggttcagcctttaataggagtgatagaactgtagagggtcaacaatcgttaataaatctgtataataagatgcaaacattatgtagtaaagatgctagtgtaccaatatgtgaatcatttttgcatcatttacgcgcacacaatacagaagatagcaaagagatgatcgattatattctaagacaacagtctgcggactttaaacagaaatatatgagatgtagttatcccactagagataagttagaagagtcattaaaatatgcggaacctcgagaatgttgggatccagagtgttcgaatgccaatgttaatttcttactaacacgtaattataataatttaggactttgcaatattgtacgatgtaatactagcgtgaacaacttacagatggataaaacttcctcattaagattgtcatgtggattaagcaatagtgatagattttctactgttcccgtcaatagagcaaaagtagttcaacataatattaaacattcgttcgacctaaaattgcatttgatcagtttattatctctcttggtaatatggatactaattgtagctatttaaatgggtgccgcggcaagcatacagacgacggtgaatacactcagcgaacgtatctcgtctaaattagaacaagaagcgaacgctagtgctcaaacaaaatgtgatatagaaatcggaaatttttatatccgacaaaaccatggatgtaacctcactgttaaaaatatgtgctctgcggacgcggatgctcagttggatgctgtgttatcagccgctacagaaacatatagtggattaacaccggaacaaaaagcatacgtgccagctatgtttactgctgcgttaaacattcagacaagtgtaaacactgttgttagagattttgaaaattatgtgaaacagacttgtaattctagcgcggtcgtcgataacaaattaaagatacaaaacgtaatcatagatgaatgttacggagccccaggatctccaacaaatttggaatttattaatacaggatctagcaaaggaaattgtgccattaaagcgttgatgcaattgacgactaaggccactactcaaatagcacctagacaagttgctggtacaggagttcagttttatatgattgttatcggtgttataatattggcagcgttgtttatgtactatgccaagcgtatgctgttcacatccaccaatgataaaatcaaacttattttagccaataaggaaaacgtccattggactacttacatggacacattctttagaacttctccgatggttattgctaccacggatatacaaaactgaaaatatattgataatattttaatagattaacatggaagttatcgctgatcgtctagacgatatagtgaaacaaaatatagcggatgaaaaatttgtagattttgttatacacggtctagagcatcaatgtcctgctatacttcgaccattaattaggttgtttattgatatactattatttgttatagtaatttatatttttacggtacgtctagtaagtagaaattatcaaatgttgttggtggcgctagtcatcacattaactattttttattactttatactataatagtactagactgacttctaacaaacatctcacctgccataaataaatgcttgatattaaagtcttctatttctaacactattccatctgtggaaaataatactctgacattatcgctaattgacacatcggtgagtgatatgcctataaagtaataatcttctttgggcacatataccagtgtaccaggttctaacaacctatttactggtgctcctgtagcatactttttctttaccttgagaatatccatcgtttgcttggtcaatagcgatatgtgattttttatcaaccactcgaaaaagtaattggagtgttcatatcctctacgggctattgtctcatggccgtgtatgaaatttaagtaacacgactgtggtagatttgttctatagagccggttgccgcaaatagatagaactaccaatatgtctgtacaaatgttaaacattaattgattaacagaaaaaacaatgttcgttctgggaatagaaaccagatcaaaacaaaattcgttagaatatatgccacgtttatacattgaatataaaataactacagtttgaaaaataacagtatcatttaaacatttaacttgcggggttaatctcacaactttactgtttttaaactgttcaaaatatagcatcgatccatgagaaatacgtttagccgcctttaatagaggaaatcccaccgcctttctggatctcaccaacgacgatagttctgaccagcaactcatttcttcatcatccacctgttttaacatataataggcaggagatagatatccgtcattgcaatattccttctcgtaggcacacaatctaatattgataaaatctccattctcttctctgcatttattatcttgtttcggtggctgattaggctgtagtcttggtttaggctttggtatatcgttgttgaatctattttggtcattaaatctttcatttcttcctggtatatttttatcacctcgtttggttggatttttgtctatattatcgtttgtaacatcggtacgggtattcatttatcacaaaaaaaacttctctaaatgagtctactgctagaaaacctcatcgaagaagataccatattttttgcaggaagtatatctgagtatgatgatttacaaatggttattgccggcgcaaaatccaaatttccaagatctatgctttctatttttaatatagtacctagaacgatgtcaaaatatgagttggagttgattcataacgaaaatatcacaggagcaatgtttaccacaatgtataatataagaaacaatttgggtctaggagatgataaactaactattgaagccattgaaaactatttcttggatcctaacaatgaagttatgcctcttattattaataatacggatatgactgccgtcattcctaaaaaaagtggtaggagaaagaataagaacatggttattttccgtcaaggatcatcacctatcttgtgtattttcgaaactcgtaaaaagattaatatttataaagaaaatatggaatccgcatcgactgagtatacacctatcggagacaacaaggctttgatatctaaatatgcgggaattaatatcctaaatgtgtattctccttccacatccataagattgaatgccatttacggattcaccaataaaaataaactagagaaacttagtactaataaggaactagaatcgtatagttctagccctcttcaagaacccattaggttaaatgattttctgggactattggaatgtgttaaaaagaatattcctctaacagatattccgacaaaggattgattactataaatggagaatgttcctaatgtatactttaatcctgtgtttatagagcccacgtttaaacattctttattaagtgtttataaacacagattaatagttttatttgaagtattcgttgtattcattctaatatatgtattttttagatctgaattaaatatgttcttcatgcctaaacgaaaaatacccgatcctattgatagattacgacgtgctaatctagcgtgtgaagacgataaattaatgatctatggattaccatggatgacaactcaaacatctgcgttatcaataaatagtaaaccgatagtgtataaagattgtgcaaagcttttgcgatcaataaatggatcacaaccagtatctcttaacgatgttcttcgcagatgatgattcattttttaagtatttggctagtcaagatgatgaatcttcattatctgatatattgcaaatcactcaatatctagactttctgttattattattgatccaatcaaaaaataaattagaagccgtgggtcattgttatgaatctctttcagaggaatacagacaattgacaaaattcacagactttcaagattttaaaaaactgtttaacaaggtccctattgttacagatggaagggtcaaacttaataaaggatatttgttcgactttgtgattagtttgatgcgattcaaaaaagaatcctctctagctaccaccgcaatagatcctattagatacatagatcctcgtcgcgatatcgcattttctaacgtgatggatatattaaagtcgaataaagtgaacaataattaattctttattgtcatcatgaacggcggacatattcagttgataatcggccccatgttttcaggtaaaagtacagaattaattagacgagttagacgttatcaaatagctcaatataaatgcgtgactataaaatattctaacgataatagatacggaacgggactatggacgcatgataagaataattttgaagcattggaagcaactaaactatgtgatgtcttggaatcaattacagatttctccgtgataggtatcgatgaaggacagttctttccagacattgttgaattctgtgagcgtatggcaaacgaaggaaaaatagttatagtagccgcactcgatgggacatttcaacgtaaaccgtttaataatattttgaatcttattccattatctgaaatggtggtaaaactaactgctgtgtgtatgaaatgctttaaggaggcttccttttctaaacgattgggtgaggaaaccgagatagaaataataggaggtaatgatatgtatcaatcggtgtgtagaaagtgttacatcgactcataatattatattttttatctaaaaaactaaaaataaacattgattaaattttaatataatacttaaaaatggatgttgtgtcgttagataaaccgtttatgtattttgaggaaattgataatgagttagattacgaaccagaaagtgcaaatgaggtcgcaaaaaaactaccgtatcaaggacagttaaaactattactaggagaattattttttcttagtaagttacagcgacacggtatattagatggtgccaccgtagtgtatataggatcggctcctggtacacatatacgttatttgagagatcatttctataatttaggagtgatcatcaaatggatgctaattgacggccgccatcatgatcctattttaaatggattgcgtgatgtgactctagtgactcggttcgttgatgaggaatatctacgatccatcaaaaaacaactgcatccttctaagattattttaatttctgatgtaagatccaaacgaggaggaaatgaacctagtacggcggatttactaagtaattacgctctacaaaatgtcatgattagtattttaaaccccgtggcatctagtcttaaatggagatgcccgtttccagatcaatggatcaaggacttttatatcccacacggtaataaaatgttacaaccttttgctccttcatattcagctgaaatgagattattaagtatttataccggtgagaacatgagactgactcgagttaccaaattagacgctgtaaattatgaaaaaaagatgtactaccttaataagatcgtccgtaacaaagtagttgttaactttgattatcctaatcaggaatatgactattttcacatgtactttatgctgaggaccgtgtactgcaataaaacatttcctactactaaagcaaaggtactatttctacaacaatctatatttcgtttcttaaatattccaacaacatcaactgaaaaagttagtcatgaaccaatacaacgtaaaatatctagcaaaaattctatgtctaaaaacagaaatagcaagagatccgtacgcggtaataaatagaaacgtgctactgagatatactaccgatatagagtataatgatttagttactttaataaccgttagacataaaattgattctatgaaaactgtgtttcaggtatttaacgaatcatccataaattatactccggttgatgatgattatggagaaccaatcattataacatcgtatcttcaaaaaggtcataacaagtttcctgtaaattttctatacatagatgtggtaatatctgacttatttcctagctttgttagactagatactacagaaactaatatagttaatagtgtactacaaacaggcgatggtaaaaagactcttcgtcttcccaaaatgttagagacggaaatagttgtcaagattctctatcgccctaatataccattaaaaattgttagatttttccgcaataacatggtaactggagtagagatagccgatagatctgttatttcagtcgctgattaatcaattagtagagatgagataagaacattataataatcaataatattatcttatatctcgtttagaaaaatgctaatattaaaatagctaacgctagtaatccaatcggaagccatttgatatctataatagggtatctaatttcctgattcagatagcggacagctatattctcggtagctactcgtttggaatcacaaacattatttacatctaatttactatctgtaatggaaacgtttcccaatgaaatggtacaatccgatacattgcattttgttatatttttttttaaagaggctggtaacaacgcatcgcttcgtttacatggctcgtaccaacaataatagggtaatcttgtatctattcctatccgtactatgcttttatcaggataaatacatttacatcgtatatcgtctttgttagcatcacagaatgcataaatttgttcgtccgtcatgataaaaatttaaagtgtaaatataactattatttttatagttgtaataaaaagggaaatttgattgtatactttcggttctttaaaagaaactgacttgataaaaatggctgtaatctctaaggttacgtatagtctatatgatcaaaaagagattaatgctacagatattatcattagtcatgttaaaaatgacgacgatatcggtaccgttaaagatggtagactaggtgctatggatggggcattatgtaaaacttgtgggaaaacggaattggaatgtttcggtcactggggtaaagtaagtatttataaaactcatatagttaagcctgaatttatttcagaaattattcgtttactgaatcatatatgtattcactgcggattattgcgttcacgagaaccgtattccgacgatattaacctaaaagagttatcgggacacgctcttaggagattaaaggataaaatattatccaagaaaaagtcatgttggaacagcgaatgtatgcaaccgtatcaaaaaattactttttcaaagaaaaaggtttgtttcgtcaacaagttggatgatattaacgttcctaattctctcatctatcaaaagttaatttctattcatgaaaagttttggccattattagaaattcatcaatatccagctaacttattttatacagactactttcccatccctccgctgattattagaccggctattagtttttggatagatagtatacccaaagagaccaatgaattaacttacttattaggtatgatcgttaagaattgtaacttgaatgctgatgaacaggttatccagaaggcggtaatagaatacgatgatattaaaattatttctaataacactaccagtatcaatttatcatatattacatccggcaaaaataatatgattagaagttatatcgtcgcccgacgaaaagatcagaccgctagatctgtaattggtcccagtacatctatcaccgttaatgaggtaggaatgcccgcatatattagaaatacacttacagaaaagatatttgttaatgcctttacagtggataaagttaaacaactattagcgtcaaaccaagttaaattttactttaataaacgattaaaccaattaacaagaatacgccaaggaaagtttatcaaaaataaaatacatttattgcctggtgattgggtagaagtagctgttcaagaatatacaagtattatttttggaagacagccgtctctacatagatacaacgtcatcgcttcatctatcagagctaccgaaggagatactatcaaaatatctcccggaattgccaactctcaaaatgctgatttcgacggagatgaagaatggatgatattggagcaaaatcctaaagccgtaattgaacaaagtattcttatgtatccgacgacgttactcaaacacgatattcatggagcccccgtttatggatctattcaagatgaaatcgtagcagcgtattcattgtttaggatacaagatctttgtttagatgaagtattgaacatcttggggaaatatggaagagagttcgatcctaaaggtaaatgtaaattcagcggtaaagatatctatacttacttgataggtgaaaagattaattatccgggtctcttaaaggatggtgaaattattgcaaacgacgtagatagtaattttgttgtggctatgaggcatctgtcattggctggactcttatccgatcataagtcgaacgtggaaggtatcaactttattatcaagtcatcttatgtttttaagagatatctatctatttacggttttggggtgacattcaaagatctgagaccaaattcgacgttcactaataaattggaggccatcaacgtagaaaaaatagaacttatcaaagaagcatacgccaaatatctcaacgatgtaagagacgggaaaatagttccattatctaaagctttagaggcggactatgtggaatccatgttatccaacttgacaaatcttaatatccgagagatagaagaacatatgagacaaacgctgatagatgatccagataataacctcctgaaaatggccaaagcgggttataaagtaaatcctacagaactaatgtatattctaggtacgtatggacaacaaaggattgatggtgaaccagcagagactcgagtattgggtagagtcttaccttactatcttccagactctaaggatccagaaggaagaggttacattcttaattctttaacaaaaggattaacgggttctcaatattacttttcgatgctggttgccagatctcaatctactgatatcgtctgtgaaacatcacgtaccggaacactggctagaaaaatcattaaaaagatggaggatatggtggtcgacggatacggacaagtagttataggtaatacgctcatcaagtacgccgccaattataccaaaattctaggctcagtatgtaaacctgtagatcttatctatccagatgagtccatgacttggtatttggaaattagtgctctgtggaataaaataaaacagggattcgtttactctcagaaacagaaacttgcaaagaagacattggcgccgtttaatttcctagtattcgtcaaacccaccactgaggataatgctattaaggttaaggatctgtacgatatgattcataacgtcattgatgatgtgagagagaaatacttctttacggtatctaatatagattttatggagtatatattcttgacgcatcttaatccttctagaattagaattacaaaagaaacggctatcactatctttgaaaagttctatgaaaaactcaattatactctaggtggtggaactcctattggaattatttctgcacaggtattgtctgagaagtttacacaacaagccctgtccagttttcacactactgaaaaaagtggtgccgtcaaacaaaaacttggtttcaacgagtttaataacttgactaatttgagtaagaataagaccgaaattatcactctggtatccgatgatatctctaaacttcaatctgttaagattaatttcgaatttgtatgtttgggagaattaaatccagacatcactcttcgaaaagaaacagataaatatgtagtagatataatagttaatagattatacatcaagagagcagaaataaccgaattagttgtcgaatatatgattgaacgatttatctcctttagcgtcattgtaaaggaatggggtatggagacattcattgaggacgaggataatattagatttactgtctacctaaatttcgttgaaccggaagaattgaatcttagtaagtttatgatggttcttccgggtgccgccaacaagggcaagattagtaaattcaagattcctatctctgattatacgggttatgacgacttcaatcaaacaaaaaagctcaataagatgactgtagaactcatgaatctaaaagaattgggttctttcgatttggaaaacgtcaacgtgtatcctggagtatggaatacatacgatatcttcggtatcgaggccgctcgtgaatacttgtgcgaagccatgttaaacacctatggagaagggttcgattatctgtatcagccttgtgatcttctcgctagtttactatgtgctagttacgaaccagaatcagttaataaattcaagttcggtgcagctagtactcttaagagagctacgttcggagacaataaagcattgttaaacgcggctcttcataaaaagtcagaacctattaacgataatagtagctgccacttttttagcaaggtccctaatataggaactggatattacaaatactttatcgacttgggtcttctcatgagaatggaaaggaaactatctgataagatatcttctcaaaagatcaaggaaatggaagaaacagaagacttttaattcttatcaataacatatttttctatgatctgtcttttaaacgatggattttccacaaatgcgcctctcaagtccctcatagaatgatacacgtataaaaaatatagcataggcaatgactccttatttttagacattagatatgccaaaatcatagccccgcttctatttactcccgcagcacaatgaaccaacacgggctcgtttcgttgatcacatttagataaaaaggcggttacgtcgtcaaaatatttactaatatcggtagttgtatcatctaccaacggtatatgaataatattaatattagagttaggtaatgtatatttatccatcgtcaaatttaaaacatatttgaacttaacttcagatgatggtgcatccatagcatttttataatttcccaaatacacattattggttacccttgtcattatagtgggagatttggctttgtgcatatctccagttgaacgtagtagtaagtatttatacaaacttttcttatccatttataacgtacaaatggataaaactactttatcggtaaacgcgtgtaatttagaatacgttagagaaaaggctatagtaggcgtacaagcagccaaaacatcaacacttatattctttgttattatattggcaattagtgcgctattactctggtttcagacgtctgataatccagtctttaatgaattaacgagatatatgcgaattaaaaatacggttaacgattggaaatcattaacggatagcaaaacaaaattagaaagtgatagaggtagacttctagccgctggtaaggatgatatattcgacttcaaatgtgtggatttcggcgcctattttatagctatgcgattggataagaaaacatatctgccgcaagctattaggcgaggtactggagacgcgtggatggttaaaaaggcggcaaaggtcgatccatctgctcaacaattttgtcagtatttgataaaacacaagtctaataatgttattacttgtggtaatgagatgttaaatgaattaggttatagcggttattttatgtcaccgcattggtgttccgattttagtaatatggaatagtgttagataaatgcggtaacgaatgttcctgtaaggaaccataacagtttagatttaacgttaaagatgagcataaacataataaacaaaattacaatcaaacctataacattaatatcaaacaatccaaaaaatgaaatcagtggagtagtaaacgcgtacataactcctggataacgtttagcagctgccgttcctattctagaccaaaaattcggtttcatgttttcgaagcggtgttctgcaacaagtcggggatcgtgttctacatatttggcggcgttatccagtatctgcctattgatcttcatttcgttttcgattctggctatttcaaaataaaatcccgatgatagacctccagactttataatttcatctacgatgttcagcgccgtagtaactctaataatataggctgataagctaacatcataccctcctgtatatgtgaatatggcatgatttttgtccattacaagctcggttttaactttattgcctgtaataatttctctcatctgtaggatatctatttttttgtcatgcattgccttcaagacgggacgaagaaacgtaatatcctcaataacgttatcgttttctacaataactacatattctacctttttattttctaactcggtaaaaaaattagaatcccatagggctaaatgtctagcgatatttcttttcgtttcctctgtacacatagtgttacaaaaccctgaaaagaagtgagtatacttgtcatcatttctaatgtttcctccagtccactgtataaacgcataatccttgtaatgatctggatcatccttgactaccacaacatttcttttttctggcataacttcgttgtcctttacatcatcgaacttctgatcattaatatgctcatgaacattaggaaatgtttctgatggaggtctatcaataactggcacaacaataacaggagttttcaccgccgccatttagttattgaaattaatcatatacaactctttaatacgagttatattttcgtctatccattgtttcacatttacatatttcgacaaaaagatataaaatgcgtattccaatgcttctctgtttaatgaattactaaaatatacaaacacgtcactgtctggcaataaatgatatcttagaatattgtaacaatttattttgtattgcacatgttcgtgatctatgagttcttcttcgaatggcataggatctccgaatctgaaaacgtataaataggagttagaataataatatttgagagtattggtaatatataaactctttagcggtataattagtttttttctctcaatttctatttttagatgtgatggaaaaatgactaattttgtagcattagtatcatgaactctaatcaaaatcttaatatcttcgtcacacgttagctctttgaagtttttaagagatgcatcagttggttctacagatggagtaggtgcaacaattttttgttctacacatgtatgtactggagccattgttttaactataatggtgcttgtatcgaaaaactttaatgcagatagcggaagctcttcgccgcgactttctacatcgtaattgggttctaacgccgatctctgaatggatactagttttctaagttctaatgtgattctctgaaaatgtaaatccaattcctccggcattatagatgtgtatacatcggtaaataaaactatagtatccaacgatcccttctcgcaaattctagtcttaaccaaaaaatcgtatataaccacggagatggcgtatttaagagtggattcttctaccgttttgttcttggatgtcatataggaaactataaagtccgcactactgttaagaatgattactaacgcaactatatagttcaaattaagcattttggaaacataaaataactctgtagacgatacttgactttcgaataagtttgcagacaaacgaagaaagaacagacctctcttaatttcagaagaaaactttttttcgtattcctgacgtctagagtttatatcaataagaaagttaagaattagtcggttaatgttgtatttcattacccaagtttgagatttcataatattatcaaaagacatgataatattaaagataaagcgctgactatgaacgaaatagctatatggttcgctcaagaatatagtcttgttaaacgtggaaacgataactgtatttttaatcacgtcagcggcatctaaattaaatataggtatatttattccacacactctacaatatgccacaccatcttcataataaataaattcgttagcaaaattattaattttagtgaaatagttagcgtcaactttcatagcttccttcaatctaatttgatgctcacacggtgcgaattccactctaacatcccttttccatgcctcaggttcatcgatctctataatatctagtttcttgcgtttcacaaacacgggctcgtctctcgcgatgagatctgtatagtaactatgtaaatgataactagatagaaagatgtagctatatagatgacgatcctttaagagaggtataataactttaccccaatcagataaactattgttatggtcttcggaaaaagaatttttataaatttttccagtattttccaaatatacgtacttgacatctaaaaaatccttaatgataataggaatggataatccgtctattttataaagaaatacatatcgcacattatacttttttttggaaatgggaataccgatgtgtctacataaatatgcaaagtctaaatattttttagagaatcttagttggtccaaattcttttccaagtacggtaatagatttttcatattgaacggtatcttcttaatctctggttctagttccgcattaaatgatgaaactaagtcactatttttataactaacgattacatcacctctaacatcatcatttaccagaatactgatcttcttttgtcgtaaatacatgtctaatgtgttaaaaaaaagatcatacaagttatacgtcatttcatctgtggtattcttgtcattgaaggataaactcgtactaatctcttctttaacagcctgttcaaatttatatcctatatacgaaaaaatagcaaccagtgtttgatcatccgcgtcaatattctgttctatcgtagtgtataacaatcgtatatcttcttctgtgatagtcgatacgttataaaggttgataacgaaaatatttttatttcgtgaaataaagtcatcgtaggattttggacttatattcgcgtctagtagatatgcttttatttttggaatgatctcaattagaatagtctctttagagtccatttaaagttacaaacaactaggaaattggtttatgatgtataatttttttagtttttatagattctttattctatacttaaaaaatgaaaataaatacaaaggttcttgagggttgtgttaaattgaaagcgagaaataatcataaattatttcattatcgcgatatccgttaagtttgtatcgtaatggcgtggtcaattacaaataaagcggatactagtagcttcacaaagatggctgaaatcagagctcatctaaaaaatagcgctgaaaataaagataaaaacgaggatattttcccggaagatgtaataattccatctactaagcccaaaaccaaacgagccactactcctcgtaaaccagcggctactaaaagatcaaccaaaaaggaggaagtggaagaagaagtagttatagaggaatatcatcaaacaactgaaaaaaattctccatctcctggagtcagcgacattgtagaaagcgtggccgctgtagagctcgatgatagcgacggggatgatgaacctatggtacaagttgaagctggtaaagtaaatcatagtgctagaagcgatctttctgacctaaaggtggctaccgacaatatcgttaaagatcttaagaaaattattactagaatctctgcagtatcgacggttctagaggatgttcaagcagctggtatctctagacaatttacttctatgactaaagctattacaacactatctgatctagtcaccgagggaaaatctaaagttgttcgtaaaaaagttaaaacttgtaagaagtaaatgcgtgcacttttttataaagatggtaaactctttaccgataataattttttaaatcctgtatcagacgataatccagcgtatgaggttttgcaacatgttaaaattcctactcatttaacagatgtagtagtatatgaacaaacgtgggaggaggcgttaactagattaatttttgtgggaagcgattcaaaaggacgtagacaatacttttacggaaaaatgcatgtacagaatcgcaacgctaaaagagatcgtatttttgttagagtatataacgttatgaaacgaattaattgttttataaacaaaaatataaagaaatcgtccacagattccaattatcagttggcggtttttatgttaatggaaactatgttttttattagatttggtaaaatgaaatatcttaaggagaatgaaacagtagggttattaacactaaaaaataaacacatagaaataagtcccgatgaaatagttatcaagtttgtaggaaaggacaaagtttcacatgaatttgttgttcataagtctaatagactatataagccgctattgaaactgacggatgattctagtcccgaagaatttctgttcaacaaactaagtgaacgaaaggtatacgaatgtatcaaacagtttggtattagaatcaaggatctccgaacgtatggagtcaattatacgtttttatataatttttggacaaatgtaaagtccatatctcctcttccatcaccaaaaaagttaatagcgttaactatcaaacaaactgctgaagtggtaggtcatactccatcaatttcaaaaagagcttacatggcaacgactattttagaaatggtaaaggataaaaattttttagatgtagtatctaaaactacgttcgatgaattcctatctatagtcgtagatcacgttaaatcatctacggatggatgatatagatctttacacaaataattacaagaccgataaatggaaatggataagcgtatgaaatctctcgcaatgacagctttcttcggagagctaaacacattagatattatggcattgataatgtctatatttaaacgccatccaaacaataccattttttcagtggataaggatggtcagtttatgattgatttcgaatacgataattataaggcttctcaatatttggatctgaccctcactccgatatctggagatgaatgcaagactcacgcatcgagtatagccgaacaattggcgtgtgtggatattattaaagaggatattagcgaatatatcaaaactactccccgtcttaaacgatttataaaaaaataccgcaatagatcagatactcgtatcagtcgagatacagaaaagcttaaaatagctctagctaaaggcatagattacgaatatataaaagacgcttgttaataagtaaatgaaaaaaaactagtcgtttataataaaacacaatatggatgccaacatagtatcatcttctactattgcaacgtatatagacgctttagcaaagaatgcttcagaattagaacagaggtctaccgcatacgaaataaataatgaattggaactagtatttattaagccgccattaattactttgacaaatgtagtgaatatctctacgattcaggaatcgtttattcgatttaccgttactaataaggaaggtgtcaaaattagaactaagattccattatctaaggtacatggtctagatgtaaaaaatgtacagttagtagatgctatagataacatagtttgggaaaagaaatcattagtgacggaaaatcgtcttcacaaagaatgcttgttgagactatcgacagaggaacgtcatatatttttggattacaagaaatatggatcctctatccgactagaattagtcaatcttattcaagcaaaaacaaaaaactttacgatagactttaagctaaaatattttctaggatccggtgcccaatctaaaagttctttgttgcacgctattaatcatccaaagtcaaggcctaatacatctctggaaatagaattcacacctagagacaatgaaaaagttccatatgatgaactaataaaggaattgacgactctatcacgtcatatatttatggcttctccagagaatgtaattctttctccgcctattaacgcacctataaagacttttatgttgcctaaacaagatatagtaggtctggatctggaaaatctatatgccgtaactaagactgacggcattcctataactatcagagttacatcaaacgggttgtattgttattttacacatcttgggtatattattagatatccagttaagagaataatagattccgaagtagtagtctttggtgaggcagttaaggataagaactggaccgtatatctcattaagctaatagagcctgtgaatgcaatcaatgatagactagaagaaagtaagtatgttgaatctaaactagtggatatttgtgatcggatagtattcaagtcaaagaaatatgaaggtccgtttactacaactagtgaagtcgtcgatatgttatctacatatttaccaaagcaaccagaaggtgttattctgttctattcaaagggacctaaatctaacattgattttaaaattaaaaaggaaaatactatagaccaaactgcaaatgtagtatttaggtacatgtccagtgaaccaattatctttggagaatcgtctatctttgtagagtataagaaatttagcaacgataaaggctttcctaaagaatatggttctggtaagattgtgttatataacggcgttaattatctaaataatatctattgtttggaatatattaatacacataatgaagtgggtattaagtccgtggttgtacctattaagtttatagcagaattcttagttaatggagaaatacttaaacctagaatcgataaaaccatgaaatatattaactcagaagattattatggaaatcaacataatatcatagtcgaacatttaagagatcaaagcatcaaaataggagatatctttaacgaggataaactatcggatgtgggacatcaatacgccaataatgataaatttagattaaatccagaagttagttattttacgaataaacgaactagaggaccgttgggaattttatcaaactacgtcaagactcttcttatttctatgtattgttccaaaacatttttagacgattccaacaaacgaaaggtattggcgattgattttggaaacggtgctgacctggaaaaatacttttatggagagattgcgttattggtagcgacggatccggatgctgatgctatagctagaggaaatgaaagatacaacaaattaaactctggaattaaaaccaagtactacaaatttgactacattcaggaaactattcgatccgatacatttgtctctagtgtcagagaagtattctattttggaaagtttaatatcatcgactggcagtttgctatccattattcttttcatccgagacattatgctaccgtcatgaataacttatccgaactaactgcttctggaggcaaggtattaatcactaccatggacggagacaaattatcaaaattaacagataaaaagacttttataattcataagaatttacctagtagcgaaaactatatgtctgtagaaaaaatagctgatgatagaatagtggtatataatccatcaacaatgtctactccaatgactgaatacattatcaaaaagaacgatatagtcagagtgtttaacgaatacggatttgttcttgtagataacgttgatttcgctacaattatagaacgaagtaaaaagtttattaatggcgcatctacaatggaagatagaccgtctacaaaaaactttttcgaactaaatagaggagccattaaatgtgaaggtttagatgtcgaagacttacttagttactatgttgtttatgtcttttctaagcggtaaataataatatggtatgggttctgatatccccgttctaaatgcattaaataattccaatagagcgatttttgttcctataggaccttccaactgtggatactctgtattgttaatagatatattaatacttttgtcgggtaacagaggttctacgtcttctaaaaataaaagtttgataacatctggcctgttcataaataaaaacttggcgattctatatatactcttattatcaaatctagccattgtcttatagatgtgagctactgtaggtgtaccatttgattttctttctaatactatatatttctctcgaagaagttcttgcacatcatctgggaataaaatactactgttgagtaaatcagttattttttttatatcgatattgatggacatttttatagttaaggataataagtatcccaaagtcgataacgacgataacgaagtatttatacttttaggaaatcacaatgactttatcagatcaaaattaacaaaattaaaggagcatgtatttttttctgaatatattgtgactccagatacatatggatctttatgcgtcgaattaaatgggtctagttttcagcacggtggtagatatatagaggtggaggaatttatagatgctggaagacaagttagatggtgttctacatccaatcatatatctgaagatatacccgaagatatacacactgataaatttgtcatttatgatatatacacttttgacgctttcaagaataaacgattggtattcgtacaggtacctccgtcgttaggagatgatagctatttgactaatccgttattgtctccgtattatcgtaattcagtagccagacaaatggtcaatgatatgatttttaatcaagattcatttttaaaatatttattagaacatctgattagaagccactatagagtttctaaacatataacaatagttagatacaaggataccgaagaattaaatctaacgagaatatgttataatagagataagtttaaggcgtttgtattcgcttggtttaacggcgtttcggaaaatgaaaaggtactagatacgtataaaaaggtatctaatttgatataatgaattcagtgactgtatcacacgcgccatatactattacttatcacgatgattgggaaccagtaatgagtcaattggtagagttttataacgaagtagccagttggctgctacgagacgagacgtcgcctattcctgataagttctttatacagttgaaacaaccgcttagaaataaacgagtatgtgtgtgcggtatagatccgtatccgaaagatggaactggtgtaccgttcgaatcaccaaattttacaaaaaaatcaattaaggagatagcttcatctatatctagattaaccggagtaattgattataaaggttataaccttaatataatagacggggttataccctggaattattacttaagttgtaaattaggagaaacaaaaagtcacgcgatctactgggataagatttccaagttactgctgcagcatataactaaacacgttagtgttctttattgtttgggtaaaacagatttctcgaatatacgggcaaagttagaatccccggtaactaccatagtgggatatcatccagcggctagagaccgtcaattcgagaaagatcgatcatttgaaattatcaacgttttactggaattagacaacaaggtacctataaattgggctcaagggtttatttattaatgctttagtgaaattttaacttgtgttctaaatggatgcggctattagaggtaatgatgttatctttgttcttaagactataggtgtcccgtcagcgtgcagacaaaatgaagatccaagatttgtagaagcatttaaatgcgacgagttagaaagatatattgagaataatccagaatgtacactattcgaaagtcttagggatgaggaagcatactctatagtcagaattttcatggatgtagatttagacgcgtgtctagacgaaatagattatttaacggctattcaagattttattatcgaggtgtcaaactgtgtagctagattcgcgtttacagaatgcggcgccattcatgaaaatgtaataaaatccatgagatctaatttttcattgactaagtctacaaatagagataaaacaagttttcatattatctttttagacacgtataccactatggatacattgatagctatgaaacgaacactattagaattaagtagatcatctgaaaatccactaacaagatcgatagacactgccgtatataggagaaaaacaactcttcgggttgtaggtactaggaaaaatccaaattgcgacactattcatgtaatgcaaccacctcatgataatatagaagattacctattcacttacgtggatatgaacaacaatagttattacttttctctacaacgacgattggaggatttagttcctgataagttatgggaaccagggtttatttcattcgaagacgctataaaaagagtttcaaaaatattcattaattctataataaactttaatgatctcgatgaaaataattttacaacggtaccactggtcatagattacgtaacaccttgtgcattatgtaaaaaacgatcgcataaacatccgcatcaactatcgttggaaaatggtgctattagaatttacaaaactggtaatccacatagttgtaaagttaaaattgttccgttggatggtaataaactgtttaatattgcacaaagaattttagacactaactctgttttattaaccgaacgaggagaccatatagtttggattaataattcatggaaatttaacagcgaagaacccttgataacaaaactaattttgtcaataagacatcaactacctaaggaatattcaagcgaattactctgtccaagaaaacgaaagactgtagaagctaacatacgagacatgttagtagattcagtggagaccgatacctatccggataaacttccgtttaaaaatggtgtattggacctggtagacggaatgttttactctggagatgatgctaaaaaatatatgtgtactgtatcaaccggatttaaatttgacgatacaaagttcgtcgaagacagtccagaaatggaagagttaatgaatatcattaacgatatccaaccattaacggatgaaaataagaaaaatagagagctatatgaaaaaacattatctagttgtttatgcggtgctaccaaaggatgtttaacattcttttttggagaaactgcaactggaaagtcgacaaccaaacgtttgttaaagtctgctatcggtgacctgtttgttgagacgggtcaaacaattttaacagatgtattggataaaggacctaatccatttatcgctaacatgcatttgaaaagatctgtattctgtagcgaactacctgattttgcatgtagtgggtcaaagaaaatcagatctgataatattaaaaagttgacagaaccttgtgtcattggaagaccgtgtttctccaataaaattaataatagaaaccatgcgacaatcattatcgatactaattacaaacctgtttttgataggatagataacgcattaatgagaagaattgccgtcgtgcgattcagaacacacttttctcaaccttctggtagagaggctgctgaaaataatgacgcgtacgataaagtcaaactattagacgaggggttagatggtaaaatacaaaataatagatatagattcgcatttctatacttgttggtgaaatggtacagaaaatatcatgttcctattatgaaactatatcctacacccgaagagattcctgactttgcattctatctcaaaataggtactctgttggtatctagctctgtaaagcatattccattaatgacggacctctccaaaaagggatatatattgtacgataatgtggtcactcttccgttgactactttccaacagaaaatatccaagtattttaattctagactatttggacacgatatagagagcttcatcaatagacataagaaatttgccaatgttagtgatgaatatctgcaatatatattcatagaggatatttcatctccgtaaatatatgctcatatatttatagaagatatcacatatctaaatgaataccggaattatagatttatttgataatcatgttgatagtataccaactatattacctcatcagttagctactctagattatctagttagaactatcatagatgagaacagaagcgtgttattgttccatattatgggatcaggtaaaacaataatcgctttgttgttcgccttggtagcttccagatttaaaaaggtttacattctagtgccgaacatcaacatcttaaaaattttcaattataatatgggtgtagctatgaacttgtttaatgacgaattcatagctgagaatatctttattcattccacaacaagtttttattctcttaattataacgataacgtcattaattataacggattatctcgctacaataactctatttttatcgttgatgaggcacataatatctttgggaataatactggagaacttatgaccgtgataaaaaataaaaacaagattccttttctactattgtctggatctcccattactaacacacctaatactctgggtcatattatagatttaatgtccgaagagacgatagattttggtgaaattattagtcgtggtaagaaagtaattcagacacttcttaacgaacgcggtgtgaatgtacttaaggatttgcttaaaggaagaatatcatattacgaaatgcctgataaagatctaccaacgataagatatcacggacgtaagtttctagatactagagtagtatattgtcacatgtctaaacttcaagagagagattatatgattactagacgacagctatgttatcatgaaatgtttgataaaaatatgtataacgtgtcaatggcagtattgggacaacttaatctgatgaataatttagatactttatttcaggaacaggataaggaattgtacccaaatctgaaaataaataatggcgtgttatacggagaagaattggtaacgttaaacattagttccaaatttaaatactttattaatcggatacagacactcaacggaaaacattttatatacttttctaattctacatatggcggattggtaattaaatatatcatgctcagtaatggatattctgaatataatggttctcagggaactaatccacatatgataaacggcaaaccaaaaacatttgctatcgttactagtaaaatgaaatcgtctttagaggatctattagatgtgtataattctcctgaaaacgatgatggtagtcaattgatgtttttgttttcatcaaacattatgtccgaatcctatactctaaaagaggtaaggcatatttggtttatgactatcccagatactttttctcaatacaaccaaattcttggacgatctattagaaaattctcttacgccgatatttctgaaccagttaatgtatatcttttagccgccgtatattccgatttcaatgacgaagtgacgtcattaaacgattacacacaggatgaattaattaatgttttaccatttgacatcaaaaagctgttatatctaaaatttaagacgaaagaaacgaatagaatatactctattcttcaagagatgtctgaaacgtattctcttccaccacatccatcaattgtaaaagttttattgggagaattggtcagacaatttttttataataattctcgtattaagtataacgataccaagttacttaaaatggttacatcagttataaaaaataaagaagacgctaggaattacatagatgatattgtaaacggtcacttctttgtatcgaataaagtatttgataaatctcttttatacaaatacgaaaacgatattattacagtaccgtttagactttcctacgaaccatttgtttggggagttaactttcgtaaagaatataacgtggtatcttctccataaaactgatgagatatataaagaaataaatgtcgagctttgttaccaatggataccttccagttacattggagccacacgagctgacgttagacataaaaactaatattaggaatgccgtatataagacgtatctccatagagaaattagtggtaaaatggccaagaaaatagaaattcgtgaagacgtggaattacctctcggcgaaatagttaataattctgtagttataaacgttccgtgtgtaataacctacgcgtattatcacgttggggatatagttagaggaacattaaacatcgaagatgaatcaaatgtaactattcaatgtggagatttaatctgtaaactaagtagagattcgggtactgtatcatttagcgattcaaagtactgcttttttcgaaatggtaatgcgtatgacaatggcagcgaagtcactgccgttctaatggaggctcaacaaggtatcgaatctagttttgtttttctcgcgaatatcgtcgactcataagaaagagaatagcggtaagtataaacacgaatactatggcaataattgcgaatgttttattcccttcgatatatttttgataatatgaaaaacatgtctctctcaaatcggacaaccatctcataaaatagttatctcgcgctggcgaggtggttgccgctcgtataatctccccagaataatatacttgcgtgtcgtcgttcaatttatacggatttctatagttctctgttatataatgcggttttccatcatgattagacgacgacaatagtgttctaaatttagatagttgatcagaatgaatgtttattggcgttggaaaaattatccatgctgcgtctgcagagtggttgatagttgttcctagatatgtaaaataatccaacgtactaggtagcaaattgtctagataaaatactgaatcaaacggcgcagacgtattagcggatctaatggaatccaattgattgactatcttttgaaaatatacatttttatgatccgatacttgtaagaatatagaaataatgataagtccatcatcgtgtttttttgcctcttcataagaactatattttttcttattccaatgaacaagattaatctctccagagtatttgtacacatctatcaagtgattggatccataatcgtcttcctttccccaatatatatgtagtgatgataacacatattcattggggagaaaccctccacttatatatcctcctttaaaattaatccttactagttttccagtgttctggatagtggttggtttcgactcattataatgtatgtctaacggcttcaatcgcgcgttagaaattgcttttttagtttctatattaataggagatagttgttgcggcatagtaaaaatgaaatgataactgtttaaaaatagctcttagtatgggaattacaatggatgaggaagtgatatttgaaactcctagagaattaatatctattaaacgaataaaagatattccaagatcaaaagacacgcatgtgtttgctgcgtgtataacaagtgacggatatccgttaataggagctagaagaacttcattcgcgttccaggcgatattatctcaacaaaattcagattctatctttagagtatccactaaactattacggtttatgtactacaatgaactaagagaaatctttagacggttgagaaaaggttctatcaacaatatcgatcctcactttgaagagttaatattattgggtggtaaactagataaaaaggaatctattaaagattgtttaagaagagaattaaaagaggaaagtgatgaacgtataacagtaaaagaatttggaaatgtaattctaaaacttacaacacgggataaattatttaataaagtatatataggttattgcatggcgtgttttattaatcaatcgttggaggatttatcgcatactagtatttacaatgtagaaattagaaagattaaatcattaaatgattgtattaacgacgataaatacgaatatctgtcttatatttataatatgctagttaatagtaaatgaacttttacagatctagtataattagtcagattattaagtataatagacgactagctaagtctattatttgcaaggatgactctcaaattattacactcacggcattcgttaaccaatgcctatggtgtcataaacgagtatccgtgtccgctattttattaactactgataacaaaatattagtatgtaacagacgagatagttttctctattctgaaataattagaactagaaacatgtttagaaagaaacgattatttctgaattattccaattatttgtccaaacaggaaagaagtatactatcgtcatttttttctctatatccagctactgctgataatgatagaatagacgctatttatccgggtggcatacccaaaaggggtgagaatgttccagagtgtctatccagggaaatcaaagaagaagttaatatagacaattcttttgtattcatagacactcggttttttattcatggtatcatagaagataccattatcaacaaattttttgaggtaattttctttgtcggaagaatatctctaacgagtgatcaaattattgatacctttaaaagtaatcatgaaatcaaggatctaatatttttagatccgaattcaggtaatggactccaatacgaaattgcaaaatatgctctagatactgcaaaacttaaatgttacggccatagaggatgttattatgaatcattaaaaaaattaactgaggatgattgattagaaaatataaattaatttaccatcgtgtatttttataacgggattgtccggcatatcatgtagatagttaccgtctacatcgtatactcgaccatctacgcctttaaatcctctatttattgacattaatctattagaattggaataccaaatattagtaccctcaattagtttattggtaatattttttttagacgatagatcgatggctcttgaaaccaaggttttccaaccggactcattgtcgatcggtgagaagtctttttcattagcatgaatccattctaatgatgtatgtttaaacactctaaacaattggacaaattcttttgatttgctttgaatgatttcaaataggtcttcgtctacagtaggcataccattagataatctagccattataaagtgcacgtttacatatctacgttctggaggagtaagaacgtgactattgagacgaatggctcttcctactatctgacgaagagacgcctcgttccatgtcatatctaaaatgaagatatcattaattgagaaaaaactaataccctcgcctccactagaagagaatacgcatgttttaatgcattctccgttagtgtttgattcttggttaaactcagccaccgccttgattctagtatcttttgttctagatgagaactctatattagagataccaaagactttgaaatatagtaataagatttctattcctgactgattaacaaatggttcaaagactagacatttaccatgggatgctaatattcccaaacatacatctataaatttgacgcttttctcttttaattcagtaaatagagagatatcagccgcactagcatcccctttcaatagttctccctttttaaaggtatttaatgcggatttagaaaactctctatctcttaatgaatttttaaaatcattatatagtgttgctatctcttgcgcgtattcgccgggatcacgattttgtctttcaggaaagctatcgaacgtaaacgtagtagccatacgtctcagaattctaaatgatgatataccagtttttatttctgcgagtttagccttttgataaatctcttcttgcttttttgacatattaacgtatcgcattaatactgttttcttagcgaatgatgcagacccttctacgttatcaaaaatagaaaactcgttattaactatgtacgaacataggcctcctagtttggagactaattctttttcatcgactagacgtttattctcaaatagtgattggtgttgtaaggatcctggtcgtagtaagttaaccaacatggtgaattcttgcacactattgacgataggtgtagccgataaacaaatcatcttatggttttttaatgcgatggtcttggataaaaaattatatactgaacgagtaggacggatcttaccatcttctttgattaatgatttagaaatgaagttatgacattcatcaataatgacgcatattctactcttggaattaatagttttgatattagtaaaaaatttatttctaaaattttgatcatcgtaattaataaaaatacaatccttcgttatctctggagcgtatctgagtatagtgttcatccaaggatcttctatcaaagcctttttcaccaataagataatagcccaattcgtataaatatccttaagatgtttgagaatatatacagtagtcattgttttaccgacacccgtttcatggaacaataaaagagaatgcatactgtctaatcctaagaaaactcttgctacaaaatgttgataatccttgaggcgtactacgtccgaccccatcatttcaacgggcatattagtagttctgcgtaaggcataatcgatataggccgcgtgtgatttactcatttatgagtgataagtaataactatgttttaaaaatcacagcagtagtttaactagtcttctctgatgtttgttttcgatactttttgaatcagaagtcatactagaataaagcaacgagtgaacgtaatagagagcttcgtatactctattcgaaaactctaagaacttattaatgaattccgtatccactggattgtttaaaatactaaattgaacactgttcacatccttccaagaagaagacttagtgacggacttaacatgagacataaataaatccaaattttttttacaaacatcactagccaccataatggcgctatctttcaaccagctatcgcttacgcattttagcagtctaacatttttaaagagactacaatatattctcatagtatcgattacacctctaccgaataaagttggaagtttaataatacaatatttttcgtttacaaaatcaaataatggtcgaaacacgtcgaaggttaacatcttataatcgctaatgtatagattgttttcagtgagatgattattagatttaatagcatctcgttcacgtttgaacagtttattgcgtgcgctgaggtcggcaactacggcgtccgctttagtactcctcccataatactttacgctattaatctttaaaatttcatagactttatctagatcgctttctggtaacatgatatcatgtgtaaaaagttttaacatgtcggtcggcattctatttagatcattaactctagaaatctgaagaaagtaattagctccgtattccagactaggtaatgggcttttacctagagacagattaagttctggcaatgtttcataaaatggaagaaggacatgcgttccctcccggatattttttacaatttcatccatttacaactctatagtttgttttcattattattagttattatctcccataatcttggtaatacttaccccttgatcgtaagataccttatacaggtcattacatacaactaccaattgtttttgtacataatagattggatggttgacatccatggtggaataaactactcgaacagatagtttatctttccccctagatacattggccgtaatagttgtcggcctaaagaatatctttggtgtaaagttaaaagttagggttcttgttccattattgctttttgtcagtagttcattataaattctcgagatgggtccgttctctgaatatagaacatcatttccaaatctaacttctagtctagaaataatatcggtcttattcttaaaatctattcccttgatgaagggatcgttaatgaacaaatccttggcctttgattcggctgatctattatctccgttatagacgttacgttgactagtccaaagacttacaggaatagatgtatcgatgatgttgatactatgtgatatgtgagcaaagattgttctcttagtggcatcactatatgttccagtaatggcggaaaactttttagaaatgttatatataaaagaattttttcgtgttccaaacattagcagattagtatgaagataaacactcatattatcaggaacattatcaatttttacatacacatcagcatcttgaatagaaacgataccatcttctggaacctcaacaatctcggcagactccggataaccagtcggtggaccatcgctaacaataactagatcatccaacaatctactcacatatgcatctatataatctttttcatcttgtgagtaccctggatacgaaataaatttattatccgtatttccataataaggtttagtataaacagagagcgatgttgccgcatgaacttcagttacagtcgccgttggttggtttatttgacctattactctcctaggtttctctataaacgatggtttaatttgtacattcttaaccatatatccaataaagctcaattcaggaacataaacaaattctttgttgaacgtttcaaagtcgaacgaagagtcacgaataacgatatcggatactggattgaaggttaccgttacggtaatttttgaatcggatagtttaagactgctgaatgtatcttccacatcaaacggagttttaatataaacgtatactgtagatggttctttaatagtgtcattaggagttaggccaatagaaatatcattaagttcactagaatatccagagtgtttcaaagcaattgtattattgatacaattattatataattcttcgccctcaatttcccaaataacaccgttacacgaagagatagatacgtgattaatacatttatatccaacatatggtacgtaaccgaatcttcccatacctttaacttctggaagttccaaactcagaaccaaatgattaagcgcagtaatatactgatccctaatttcgaagctagcgatagcctgattgtctggaccatcgtttgtcataactccggatagagaaatatattgcggcatatataaagttggaatttgactatcgactgcgaagacattagaccgtttaatagagtcatccccaccgatcaaagaattaatgatagtattattcattttctatttaaaatggaaaaagcttacaataaactccgtagagaaatatctataatttgtgagttttccttaaagtaacagcttccgtaaacgccgtctttatctcttagtaagtttattgtatttataaccttttccttatcttcatagaatactaaaggcaacaaagaaatttttggttcttctctaagagctacgtgagacttaaccatagaagccaacgaatccctacatattttagaacagaaataccctacttcaccacccttgtatgtctcaatactaataggtctaaaaaccaaatcttgattacaaaaccaacacttatcaattacactatttgtcttaatagacacatctgccatagatttataatactttggtagtatacaagcgagtgcttcttctttagcgggcttaaagactgctttaggtgctgaaataaccacatctggaaggcttactcgcttagccatttaattacggaactatttttttatacttctaatgagcaagtagaaaacctctcatctacaaaaacatactcgtgtccataatcctctaccatagttacacgttttttagatctcatatgtgctaaaaagttttcccatactaattggttactattatttttcgtataatttttaacagtttgaggttttagatttttagttacagaagtgatatcgaatattttatccaaaaagaatgaataattaattgtcttagaaggagtgttttcttggcaaaagaataccaagtgcttaaatatttctactacttcattaatcttttctgtactcagattcagtttctcatcttttacttgattgattatttcaaagactaacttataatcctttttatttattctctcgttagccttaagaaaactagatacaaaatttgcatctacatcatccgtggatatttgatttttttccatgatatccaagagttccgagataatttctccagaacattgatgagacaataatctccgcaatacatttctcaaatgaataagtttattagacacgtggaagtttgactttttttgtacctttgtacatttttgaaataccgactcgcaaaaaatacaatattcatatccttgttcagatactataccgttgtgtctacaaccgctacataatcgtagattcatgttaacactctacgtatctcgtcgtccaatattttatataaaaacattttatttctagacgttgccagaaaatcctgtaatacttttagttttttgggctgtgaataaagtatcgccctaatatggttaccgtcctccgccaatatagtagttaaattatccgcacatgcaaaagaacaccgcttaggcggattcagtacaatgttatatttttcgtaccaactcatttaaatatcataatctaaaatagttctgtaatatgtctagcgctaatatattgatcataatcctgtgcataaattaagatacaacaatgtctcgaaatcatcgacatggcttcttccatagttagaagatcgtcgtcaaagttagcaacgtgattcatcaacatttgctgttttgaggcagcaaatactgaaccgtcgccattcaaccattcataaaaaccatcgtctgaatccattgataatttcttgtactggtttttgagagctcgcatcaatctagcatttctagctcccggattgaaaacagaaagaggatcgtacatccagggtccattttctgtaaatagaatcgtataatgtcccttcaagaagatatcagacgatccacaatcaaagaattggtctccgagtttgtaacaaactgcggactttaacctatacatgataccgtttagcataatttctggtgatacgtcaatcggagtatcatctattagagatctaaagccggtgtaacattctccaccaaacatattcttattctgacgtcgttctacataaaacatcattgctccattaacgataacaggggaatgaacagcactacccatcacattagttcccaatggatcaatgtgtgtaactccagaacatcttccatagcctatgttaggaggagcgaacaccactcttccactattgccatcgaatgccatagaataaatatccttggaattgatagaaatcggactgtcggatgttgtgatcatcttcataggattaacaacgatgtatggtgccgcctgaagtttcatatcgtaactgatgccgttcataggtctagccacagaaaccaacgtaggtctaaatccaactatagacaaaatagaagccaatatctgttcctcatctgtcataacttgagagcatccagtatgaataatcttcattagatggggatctaccgcatcatcatcgttacaataaaaaattcccattctaatgttcataattgcttttctaatcatggtatgcatgtttgctctctgaatctctgtggaaattagatctgatacacctgtaatcactatcggattatcctccgtaagacgattaaccaacaacatataattataagactttacttttctaaattcataaagttgctggattaggctataggtgtctccatgtacatacgcgttctcgagcgcaggaagtttaataccgaatagtgccatcagaataggatgaatatagtaattagtttctggttttctataaataaaagacaaatcttgtgaactagacatatcggtaaaatgcatggattggaatcgtgtagtcgacagaagaatatgatgattagatggagagtatattttatctaactctttgagttggtcaccgattctaggactagctcgagaatgaataagtactaaaggatgagtacatttcacagaaacactagcattgttcaatgtgctctttacatgggtaaggagttgaaatagctcgtttctatttgttctgacaatatttagtttattcataatgttaagcatatcctgaatagtaaagttagatgtgtcatacttgttagtagttagatatttagcaattgcattcccatcatttctcaatctcgtactccaatcatgcgtggatgctacttcgtcgatggaaaccatacaatcctttttgataggctgttgagattgattatttcctgcacgtttaggtttggtacgttgatttctagcccctgcggatataaagtcatcgtctacaatttgggacaatgaattgcatacactacaagacaaagatttatcagaagtgtgaatatgatcttcatctaccaaagaaagagtttgattagtataactagattttagtcctgcgttagatgttaaaaaaacatcgctattgaccacggcttccattatttatattcgtagtttttactcgaaagcgtgattttaatatccaatcttattacttttggaatcgttcaaaacctttgactagttgtagaatttgatctattgccctacgcgtatactcccttgcatcatatacgttcgtcaccagatcgtttgtttcggcctgaagttggtgcatatctttttcaacactcgacatgagatccttaagggccatatcgtctagattttgttgagatgctgctcctggatttggattttgttgtgctgttgtacatactgtaccaccagtaggtgtaggagtacatacagtggccacaataggaggttgaggaggtgtaaccgttggagtagtacaagaaatatttccatccgattgttgtgtacatgtagttgttggtaacgtctgagaaggttgggtagatggcggtgtcgtcgtcttttgatctttattaaatttagagataatatcctgaacagcattgctcggcgtcaacgctggaaggagtgaactcgccggcgcatcagtatctgcagacagccaatcaaaaagattagacatatcagatgatgtattagtttgttgtcgtggttttggtgtaggagcagtactactaggtagaagaataggagccgatgtaggtgtcggaaccggctgtggagttatatgaatagttggttgtagcggttggataggctgtctgctggcggccatcatattatctctagctagttgttctcgcaactgtctttgataatacgactcttgagactttagtcctatttcaatcgcttcatcctttttcgtatccggatccttttcttcagaataatagattgacgactttggtgtagaggattctgccagcccctgtgagaacttgttaaagaagtccatttaaggctttaaaattgaattgcgattataagattaaatggcagacacagacgatattatcgactatgaatccgatgatctcactgaatacgaggatgatgaagaagaggaagaagatggagagtcactagaaactagtgatatagatcccaaatcttcttataagattgtagaatcagcatccactcatatagaagatgcgcattccaatcttaaacatatagggaatcatatatctgctcttaaacgacgctatactagacgtataagtctatttgaaatagcgggtataatagcagaaagctataacttgcttcaacgaggaagattacctctagtttcagaattttctgacgaaacgatgaagcaaaatatgctacatgtaattatacaagagatagaggagggttcttgtcctatagtcatcgaaaagaacggagaattgttgtcggtaaacgattttgacaaagatggtctaaaattccatctagactatattatcaaaatttggaaacttcaaaaacgatattagaatttatacgaatatcgttctctaaatgtcacaatcaagtctcgcatgttcagcaatttattgtcgtactttatatcgtgttcattaacgatatcttgcaaaatagtaatgattctatcttccttcgatagatattcttcagagattattgtcttatattctttcttgttatcagatatgaatttgataagactttgaacattattgatacccgtctgtttaattttttctacagatattttagttttggcagattctatcgtatctgtcaatagacatccaacatcgacattcgacgtcaattgtctataaatcaacgtataaattttagaaataacattagcgaattgttgtgcattgatgtcgttattctgaaacagtatgattttaggtagcattttcttaacaaagagaacgtatttattgttactcagttgaacagatgatatatccagattactaacgcatctgattccgtataccaaactttcagaagaaatggtatacaattgtttgtattcattcaatgtctctttttcagaaattagtttagagtcgaatactgcaataattttcaagagatagttttcatcagataagattttatttagtgtagatatgataaaactattgttttgttggagaacttgatacgccgcgttctctgtagtcgacgctctcaaatgggaaacgatctccattatttttttggaatcggatactatatcttcggtatcttgacgcagtctagtatacatagagttaagagagattagagtttgtacattaagcaacatgtctctaaatgtggctacaaacttttccttttccacatcatctagtttattatataccgatttcacaacggcaccagatttaaggaaccagaatgaaaaactctgataactacaatatttcatcatagttacgattttatcatcttctatagttggtgtaatagcgcatacctttttctccaagactggaaccaacgtcataaaaatgtttaaatcaaaatccatatcaacatctgatgcgctaagaccagtctcgcgttcaagattatctttactaatggtgacgaactcatcgtatagaactctaagtttgtccattatttatttacagatttagttgtttaatttatttgtgctcttccagagttgggatagtatttttctaacgtcggtattatattattaggatctacgttcatatgtatcataatattaatcatccacgttttgataaatctatctttagcttctgaaataacgtatttaaacaaaggagaaaaatatttagctacggcatcagacgcaataacattttttgtaaatgtaacgtatttagacgacagatcttcgttaaaaagttttccatctatgtagaatccatcagttgttaacaccattcccgcgtcagattgaataggagtttgaatagtttgttttggaaatagatccttcaataacttatagttgggtgggaaaaaatcgattttatcactagactctttcttttttactatcattacctcatgaactatttcttgaatgagtatatgtattttctttcctatatcggacgcgttcattggaaaatataccatgtcgttaactataagaatatttttatcctcgtttacaaactgaataatatcagatgtagttcgtaaacgaactatatcatcaccagcacaacatctaactatatgatatccactagtttcctttagtcgtttattatcttgttccatattagcagtcattccatcatttaagaaggcgtcaaagataatagggagaaatgacattttggattctgttacaactttaccaaaattaaggatatacggacttactatctttttctcaacgtcaatttgatgaacacacgatgaaaatgtacttcgatgagattgatcatgtagaaaacaacaagggatacaatatttccgcatatcatgaaatatattaagaaatcccaccttattatatttccccaaaggatccatgcacgtaaacattatgccgttatcattaataaagacttctttctcatcggatctgtaaaagttgttactgatttttttcattccaggatctagataattaataatgatgggttttctattcttattctttgtattttggcatatcctagaccagtaaacagtttccactttggtaaaatcagcagacttttgaacgctattaaacatggcattaatggcaataactaaaaatgtaaaatatttttctatgttaggaatatggtttttcactttaatagatatatggtttttggccaaaatgatagatatttttttatccgaggatagtaaaatattattagtcgccgtctctataaaaatgaagctagtctcgatatccaattttattctagaattgataggagtcgccaaatgtaccttatacgttatatctcccttgatgcgttccatttgtgtatctatatcggacacaagatctgtaaatagttttacgttattaatcatcacggtatcgccgtcgctagataatgctaatgtaccatccaagtcccaaatggagagatttaactgttcatcgtttagaataaaatgattaccggtcatattaataaagtgttcatcgtatctagataacaacgacttataattaatgtccaagtcttgaactcgctgaatgatcttttttaacccagttagttttagattggtacgaaatatattgttaaactttgattctacagtaatgtccaaatctagttgtggaaatacttccatcaacattgtttcaaacttgataatattattatctacatcttcatacgatccaaattccggaatagatgtatcacatgctcttgccacccagataaccaaaaagtcacacgctccaggatatacattgtataaaaagctatcgtttttaagtagggtttttttctgcgtgtatacgaagggattaaaaatagtattatcaacgtaactatattccaaattattcttatgagaatagataataatatcgtccttaatatctaacaaatttcctaaatatccctttaattgagtcattcgaagcgtcaatagaatatgtctcttaactatttccggctgttgtatatttaaatgacttcgtaaaaaataatatatgggcgacttctcatctatgtaatcatatggagtgagatatagggctcgttctacctcctgccccttacccacctgtaataccaattgcggacttactatatatcgcatatttatatcgtggggtaaagtgaaaatctactaccgatgatgtaagtcttacaatgttcgaaccagtaccagatcttaatttggaggcctccgtagaactaggggaggtaaatatagatcaaacaacacctatgataaaggaaaatagcggttttatatcccgtagtagacgtctattcgcccatagatctaaggatgatgagagaaaactagcactacgattctttttacaaagactttattttttagatcatagagagattcattatttgttcagatgcgttgacgctgtaaaagacgtcactattaccaaaaaaaataacattatcgtggcgccttatatagcacttttaactatcgcatcaaaaggatgcaaacttacagaaacaatgattgaagcattctttccagaactatataatgaacatagtaagaaatttaaattcaactctcaagtatccatcatccaagaaaaactcggataccagtttggaaactatcacgtttatgattttgaaccgtattactctacagtagctctggctattcgagatgaacattcatctggcatttttaatatccgtcaagagagttatctggtaagttcattatctgaaataacatatagattttatctaattaatctaaaatctgatcttgttcaatggagtgctagtacgggcgctgtaattaatcaaatggtaaatactgtattgattacagtgtatgaaaagttacaactggtcatagaaaatgattcacaatttacatgttcattggctgtggaatcagaacttccaataaaattacttaaagatagaaatgaattatttacaaaattcatcaacgagttaaaaaagaccagttcattcaagataagcaaacgcgataaggatacgctactaaaatattttacttaggactggagttagaatttatagacgactcatttcgtttatcattattactaccatcattattagtattcttcttgttatcttgttcagaaatatacagcaatgctatgcctaatactaaatacattatcatgcttgcaatggctctaacaacgacgaaccaaaatgaatttggtcgtagcttttgttcacaaaaatacataaagaaatgtctacataaatctatggcgccattggctacttgaaatagcgccagtcctcctacagattttaatatagctgtataacatgacatttattcatcatcaaaagagacagagtcaccatctgtcatatttagattttttttcatgtgttcaaagtatcctctactcatttcattataatagtttatcatacttagaattttaggacggatcaatgagtaagacttgactagatcgtcagtagtaatttgtgcatcgtctattctgcatccgcttcgtcgaataatgtatagcatcgctttgagattctccatagctatcaagtctttatacaatgacatggaaatatctgtgaatactttatacttctccaacatcgatgccttaacatcatcgcctactttagcattgaaaatacgttctattgtgtagatggatgtagcaagatttttaaacaacaatgccatcttacacgatgattgcctcaagtctccaatcgtttgtttagaacgattagctacagagttcaacgcttggctgactagcatattattatctttagaaattgtattcttcaatgaagcgtttatcatatctgtgatttcgttagtcatattacagtctgactgggttgtaatgttatccaacatatcacctatggatacggtacacgtaccagcatttgtaataatcctatctaagatgttgtatggcattgcgcagaaaatatcttctcctgtaatatctccactctcgataaatctactcagattattcttaaatgccttattctctggagaaaagatatcagtgtccatcatttcattaatagtatacgcagaaaagataccacgagtatcaattctatccaagatacttatcggttccgagtcacagataatggtttcctctccttcgggagatcctgcatagaaatatctaggacaatagtttctatactgtctgtaactctgataatctctaaagtcactaactgataccatgaaattgagaagatcaaacgctgaagtaatcaatttttctgcctcgtttttactacaactagttttcatcaatgtagtgacgatgtattgtttagttactcttggtctaatactgatgatagagatattattacttcccataatggatcttctagtagtcaccttaaagcccattgatgcaaatagcagatagataaagtcttggtatgactcctttctaatatagtacggactacctttgtcacccaactttatacccacataagccataacaacctctttaatagccgtttcatgaggtttatcagccatgagcctgagtagttggaagaatctcatgaatcccgtctcagaaagtcctatatgcatgatagatttatctttcctgggaaactctcgtatagtcatagatgaaatactcttcaaagtttctgaaataagattagtaacagtcttacctccgactactctgggtaacaaacatactctaataggtgttttctctgcggagataatatcagaaaggatagagcaataagtagtattattgtgattataaagaccgaatacataacaggtagaatttataaacatcatgtcctgaaggtttttagacttgtattcctcgtaatccataccgtcccaaaacatggatttggtaactttgatagccgtagatctttgttccttcgccaacaggttaaagaaattaataaagaatttgttgtttctatttatgtccacaaattgcacgtttggaagcgtaactgttacgttcactgcagcattttgaggatcgcgagtatgaagtacgatgttattgtttactggtatatctggaaagaaatctaccagtctaggaataagagattgatatcgcatagaaatagtaaagtttataatctcatcatcgaagagcattttgttaccattgtaataaatatccactctgtcatatgtataaatgaagtactgttcaaacatgatgagatgtttatatgttggcatagtagtgagatcgacgtttggtaatggcaatgtattaagattaactccataatgtctagcagcatctgcgatgttataagtgtcgtcaaagcggggtcgatcttgtgctgttatatattgtctaacacctataagattatcaaaatcttgtctgcttaatacaccgttaacaatttttgccttgaattcttttattggtgcattaataacatccttatagaggatgttaaacaaataagtgttatcaaagttaagatctggatatttcttttctgctagaacatccattgagtcggagccatctggtttaatataaccaccgataaatctagctctgtattctgtatccgtcaatctaatattaagaaggtgttgagtgaaaggtggaagatcgtaaaagctgtgagtattaatgataggattagtttccgaactaatgttaattggggtattaataatatctatatttccagcgttaagtgtaacattaaacagttttaattcacgtgacgtggtatcaattaaataattaatgcccaatttggatatagcagcctgaagctcatcttgtttagttacggatcctaatgagttattaagcaatatatcgaacggatgaacgaaggttgttttaagttggtcacatactttgtaatctagacatagatgcggaagaacggtagaaactatacgaaataaatattcagagtcctctaattgatcaagagtaactattgacttaataggcatcatttatttagtattaaatgacgaccgtaccagtgacggatatacaaaacgatttaattacagagttttcagaagataattatccatctaacaaaaattatgaaataactcttcgtcaaatgtctattctaactcacgttaacaacgtggtagatagagaacataatgccgccgtagtgtcatctccagaggaaatatcctcacaacttaatgaagatctatttccagatgatgattcaccggccactattatcgaacgagtacaacctcatactactattattgacgatactccacctcctacttttcgtagagagttattaatatcggaacaacgtcaacaacgagaaaaaagatttaatattacagtatcgaaaaatgctgaagcaataatggaatctagatctatgataacttctatgccaacacaaacaccatccttgggagtagtttatgataaagataaaagaattcagatgttagaggatgaagtggttaatcttagaaatcaacgatctaatacaaaatcatctgataatttagataattttaccaaaatactatttggtaagactccgtataaatcaacagaagttaataagcgtatagccatcgttaattatgcaaatttgaacgggtcccccttatcagttgaggacttggatgtttgttcggaggatgaaatagatagaatctataaaacgattaaacaatatcacgaaagtagaaaacgaaaaattatcgtcactaacgtgattattattgtcataaacattatcgagcaggcattgctaaaactcggatttgaagaaatcaaaggactgagtaccgatatcacttcagaaattatcgatgtggagatcggagatgactgcgatgctgtagcatctaaactaggaatcggtaacagtccggttcttaatattgtattgtttatactcaagatattcgttaaacgaattaaaattatttaatttaatacattcccatatccagacaacaatcgtctggattaatctgttcctgtcgtctcataccggacgacatattaatctttttattagtaggcatctttttagatggtttctttttcccagcattaactgagtcgatacctagaagatcgtgattgatctctccgaccattccacgaacttctaattggccgtctctgacggtaccataaactattttaccagcattagtaacagcttggacaatctgaccatccattgcgttgaatgatgtagttgctgttgttctacgtttaggagcaccagaagtatttttggagcccttggaggctgatgtagaagaagacgaggattttgatttacatgtaatacattttgtactctttgattttgtatcacatgcgccggcagtcacatttgtttgagaattaagattattgttgcctcctttgacggctgcatctccaccgatttgcgctagtagatttttaagctgtggtgtaatcttattaactgtttcgatataatcatcgtaactgcttctaacggctaaattttttttatccgccatttagaagctaaaaatatttttatttatgcagaagatttaactagattatacaatgaactaatatgatccttttccagattatttacaaacttggtattttttggttctggaggaggcgaatttaaattcggacttggattcggattttgtgagttcttgatcttattatacatcgagtataggatggcgacggtaactgctacgcaaataccgatcaacaaaagaataccaatcatttattgacaataacttcactattgatcaagtatgcaatatatcatcttttcactaaataagtagtaataatgattcaacaatgtcgagatatatggacgataataatttagttcatggaaatatcgctatgattggtatgaatgactccgctaactctgtggggtgcgcagtgctttccccacatagaataaattagcattccgactgtgataataataccaagtataaacgccataatactcaatactttccatgtacgagtgggactggtagacttactaaagtcaataaaggcgaagatacacgaaagaatcaaaagaatgattccagcgattagcacgccggaaaaataatttccaatcataagcatcatgtccatttaactaataaaaattttaaatcgccgaatgaacaaagtggaatataaaccatataaaaacaatagtttgtactgcaaaaataatatctatttttgttttcgaagatatggtaaaattaaatagtagtacacagcatgttataactaacagcagcaacggctcgtaattacttatcatttactagacgaaaaggtggtgggatattttcttgctcaaataatacgaatatatcacccatccattttatgcgatgtttatatactctaatctttaatagatctatagacgacgggtttaccaacaatatagattttatcgattcatctaatttaaacccttccttaaacgtgaatgatctattatctggcataacgatgactctacctgatgaatcggacaatgtactgggccatgtagaataaattatcaacgaattatcgtctacgaacatttatatcatttgttttaattttaggacgcgaataaatggatataaaatagaaaataacagatattacaaccaatgttatggccgcgcccaaccaggtaggcagttttattttatcttttactacaggttctcctggatgtacgtcaccaacggcggacgtagttctagtacaattagacgtaagttctgcttgggaattttttaacgctaaagagttaacgttaatcgtgcacccaacgtatttacatctagttctttgaacatcttgattataatataaccattttctatctctagattcgtcggtgcactcatgtaaccaacataccctaggtcctaaatatttatctccggaattagattttggataattcgcgcaccaacaatttctatttcctttatgatcgttacaaaagacgtataatgccgtatccccaaaagtaaaataatcaggacgaataattctaataaactcagaacaatatctcgcatccatatgtttggagcaaatatcggaataagtagacatagccggtttccgttttgcacgtaaccattctaaacaattggggtttccaggatcgtttctacaaaatccagtcatgaaatcatcacaatgttctgtcttgtaattattattaaatatttttggacagtgtttggtatttgtcttagaacaacattttgccacgctatcactatcgcccaggagataatccttttttataaaatgacatcgttgcccggatgctatataatcagtggcgtgttttaaatccttaatatattcaggagttacctcgttctgataatagattaatgatccaggacgaaatttgaaagaactacatggttctccatgaattaatacatattgtttagcaaattcaggaactataaaactactacaatgatctatcgacataccatctatcaaacaaaacttgggtttaatttctcccggagatgtttcataatagtacgtataactttcttctgcaaacttaacagctctattatattcaggataattaaaacctaattccatatatttgtctcgtatatctgctattcctggtgctattttaattctattaagagtaacggctgcccccattcttaataatcgtcagtatttaaactgttaaatgttggtatatcaacatctaccttatttcccgcagtataaggtttgttgcaggtatactgttcaggaatggttacatttatacttcttctatagtcctgtctttcgatgttcatcacatatgcaaagaacagaataaacaaaataatgtaagaaataatattaaatatctgtgaattcgtaaatacattgattgccataataattacagcagctacaatacatacaatagacattcccacagtgttgccattacctccacgatacatttgagttactaagcaataggtaataactaagctagtaagaggcaatagaaaagatgagataaatatcatcaatatagagattagaggagggctatatagagccaagacgaacaaaatcaaaccgagtaacgttctaacatcattatttttgaagattcccaaataatcattcattcctccataatcgttttgcattatacctccatctttaggcataaacgattgctgctgttcctctgtaaataaatctttatcaagcactccagcacccgcagagaagtcgtcaagcatattgtaatatcttaaataactcatttatatattaaaaaatgtcactattaaagatggagtataatctttatgccgaactaaaaaaaatgacttgtggtcaacccctaagtctttttaacgaagacggggatttcgtagaagttgaaccgggatcatcctttaagtttctgatacctaagggattttacgcctctccttccgtaaagacgagtctagtattcgagacattaacaacgaccgataataaaatcactagtatcaatccaacaaatgcgccaaagttatatcctcttcaacgcaaagtcgtatctgaagtagtttctaatatgaggaaaatgatcgaatcaaaacgtcctctatacattactcttcacttggcgtgtggatttggtaagactattaccacgtgttatcttatggctacacacggtagaaaaaccgtcatttgcgtacccaataaaatgttaatacatcaatggaagacacaggtagaggcagtcggattggaacataagatatctatagatggagtaagtagtctattaaaggaactaaagactcaaagtccggatgtattaatagtagtcagtagacatctgacaaacgatgccttttgtaaatatatcaataagcattatgatttgttcatcttggatgaatcacatacgtataatctgatgaacaatacagcagttacaagatttttagcgtattatcctccgatgatgtgttattttttaactgctacacctagaccagctaaccgaatttattgtaacagtattattaatattgccaagttatccgatctaaaaaaaactatctatgcggtagatagtttttttgagccatattccacagacaatattagacatatggtaaaacgactagatggaccatctaataaatatcatatatatactgagaagttattatctgtagacgagcctagaaatcaacttattcttgataccctggtagaagaattcaagtcaggaactattaatcgaattttagttattactaaactacgtgaacatatggtattcttctacaaacgattattagattttttcggatcagaggttgtatttataggagacgcccaaaatagacgtactccagatatggtcaaatcaatcaaggaactaaatagatttatattcgtatccaccttattttattccggtactggtttagatattcctagtttggattcgttgttcatttgctcggcagtaatcaacaatatgcaaatagagcaattactagggagggtatgtcgagaaacagaactattagataggacggtatatgtatttcctaacacatccatcaaagaaataaagtacatgataggaaatttcatgcaacgaattattagtctgtctgtagataaactaggatttaaacaaaaaagttatcggaaacatcaagaatccgatcccacttctgtatgtacaacatcctccagagaagaacgtgtattaaatagaatatttaactcgcaaaatcgttaagaagtttaagcgacgatccgcatgctgcgcaggccagtgtattacccctcatagtattaatataatccaatgatacttttgtgatgtcggaaatcttaaccaatttagactgacaggcagaacacgtcatgcaatcatcatcgtcatcgataactgtagtcttgggcttctttttgcggctcttcattccggaacgcacattggtgctatccatttaggtagtaaaaaataagtcagaatatgccctatagcacgatcgtgcaaaacctggtatatcgtctctatctttatcacaatatagtgtatcgacatttttattattattgacctcgtttatcttggaacatggaatgggaacatttttgttatcaacggccatctttgccttaattccagatgttgtaaaattataactaaacagtctatcatcgacacaaatgaaattcttgtttagacgtttgtagtttacgtatgcggctcgttcgcgtctcattttttcagatattgcaggtactataatattaaaaataagaatgaaataacataggattaaaaataaagttatcatgacttctagcgctgatttaactaacttaaaagaattacttagtctgtacaaaagtttgaaattttcagattctgcggctatagaaaagtataattctttggtagaatggggaacatctacttactggaaaataggcgtgcaaaaggtagctaatgtcgagacgtcaatatctgattattatgatgaggtaaaaaataaaccgtttaatattgatccgggatattacattttcttaccggtatattttggaagcgtctttatttattcgaagggtaaaaatatggtagaacttggatctggaaactcttttcaaataccagatgatatgcgaagtgcgtgtaacaaagtattagacagcgataacggaatagactttctgagatttgttttgttaaacaatagatggataatggaagatgctatatcaaaatatcagtctccagttaatatatttaaactagctagtgagtacggattaaacatacccaaatatttagaaattgaaatagaggaagacacattatttgacgacgagttatactctattatagaacgctctttcgatgataaatttccaaaaatatccatatcgtatattaagttgggagaacttagacggcaagttgtagactttttcaaattctcgttcatgtatattgagtccatcaaggtagatcgtataggagataatatttttattcctagcgttataacaaaatcaggaaaaaagatattagtaaaagatgtagaccatttaatacgatccaaggttagagaacatacatttgtaaaagtaaaaaagaaaaacacattttccattttatacgactatgatggaaacggaacagaaactagaggagaagtaataaaacgaattatagacactataggacgagactattatgttaacggaaagtatttctctaaggttggtagtgcaggcttaaagcaattgactaataaattagatattaatgagtgcgcaactgtcgatgagttagttgatgagattaataaatccggaactgtaaaacgaaaaataaaaaaccaatcagcatttgatttaagcagagaatgtttgggatatccagaagcggattttataacgttagttaataacatgcggttcaaaatagaaaattgtaaggttgtaaatttcaatattgaaaatactaattgtttaaataacccgagtattgaaactatatatggaaactttaaccagttcgtctcaatctttaatatcgtcaccgatgtcaaaaaaagattattcgagtgaaataatatgcgcctttgatataggtgcaaaaaatcctgccagaactgttttagaagtcaaggataactccgttagggtattggatatatcaaaattagactggagttctgattgggaaaggcgcatagctaaagatttgtcacaatatgaatacactacagttcttctagaacgtcagcctagaaggtcgccgtacgtcaaatttatctattttattaaaggctttttatatcatacatcggctgccaaagttatttgcgtctcgcctgtcatgtctggtaattcatatagagatcgaaaaaagagatcggtcgaagcatttcttgattggatggacacattcggattgcgagactccgttccggatagacgcaaattagacgatgtagcggatagtttcaatttggctatgagatacgtattagataaatggaatactaattatacaccttataataggtgtaaatctagaaattacataaaaaaaatgtaataacgttagtaacgccattatggataatctatttacctttctacatgaaatagaagatagatatgccagaactatttttaactttcatctaataagttgcgatgaaataggagatatatatggtcttatgaaagaacgcatttcctcagaggatatgtttgataatatagtgtataataaagatatacatcatgccattaagaaactagtgtattgcgacatccaacttactaaacacattattaatcagaatacgtatccggtatttaacgattcttcacaagtgaaatgttgtcattatttcgacataaactcagataatagcaatattagctctcgtacagtagagatatttgagagggaaaagtcatctcttgtatcatatattaaaactaccaataagaagagaaaggtcaattacggcgaaataaagaaaactgttcatggaggcactaatgcaaattacttttccggtaaaaagtctgacgagtatctgagtactacagttagatccaacattaatcaaccttggatcaaaaccatctctaagaggatgagagttgatatcattaatcactctatagtaacgcgtggaaaaagctctatattacaaactatagaaattatttttactaatagaacatgtgtgaaaatattcaaggattctactatgcacattattctatccaaggacaaggatgaaaaggggtgtatacacatgattgacaaattattctatgtctattataatttatttctgttgttcgaggatatcatccaaaacgagtactttaaagaagtagctaatgttgtaaaccacgtacttacggctacggcattagatgagaaattattcctaattaagaaaatggctgaacacgatgtttatggagttagcaatttcaaaatagggatgtttaacctgacatttattaagtcgttggatcataccgttttcccctctctgttagatgaggatagcaaaataaagttttttaaggggaaaaagctcaatattgtagcattacgatctctggaggattgtataaattacgtgactaaatccgagaatatgatagaaatgatgaaggaaagatcgactattttaaatagcatagatatagaaacggaatcggtagatcgtctaaaagaattgcttctaaaatgaaaaaaaacactgattcagaaatggatcaacgactcggatataagtttttggtgcctgatcctaaagccggagttttttatagaccgttacatttccaatatgtatcgtattctaattttatattgcatcgattgcatgaaatcttgaccgtcaagcggccactcttatcgtttaagaataatacagaacgaattatgatagaaattagcaatgttaaagtgactcctccagattactcacctataatcgcgagtattaaaggtaagagttatgacgcattagccacgttcactgtaaatatctttaaagaggtaatgaccaaagagggtatatccatcactaaaataagtagttatgagggaaaagattctcatttgataaaaattccgctactaataggatacgggaataaaaatccacttgatacagccaagtatcttgttcctaatgtcataggtggagtctttatcaataaacaatctgtcgaaaaagtaggaattaatctagtagaaaagattacaacatggccaaaatttagggttgttaagccaaactcattcactttctcgttttcctccgtatcccctcctaatgtattaccgacaagatatcgccattacaagatatctctggatatatcacaattggaagcgtcgaatatatcatcgacaaagacatttataacggtcaatattgttttgctgtctcaatatttatctagagtgagtctagaattcattagacgtagcttatcatacgatatgcctccagaagttgtctatctagtaaacgcgataatagatagtgctaaacgaattactgaatctattactgactttaatattgatacatacattaatgacctggtggaagctgaacacattaaacaaaaatctcagttaacgatcaacgagttcaaatatgaaatgctgcataactttttacctcatatgaactatacacccgatcaactaaagggattttatatgatatctttactaagaaagtttctctactgtatctaccacacttctagatatccagatagagattcgatggtttgtcatcgtatactaacatacggcaaatattttgagacgttggcacatgatgaattagagaattacataggcaacatccgaaacgatatcatgaacaatcacaagaacagaggcacttacgcggtaaacattcatgtactaacaactcctggacttaatcatgcattttctagtctattgagtggaaagttcaaaaagtcagacggtagttatcgaacacatcctcactattcatggatgcagaatatttctattcctaggagtgttggattttatccggatcaagtaaagatttcaaagatgttttctgtcagaaaataccatccaagtcaatatctttacttttgttcatcagacgttccggaaagaggtcctcaggtaggtttagtatctcaattgtctgtcttgagttccattacaaatatactaacgtctgagtatttggatttggaaaagaaaatttgtgagtatatcagatcatattataaagatgatataagttactttgaaacaggatttccaatcactatagaaaatgctctagtcgcatctcttaatccaaatatgatatgtgattttgtaactgactttagacgtagaaaacggatgggattcttcggtaacttggaggtaggtattactttagttagggatcacatgaatgaaattcgcattaatattggagcgggaagattagtcagaccattcttggttgtggataacggagagctcatgatggatgtgtgtccggagttagaaagcagattagacgacatgacattctctgacattcagaaagagtttccgcatgtcatcgaaatggtagatatagaacaatttacttttagtaacgtatgtgaatcggttcaaaaatttagaatgatgtcaaaggatgaaagaaagcaatacgatttatgtgactttcctgccgaatttagagatggatatgtggcatcttcattagtgggaatcaatcacaattctggacccagagctattcttggatgtgctcaagctaaacaagctatctcttgtctgagctcggatatacgaaataaaatagacaatggaattcatttgatgtatccagagaggccaatcgtgattagtaaggctttagaaacttcaaagattgcggctaattgcttcggccaacatgttactatagcattaatgtcgtacaaaggtatcaatcaagaggatggaattatcatcaaaaaacaatttattcagagaggcggtctcgatattgttacagccaagaaacatcaagtagaaattccattggaaaactttaataacaaagaaagagataggtctaacgcctattcaaaattagaaagtaatggattagttagactgaatgctttcttggaatccggagacgctatggcacgaaatatctcatcaagaactcttgaagatgattttgctagagataatcagattagcttcgatgtttccgagaaatataccgatatgtacaaatctcgcgttgaacgagtacaagtagaacttactgacaaagttaaggtacgagtattaaccatgaaagaaagaagacccattctaggagacaaatttaccactagaacgagtcaaaagggaacagtcgcgtatgtcgcggatgaaacggaacttccatacgacgaaaatggtatcacaccagatgtcattattaattctacatccatcttctctagaaaaactatatctatgttgatagaggttattttaacagccgcatattctgctaagccgtacaacaataagggagaaaaccgacctgtctgttttcctagtagtaacgaaacatccatcgatacatatatgcaattcgctaaacaatgttatgagcattcaaatccgaaattgtctgatgaagaattatcggataaaatcttttgtgaaaagattctctatgatcctgaaacggataagccttatgcatccaaagtattttttggaccaatttattacttgcgtctgagacatttaactcaggacaaggcaaccgttagatgtagaggtaaaaagacgaagctcattagacaggcgaatgagggacgaaaacgtggaggaggtatcaagttcggagaaatggagagagactgtttaatagcgcatggtgcagccaatactattacagaagttttgaaagattcggaagaagattatcaagatgtgtatgtttgtgaaaattgtggagacatagcagcacaaatcaagggtattaatacatgtcttagatgttcaaaacttaatctctctcctctcttaacaaaaattgataccacacacgtatctaaagtatttcttactcaaatgaacgccagaggcgtaaaagtcaaattagatttcgaacgaagacctccttcgttttataaaccattagataaagttgatctcaaaccgtcttttctggtctaatattgtttagtagatacttatcaacatcatcaagattatcaagattatcaagattatcaagataagctaattcactaaacacattatcgatttcggtatcgttactcgcagaataaagttcgttatgatcctgatattcggaaatctgtggagtttcaggttttggtggatgtgtaacagctacttgagataccgaagtctgatattcagaaagctgtggatgttctggttcggcatccaccgatggtgttacaccactactaattggttcagtaacgtctgtggacgatggaggcaccacttctacaggttctggttctttatcctcagtcatcaacggagctacttcaatgcgaggaaatgtataatttggtaatggtttctcatgtggatctgaagaagaggtaagatatctactagaaagataccgatcacgttctagttctcttttgtagaacttaactttttctttctcagcatctagttgatattccaacctcttcacgttactacgttcagatttcaattcacgttcgcatgggttacctccgcagtttttacgagcgatttcacgttcagccttcatgcgtctctccctctctctatcgagtttatcagagcagtctttctgaaggcgatcgaactccataaatttctccaacgctttgattgtttccatagatttccgaagttcagcttttaggactgtgattctttttctttcgaattcacagctggatgtacaaccgtttccattaccgccatctctaagtttcttttctagatcggcaacatttcatccccatgccttttacattcctcgagtctactgtcgtcgaaatatcgttccagctccttttcgacatcaataactttagcacgttgtctctcaagctctcttttgtagttatctgattccctggcacgtttaagatcttcatgcaattgagtcagctcttaacacaatctcttgcttcttcgtcatagtacgcgcaatcactgtgagatccattgttaccacgtctacactcggcgagctcgcgtttaagagattcaatttcccgtttgtattggtccatgtttccattgctaccaccattagatttacaggctgctagttgtcgttcgagatcagaaatacgggttttcttggaattgatttcgtcgatgtacttggcatcgaaacacttattaagttctttttccaattctacgattttatttctttcgcgagtcaattccctcctgtagtaactatctgttttgtcagattcacgctctctacgtagactttcttgcaagttactaatttgttccctagcacgtccgagtttagttttatatgctgaatagagttctgattcatcctttgagcagatctctagcgatcgtttaagattcctgattctagtctttagcctatttacctcctcagaagatgttccgttaccgttgcgtttacactcgttaagctgtctatcaagatccatgattctatctctaagacgttgcatctctctttccatatcagcattgctttcattattacgtctgcagtcactcaactgtctttcaatatctgagattctatctctaagacgtcgcatctctctctgtttcggcattggtttcattattacgtctacagtcgttcaactgtctttcaagatctgatattctagattggagtctgctaatctctgtagcattttcacggcattcactcagttgtctttcaagatctgaaattttagattggagtctgctaatctctgtaagatttcctcctccgctctcgatgcagtcggtcaacttattctctagttctctaatacgcgaacgcagtgcatcaacttcttgcgtgtcttcctggttgcgtgtacattcatcgagtctagattcgagatctctaacgcgtcgtcgttcttcctcaagttctctgcgtactacagaaagcgtgtccctatcttgttgatatttagcaatttctgattctagagtactgattttgcttacgtagttactaatatttgtcttggccttatcaagatcctccttgtatttgtcgcattccttgatatccctacgaagtctggacagttcccattcgacattacgacgtttatcgatttcagctcggagatcgtcatcgcgttgttttagccacatacgactgagttcaagttctcgttgacaagatccatctacttttccattcctaatagtatccagttccttttctagttctgaacgcatttctcgttccctatcaagcgattctctcaattctcggatagtcttcttatcaatttctaataaatctgaaccatcatctgtcccattttgaatatccctgtgttctttgatctcttttgtaagtcggtcgattctttcggttttataaacagaatccctttccaaagtcctaatcttactgagtttatcactaagttctgcattcaattcggtgagttttctcttggcttcttccaactctgttttaaactctccactatttccgcattcttcctcgcatttatctaaccattcaattagtttattaataactagttggtaatcagcgattcctatagccgttcttgtaattgtgggaacataattaggatcttctaatggattgtatggcttgatagcatcatctttatcattattagggggatggacaaccttaattggttggtcctcatctcctccagtagcgtgtggttcttcaatagccgtgttagtaataggcttaggcaaatgcttgtcgtacgcgggcacttcctcatccatcaagtatttataatcgggttctacgtctgaatattcttttctaagagacgcaacttctggagttagtagaagaactctgtttctatatctatcaacgctggaatcaatactcaagttaaggatagcgaatacctcatcgtcatcatccgtatcctctgaaacgccatcatatgacatttcatgaagtctaacgtattgataaacagaatcagatttagtattaaacagatccttaacctttttagtaaatgcatatgtatattttagatctccagatttcataatatggtcgcatgccttaaatgtcagtgcttccataatatagtctggaacactaattggtgatgaaaaagataccggaccatatgctacgttgataaataactctgagccactaactagataatgattaatgttaaggaagaggaaatattcagtgtataggtatgtcttggcgtcatatcttgtactaaacacgctaaacagtttgttaatgtgatcaatttccaatagattaattagagcagcaggaataccaacaaacatattaccacatccgtattttctatgaatatcacatatcatgttaaaaaatcttgatagaagagcgaatatctcgtctgacttaatgagtcgtagttcagcagcaacataagtcataactgtaaatagaacatactttcctgtagtgttgattctagactccacatcaacaccattattaaaaatagttttatatacatctttaatctgctctccgttaatcgtcgaacgttctagtatacggaaacactttgatttcttatctgtagttaatgacttagtgatatcacgaagaatattacgaattacatttcttgtttttcttgagagacctgattcagaactcaactcatcgttccatagtttttttacctcagtggcgaaatctttggagtgcttggtacatttttcaataaggttcgtgacctccatttattataaaaaaattttattcaaaacttaactacaatcgggtaattataaaatcgtagatctcccatgtggtggaatactaccatctatcgcatgtggatggacagtaggtaatggccatgggaacagtaatgtttgcatatttatctttcttgccagtattactgcatattgtcccaatgtttcgatgtgatgttctaacctatcaactgccgctgtatcacaacaatagtgtccgatgaaattaagattatgatccaatgtgtttaatatatgattatcaagtcttatacgatccgcgtcttttttgacaggatcaggttcttctacaggaagaagtttcggcctcttatgatattcatgtctgggaaacggtggtctagggtgaggctccggtatcggagtgggttttggattataatcatcatcgtctatgacatcatcttcgacttcgatatttattttgctatcttgatgatgtcctgtatcagttgcattttcagcactcgactgaatattagcgcattcattgtttattattaccatatttctaaacccaaaatgtatatgttgaacatcagtactatcgttgatgagtcttatagcatgaattcgcttatcgttatcgggtttagcttctgtcaccttagcaattccttttttattaaactctacataatcatatccatttctattgtttgttctaatataaacgagtatagcatcattgctaaatttttcaatagtatcgaaaacagaatatcctaaaccatataatatatattcaggaacactcaaactaaatgtccaggattctcctaaatacgtaaactttaatagtgcgaaatcattcaaaaatctaccacttatagatagatagtacataaatgcgtatagtagtctacctatctctttattatgaaaaccggcattacgatcatatatgtcgtgatatacctgtgatccgtttacgttaaaccataaatacatgggtgatcctataaacatgaatttatttctaattctcagagctatagttaattgaccgtgtaatatttgcttacatgcatacttgatacgctcattaataagatttttatcattgctcgttatctcagaatcgtatatataaggagtaccatcgtgattcttaccagatattatacaaaatactatatataaaatatattgaccaacgttagtaatcatataaatgtttaacgttttaaattttgtattcaatgatccattatcatacgctagcatggtcttatgatattcattctttaaaatataatattgtgttagccattgcattggggctcctaatggagattttttattctcatccattttaggataggctttcataaagtccctaataacttcgtgaataatgtttctatgttttctactgatgcatgtatttgcttcgatttttttatcccatgtttcatctatcatagatttaaacgcagtaatgctcgcaacattaacatcttgaaccgttggtacaattccgttccataaatttataatgttcgccatttatataactcattttttgaatatacttttaattaacaaaagagttaagttactcatatggacgccgtccagtctgaacatcaatctttttagccagagatatcatagccgctcttagagtttcagcgtgattttccaacctaaatagaacttcatcgttgcgtttacaacacttttctatttgttcaaactttgttgttacattagtaatctttttttccaaattagttagccgttgtttgagagtttcctcattgtcgtcttcatcggctttaacaattgcttcgcgtttagcctctggctttttagcagcctttgtagaaaaaaattcagttgctggaattgcaagatcgtcatctccggggaaaagagttccgtccatttaaagtacagattttagaaactgacactctgcgttatttatatttggtacaacacatggattataaatattgatgttaataacatcagaaaatgtaaagtctatacattgttgcatcgtgttaaattttctaatggatctagtattattgggtccaacttctgcctgaaatccaaatatggaagcggatacaaaaccgtttcctggataaaccacacatctccacttttgctttacatcagaaattgtgtcattgacatcttgaactctcctatctaatgccggtgttccacctatagattttgaatattcgaatgctgcatgagtagcattaaattccttaatattgccataattttcatatattgagtaaccctggataaaaagtaaacacaccgcagccgtcgctaccacaataaaaaaaattgatagagagttcatttataatctattagaagctgacaaaatttttttacacgcatcagacaatgctttaataaatagttcaacatctacttttgtcatatcgaaccgatggtatgattctaacctagaattacatccgaaaaagttgactatgttcatagtcattaagtcattaacaaacaacattccagactctggattataagacgatactgtttcgtcacaattacctaccttaatcatgtgattatgaatattggctattagagcaccttctaagaaatctataatatctttgaaacacgatttaaaatcaaaccacgaatatacttctacgaagaaagttagtttacccataggagaaataactataaatggagatctaaatacaaaatccggatctatgatagttttaacattattatattctctattaaatacctccacatctaaaaatgttaattttgaaactatgtcttcgtttattaccgtacctgaactaaacgctataagctctattgtttgagaactctttaaacgatattcttgaaatacatgtaacaaagtttcctttaactcggtcggtttatctaccatagttacagaatttgtatccttatctataatataataatcaaaatcgtataaagttatataattatcgcgttcagattgtgatcttttcaaatagactaaaaaccccatttctctagtaagtatcttatgtatatgtttgtaaaatatcttcatggtgggaatatgctctaccgcagttagccattcctcattgacagcggtagatgtattagacaaaactattccaatgtttaacaagggccattttacgagattattaaatccttgtttgataaatgtagccaatgagggttcgagttcaacgacgattgaattctcttcccgcggatgctgcatgatgaacgacgggatgttgttcgattgatttggaattctttttcgactttttgtttatattaaatattttaaaatttatagctgatagcaattcatgtactacggataatgtagacgcgtattgcgcatcgatatctttattattagataaatttatcaataaatgtgagaagtttgcctcgttaaggtcttccatttaaatattatataaacatttgtgtttgtatcttattcgtcttttatggaatagttttttactagtaaagctgcaattacacactttgtccgtaaaacataaatataaacaccagcttttatcaatcgttccaaaaagtcgacggcggacatttttaacatggcatctattttaaatacacttaggtttttggaaaaaacatcattttataattgtaacgattcaataactaaagaaaagattaagattaaacataagggaatgtcatttgtattttataagccaaagcattctaccgttgttaaatacttgtctggaggaggtatatatcatgatgatttggttgtattggggaaggtaacaattaatgatctaaagatgatgctattttacatggatttatcatatcatggagtgacaagtagtggagcaatttacaaattgggatcgtctatcgatagactttctctaaataggactattgttacaaaagttaataattatgatgatacattttttgacgacgatgattgatcgctattgcacaattttgtttttttactttctaatatagcgtttagattctttttcatgtgcgaatattgatttactaaaatatcgatgtttaacttttgttctatgacgtccttatcagcggtatcggtacatatacgtaattcaccttcacaaaatacggagtcttcgataataatagccaatcgattattggatctagcggtctgtatcatattcaacatgtttaatatatcctttcgtttcccctttacaggcatcgatcgtagcatattttccgcgtctgagatggaaatgttaaaactacaaaaatgcgtaatgttagcccgtcctaatattggtacgtgtctataagtttggcatagtagaataatagacgtgtttaaatgccttccaaagtttaagaattctattagagtattgcattttgatagtttatcgcctacatcatcaaaaataagtaaaaagtgtgctgattttttatgattttgtgcgacagcaatacatttttctatgttacttttagttcgtatcagattatattctagagattcctgactactaacgaaattaatatgatttggccaaatgtatccatcataatctggattataaacgggtgtaaacaagaatatatgtttatattttttaactagtgtagaaaacagagatagtaaatagatagtttttccagatccagatcctcccgttaaaaccattctaaacggcatttttaataaattttctcttgaaaattgtttttcttggaaacaattcataattatatttacagttactaaattaatttgataataaatcaaaatatggaaaactaaggtcgttagtagggaggagaacaaagaaggcatatcgtgatataaataacatttattatcatgatgacaccagaaaacgacgaagagcagacatctgtgttctccgctactgtttacggagacaaaattcagggaaagaataaacgcaaacgcgtgattggtctatgtattagaatatctatggttatttcactactatctatgattaccatgtccgcgtttctcatagtgcgcctaaatcaatgcatgtctgctaacgaggctgctattactgacgccgctgttgccgttgctgctgcatcatctactcatagaaaggttgcgtctagcactacgcaatatgatcacaaagaaagctgtaatggtttatattaccagggttcttgttatatattacattcagactaccagttattctcggatgctaaagcaaattgcactgcggaatcatcaacactacccaataaatccgatgtcttgattacctggctcattgattatgttgaggatacatggggatctgatggtaatccaattacaaaaactacatccgattatcaagattctgatatatcacaagaagttagaaagtatttttgtgttaaaacaatgaactaatatttatttttgtacattaataaatgaaatcgcttaatagacaaactgtaagtaggtttaagaagttgtcggtgccggccgctataatgatgatactctcaaccattattagtggcataggaacatttctgcattacaaagaagaactgatgcctagtgcttgcgccaatggatggatacaatacgataaacattgttatctagataccaacattaaaatgtctacagataatgcggtttatcagtgtcgtaaattacgagctagattgcctagacctgatactagacatctgagagtattgtttagtattttttataaagattattgggtaagtttaaaaaagaccaataataaatggttagatattaataatgataaagatatagatattagtaaattaacaaattttaaacaactaaacagtacgacggatgctgaagcgtgttatatatacaagtctggaaaactggttgaaacagtatgtaaaagtactcaatctgtactatgtgttaaaaaattctacaagtgacaacaaaaaatgaattaataataagtcgttaacgtacgccgccatggacgccgcgtttgttattactccaatgggtgttgactataacagatacattgtatgatgatctcgatatctcaatcatggactttataggaccatacattataggtaacataaaaactgtccaaatagatgtacgggatataaaatattccgacatgcaaaaatgctactttagctataagggtaaaatagttcctcaggattctaatgatttggctagattcaacatttatagcatttgtgccgcatacagatcaaaaaataccatcatcatagcatgcgactatgatatcatgttagatatagaagataaacatcagccattttatctattcccatctattgatgtttttaacgctacaatcatagaagcgtataacctgtatacagctggagattatcatctaatcatcaatccttcagataatctgaaaatgaaattgtcgtttaattcttcattctgcatatcagacggcaatggatggatcataattgatgggaaatgcaatagtaattttttatcataaaagttgtaaagtaaataataaaacaataaatattgaactagtagtacgtatattgagcaatcagaaatgatgctggtacctcttatcacggtgaccgtagttgcgggaacaatattagtatgttatatattatatatttgtaggaaaaagatacgtactgtctataatgacaataaaattatcatgacaaaattaaaaaagataaagagttctaattccagcaaatctagtaaatcaactgatagcgaatcagactgggaggatcactgtagtgctatggaacaaaacaatgacgtagataatatttctaggaatgagatattggacgatgatagcttcgctggtagtttaatatgggataacgaatccaatgttatggcgcctagcacagaacacatttacgatagtgttgctggaagcacgctgctaataaataatgatcgtaatgaacagactatttatcagaacactacagtagtaattaatgaaacggagactgttaaagtacttaatgaagataccaaacagaatcctaactattcatccaatcctttcgtaaattataataaaaccagtatttgtagcaagtcaaatccgtttattacagaacttaacaataaatttagtgagaataatccgtttagacgagcacatagcgatgattatcttaataagcaagaacaagatcatgaacacgatgatatagaatcatcggtcgtatcattggtgtgattagtttcctttttataaaattgaagtaatatttagtattattgctgccgtcacgttgtacaaatggagatattccctgtattcggcatttctaaaattagcaattttattgctaataatgactgtagatattatatagatacagaacatcaaaaaattatatctgatgagatcaatagacagatggatgaaacggtacttcttaccaacatcttaagcgtagaagttgtaaatgacaatgagatgtaccatcttattcctcatagattatcgacgattatactctgtattagttctgtcggaggatgtgttatctctatagataatgacgtcaatggcaaaaatattctaacctttcccattgatcatgctgtaatcatatccccactgagtaaatgtgtcgtagttagcaagggccctacaaccatactggttgctaaagcggatatacccagcaaacgattggtaacatcgtttacaaacgacatactgtatgtaaacaatctatcactgattaattatttgccgttgtctgtattcattattagacgagtcaccgactatttggatagacacatatgcgatcagatatttgctaataataagtggtattcccttataaccatcgacgataagcaatatcctattccatcaaattgtataggtatgtcttctgccaagtacataaattctagcatcgagcaagatactttaatacatgtttgtaacctcgagcatccattcgacttagtatacaaaaaaatgcagtcgtacaattctgtacctatcaaggaacaaatattgtacggtagaattgataatataaatatgagcattagtatttctgtggattaatagatttctagtatggggatcattaatcatctctaatctctaaatacctcataaaacgaaaaaaaagctattatcaaatactgtacggaatagattcattctcttctctttttatgaaactctgttgtatatctactgataaaactggaagcaaaaaatctgataaaaagaataagatcaagatcaaggattatatggaacacgattattataaaataacaatagttcctggttcctcttccacgtctactagctcgtggtattatacacatgcctagtaatagtctctttgcgttgatggaaagcagactagaaataacaggctaaaatgttcagacaccataatagttcccaacccagataataacagagtaccatcaacacattcctttaaactcaatcccaaacccaaaaccgttaaaatgtatccggccaattgatagtagataatgaggtgtacagcgcatgataatttacacagtaaccaaaatgaaaatactttagtaattataagaaatatagatggtaacgtcatcatcaacaatccaataatatgccggagagtaaacattgacggataaaacaaaaatgctccgcataactctatcatggcaataacacaaccaaatacttgtaagattcctaaattagtagaaaatacaacggatatcgatgtataagtgatctcgagaaataataagaataaagtaatgcccgtaaagataaacatcaacattgtttggtaatcattaaaccaattagtatgacgttgaactaatttcacagtaaattttattccagtattatccccgcatgtataagtacctggtaagatatctttatattccataatcaatgagacatcactatctgataacgaatgaagtctagcactagtatgccatttacttaatattgtcgtcttggaagttttattataagttaaaatatcatggttatccaatttccatctaatatactttgtcggattatctatagtacacggaataatgatggtatcattacatgctgtatactctatggtctttgtagttgttataacaaccaacgtatagaggtatatcaacgatattctaactcttgacattttttatttatttaaaatgatacctttgttatttattttattctattttgctaacggtattgaatggcataagtttgaaacgagtgaagaaataatttctacttacttattagacgacgtattatacacgggtgttaatggggcggtatacacattttcaaataataaactaaacaaaactggtttaactaataataattatataacaacatctataaaagtagaggatgcggataaggatacattagtatgcggaaccaataacggaaatcccaaatgttggaaaatagacggttcagacgacccaaaacatagaggtagaggatacgctccttatcaaaatagcaaagtaacgataatcagtcacaacggatgtgtactatctgacataaacatatcaaaagaaggaattaaacgatggagaagatttgacggaccatgtggttatgatttattcacggcggataacgtaattccaaaagatggtttacgaggagcattcgtcgataaagacggtacttatgacaaagtttacattcttttcactgatactatcggctcaaagagaattgttaaaattccgtatatagcacaaatgtgcctaaacgacgaaggtggtccatcatcgttgtctagtcatagatggtcgacgtttctcaaagtcgaattagaatgtgatatcgacggaagaagttatagataaattattcattctaaaactataaaaacagataatgatacgatactatatgtattcttcgatagtccgcattatgtacctattctatgaataccattaaacaatctttttctacgtcaaaattggaaggatatacaaagcaattgccgtctccagctcctggtatatgtctaccagctggaaaagttgttccacataccacgtttgaagtcatagaaaaatataatgtactagatgatattataaagcctttatctaaccaacctatcttcgaaggaccgtctggtgttaaatggttcgatataaaggagaaggaaaatgaacatcgggaatatagaatatacttcataaaagaaaattctatatattcgttcgatacaaaatctaaacaaactcgtagctcgcaagtcgatgcgcgactattttcagtaatggtaacttcgaaaccgttatttatagcagatatagggataggagtaggaatgccacaaatgaaaaaaatacttaaaatgtaatcttaatcgagtacaccacacgacaatgaacaaacataagacagattatgctggttatgcttgctgcgtaatatgcggtctaattgttggaattatttttacagcgacactattaaaagttgtagaacgtaaattagttcatacaccatcaatagataaaacgataaaagatgcatatattagagaagattgtcctactgactggataagctataataataaatgtatccatttatctactgatcgaaaaaacctgggaggaaggacgtaatgcatgcaaagctctaaatccaaattcggatctaattaagatagagactccaaacgagttaagttttttaagaagccttagacgaggctattgggtaggagaatccgaaatattaaaccagacaaccccatataattttatagctaaaaatgccacgaagaatggaactaaaaaacggaaatatatttgtagtacaacgaatactcccaaactgcattcgtgttacactatataacaattacactacatttttatcataacactacttcggttagatgttttagaaaaaaataaatatcgccgtaccgttcttgtttttataaaaataacaattaacaattatcaaattttttctttaatattttacgtggttgaccattcttggtggtaaaataatctcttagtgttggaatggaatgctgtttaatgtttccgcactcatcgtatattttgacgtatgcagtcacatcgtttacgcaatagtcagactgtagttctatcatgcttcctacatcagaaggaggaacagttttaaagtctcttggttttaatctattgccattagttttcatgaaatcctttgttttatccacttcacattttaaataaatgtccactatacattcttctgttaattttactagatcgtcatgggtcatagaatttataggttccgtagtccatggatccaaactagcaaacttcgcgtatacggtatcgcgattagtgtatacaccaactgtatgaaaattaagaaaacagtttaataaatcaacagaaatatttaatcctccgtttgatacagatgcgccatatttatggatttcggattcacacgttgtttgtctgaggtgttcgtctagtgttgcttctacgtaaacttcgattcccatatattctttattgtcagaatcgcataccgatttatcatcatacactgtttgaaaactaaatggtatacacatcaaaataataaataataacgagtacattctgcaatattgttatcgtaattggaaaattagtgttcgagtgagtcggattatgtgagtactggattgtatattttattttatattttgtaataagaataaaatgctaatgtcaagtttattccaatagatgtcttattaaaaaacatatataataaataacaatggctgaatggcataaaattatcgaggatatctcaaaaaataataagttcgaggatgccgccatcgttgattacaagactacaaagaatgttctagctgctattcctaacagaacatttgccaagattaatccgggtgaaattattcctctcatcactaatcgtaatattctaaaacctcttattggtcagaaatattgtattgtatatactaactctctaatggatgagaacacgtatgctatggagttgcttactgggtacgcccctgtatctccgatcgttatagcgagaactcataccgcacttatatttttgatgggtaagccaacaacatccagacgtgatgtgtatagaacgtgtagagatcacgctacccgtgtacgcgcaactggtaattaaaataaaaagtaatattcatatgtagtgtcaattttaaatgatgatgatgaaatggataatatccatattgacgatgtcaataatgccggtattggcatacagctcatcgatttttagatttcattcagaggatgtggaattatgttatgggcatttgtattttgataggatctataatgtagtaaatataaaatataatccgcatattccatatagatataattttattaatcgcacgttaaccgtagatgaactagacgataatgtcttttttacacatggttattttttaaaacacaaatatggttcacttaatcctagtttgattgtctcattatcaggaaacttaaaatataatgatatacaatgctcagtaaatgtatcgtgtctcattaaaaatttggcaacgagtacatctactatattaacatctaaacataagacttattctctacatcggtccacgtgtattactataataggatacgattctattatatggtataaagatataaatgacaagtataatgacatctatgattttactgcaatatgtatgctaatagcgtctacattgatagtgaccatatacgtgtttaaaaaaataaaaatgaactcttaattatgctatgctattagaaatggataaaatcaaaattacggttgattcaaaaattggtaatgttgttaccatatcgtataacttggaaaagataactattgatgttacacctaaaaagaaaaaagaaaaggatgtattattagcgcaatcagttgctgtcgaagaggcaaaagatgtcaaggtagaagaaaaaaatattatcgatattgaagatgacgatgatatggatgtagaaagcgcataatacgatctataaaaataagtatataataaatactttttatttacggtactcttgtagtggtgataccctactcaattatttttttaaaaaaatacttattctgattcttctagccatttccgtgttcgttcgaatgccacatcgacgttaaagataggggagtagttgaaatctagttctgcattgttggtacgcacctcaaatgtagtgttggatatcttcaacgtatagttgttgagtagtgatggttttctaaatagaattctcttcatatcattcttgcacgcgtacatttttagcatccatcttggaattctagatccttgttctattcccaatggtttcatcaatagaagattaaacatatcgtacgaacacgatggagagtaatcgtagcaaaagtaagcatttcctttaatcttagatcccggatactggatatattttgcagccaacacgtgcatccatgcagcatttcctacatatacccggctatgcaccgcgtcatcatcgactgtacgatacataatgttaccgtgttgcttacattgctcgtaaaagactttcgtcaatttgtctccttctccgtaaattccagtgggtcttaggcaacaagtatacaattttgctccattcatgattacggaattattggctttcataaccagttgctcggccatacgtttactttttgcgtatacatgtcctggtgatatatcataaagggtatgctcatggccgatgaatggatcaccgtgtttattgggtcctattgcttccatgctactagtatagatcaaatacttgattcctaggtccacacaagctgccaatatagtctgtgttccataatagtttactttcatgatttcattatcggtgtattttccaaatacatccactagagcagccgtatgaataatcagatttaccccatctagcgcttctctcaccttatcaaagtcgtttatatcacattgtatatagtttataaccttaactttcgaggttattggttgtggatcttctacaatatctatgactctgatttcttgaacatcatctgcactaattaacagttttactatatacctgcctagaaatccggcaccaccagtaaccgcgtacacggccattgctgccactcataatatcagactacttattctattttactaaataatggctgtttgtataatagaccacgataatatcagaggagttatttactttgaaccagtccatggaaaagataaagttttaggatcagttattggattaaaatccggaacgtatagtttgataattcatcgttacggagatattagtcaaggatgtgattccataggcagtccagaaatatttatcggtaacatctttgtaaacagatatggtgtagcatatgtttatttagatacagatgtaaatatatttacaattattggaaaggcgttatctatttcaaaaaatgatcagagattagcgtgtggagttattggtatttcttacataaatgaaaagataatacattttcttacaattaacgagaatggcgtttgatatatcagttaatgcgtctaaaacaataaatgcattagtttacttttctactcagcaaaataaattagtcatacgtaatgaagttaatgatacacactacactgtcgaatttgatagggacaaagtagttgacacgtttatttcatataatagacataatgacaccatagagataagaggggtgcttccagaggaaactaatattggttgcgcggttaatacgccggttagtatgacttacttgtataataagtatagttttaaactgattttagcagaatatataagacacagaaatactatatccggcaatatttattcggcattgatgacactagatgatttggctattaaacagtatggagacattgatctattatttaatgagaaacttaaagtagactccgattcgggactatttgactttgtcaactttgtaaaggatatgatatgttgtgattctagaatagtagtagctctatctagtctagtatctaaacattgggaattgacaaataaaaagtataggtgtatggcattagccgaacatatatctgatagtattccaatatctgagctatctagactacgatacaatctatgtaagtatctacgcggacacactgagagcatagaggatgaatttgattattttgaagacgatgattcgtctacatgttctgccgtaaccgacagggaaacggatgtataattttttttatagcgtgaaggatatgataaaaaatataattgttgtatttatcccattccaatcaccttatatgattctgtaaaaaaattatactgtaacacaataaaggagtcttatagatgtatagaggtcagatactggtttgataaactgtttattccacataagtatgtttgactttatggttagacccgcatactttaacaaatcactgaaaattggagttaggtattgacctctcagaatcagttgccgttctggaacattaaatgtattttttatgatatactccaacgcatttatgtgggcatacaacaagtcattactaatggagtattccaagagttttagttgtctagtatttaacaagagaagagatttcaacagactgtttatgaactcgaacgccgcctcattgtcgcttatattgatgatgtcgaattctcccaatatcatcactgatgagtagctcatcttgttatcgggatccaagttttctaaagatgtcattaaaccctcgatcatgaatggatttatcatcatcgtttttatgttggacatgagcttagtccgtttgtccacatctatagacgacgatttctgaattatttcatatatccctctctttaactccaggaacttgtcaggatggtctactttaatatgttctcgtctaagagatgaaaatctttggatggttgcacgcgacttttctttaaaggatgacgttgcccaagatcctctcttaaatgaatccatcttatccttggacaagatggacagtctattttccttagatggtttaatatttttgttacccatgatctataaaggtagacctaatcgtctcggatgaccatatatttattttcagttttattatacgcataaattgtaaaaaatatgttaggtttacaaaaatgtctcgtggggcattaatcgtttttgaaggattggacaaatctggaaaaacaacacaatgtatgaacatcatggaatctataccggcaaacacgataaaatatcttaactttcctcagagatccactgtcactggaaagatgatagatgactatctaactcgtaaaaaaacctataatgatcatatagttaatctattattttgtgcaaatagatgggagtttgcatcttttatacaagaacaactagaacagggaattactttaatagttgatagatacgcattttctggagtagcgtatgccgccgctaaaggcgcgtcaatgactctcagtaagagttatgaatctggattgcctaaacccgacttagttatattcttggaatctggtagcaaagaaattaatagaaacgtcggcgaggaaatttatgaagatgttacattccaacaaaaggtattacaagaatataaaaaaatgattgaagaaggagatattcattggcaaattatttcttctgaattcgaggaagatgtaaagaaggagttgattaagaatatagttatagaggctatacacacggttactggaccagtggggcaactgtggatgtaatagtgaaattacattttttataaatagatgttagtacagtgttataaatggatgaagcatattactctggcaacttggaatcagtactcggatacgtgtccgatatgcataccgaactcgcatcaatatctcaattagttattgccaagatagaaactatagataatgatatattaaacaaggacattgtaaattttatcatgtgtagatcaaacttggataatccatttatctctttcctagatactgtatatactattatagatcaagagatctatcagaccgaattgattaattcattagacgacaatgaaattatcgattgtatagttaacaagtttatgagcttttataaggataacctagaaaatatagtagatgctatcattactctaaaatatataatgaataatccagattttaaaactacgtatgccgaagtactcggttccagaatagccgatatagatattaaacaagtgatacgtaagaatatactacaattgtctaatgatatccgcgaacgatatttgtgaaaaatattaaaaaaaaatactttttttattaaatgacgtcgcttcgcgaatttagaaaattatgctgtgatatatatcacgcatcaggatataaagaaaaatctaaattaattagagactttataacagatagggatgataaatatttgatcattaagctattgcttcccggattagacgatagaatttataacatgaacgataaacaaattataaaattatatagtataatatttaaacaatctcaggaagatatgctacaagatttaggatacggatatataggagacactattaggactttcttcaaagagaacacagaaatccgtccacgagataaaagcattttaactttagaagaagtggatagttttttaactacgttatcatccgtaactaaagaatcgcatcaaataaaattattgactgatgtagcatctgtttgtacatgtaatgatttaaaatgtgtagtcatgcttattgataaagatctaaaaattaaagcgggccctcggtacgtacttaacgctattagtcctcatgcctatgatgtgtttagaaaatctaataacttgaaagagataatagaaaatgcatctaaacaaaatctagactctatatctatttctgttatgactccaattaatcccatgttagcggaatcgtgtgattctgtcaataaggcgtttaaaaaatttccatcaggaatgtttgcggaagtcaaatacgatggtgaaagagtacaagttcataaaaataataacgagtttgccttctttagtagaaacatgaaaccagtactctctcataaagtggattatctcaaagaatacataccgaaagcatttaaaaaagctacgtctatcgtattggattctgaaattgttcttgtagacgaacataatgtaccgctaccgtttggaagtttaggaatacacaaaaagaaagaatataaaaactctaacatgtgtttgttcgtgtttgactgtttgtactttgatggattcgatatgacggacattccattgtacgaacgaagatcttttctcaaagatgttatggttgaaatacccaatagaatagtattctcagagttgacgaatattagtaacgagtctcagttaactgacgtattggatgatgcactaacgagaaaattagaaggattggtcttaaaagatattaatggagtatacgaaccgggaaagagaagatggttaaaaataaagcgagactatttgaacgagggttccatggcagattctgccgatttagtagtactaggtgcctactatggtaaaggagcaaagggtggtatcatggcagtctttctaatgggttgttacgacgatgaatccggtaaatggaagacggttaccaagtgttcaggacacgatgataatacgttaagggagttgcaagaccaattaaagatgattaaaattaacaaggatcccaaaaaaattccagagtggttagtagttaataaaatctatattcccgattttgtagtagaggatccgaaacaatctcagatatgggaaatttcaggagcagagtttacatcttccaagtcccataccgcaaatggaatatccattagatttcctagatttactaggataagagaggataaaacgtggaaagaatctactcatctaaacgatttagtaaacttgactaaatcttaatagttacatacaaactgaaaattaaaataacaccatttagttggtggtcgccatggatggtgttattgtatactgtctaaacgcgttagtaaaacatggcgaggaaataaatcatataaaaaatgatttcatgattaaaccatgttgtgaaagagtttgtgaaaaagtcaagaacgttcacattggcggacaatctaaaaacaatacagtgattgcagatttgccatatatggataatgcggtatccgatgtatgcaattcactgtataaaaagaatgtatcaagaatatccagatttgctaatttgataaagatagatgacgatgacaagactcctactggtgtatataattattttaaacctaaagatgttattcctgttatcatatctataggaaaggataaagatgtctgtgaactattaatctcatcagacatatcgtgtgcatgcgtggagttaaattcatatcacgtagccattcttcccatgaatgtttccttttttaccaaaggaaatgcctcgttgattattctcctgtttgatttctctatcgatgcagcacctctcttaagaagtgtaaccgataataatgttattatatctagacaccagcgtctacatgacgagcttccgagttccaattggttcaagttttacataagtataaagtccgactattgttctatattatatatggttgttgatggatctgtgatgcatgcgatagctgataatagaactcacgcaattattagcaaaaatatattagacaatactacaattaacgatgagtgtagatgctgttattttgaaccacagattaggattcttgatagagatgagatgctcaatggatcatcgtgtgatatgaacagacattgtattatgatgaatttacctgatgtaggcgaatttggatctagtatgttggggaaatatgaacctgacatgattaagattgctctttcggtggctggtaatttaataagaaatcgagactacattcccgggagacgaggctatagctactacgtttacggtatagcctctagataatttttttaagcacgaaataaaaaacataattttaaaccaatctatttcatactattttgtgtgatcaccatggacataaagatagatattagtatttctggtgataaatttacggtgactactaggagggaaaatgaagaaagaaaaaaatatctacctctccaaaaagaaaaaactactgatgttatcaaacctgattatcttgagtacgatgacttgttagatagagatgagatgtttactattctagaggaatattttatgtacagaggtctattaggcctcagaataaaatatggacgactctttaacgaaattaaaaaattcgacaatgatgcggaagaacaattcggtactatagaagaactcaagcagaaacttagattaaattctgaagagggagcagataactttatagattatataaaggtacaaaaacaggatatcgtcaaacttactgtatacgattgcatatctatgataggattgtgtgcatgcgtggtagatgtttggagaaatgagaaactgttttctagatggaaatattgtttacgagcgattaaactgtttattaatgatcacatgcttgataagataaaatctatactgcagaatagactagtatatgtggaaatgtcatagaaagttaatgagagcaaaaatatataaggttgtattccatatttgttattttttctgtaatagttaaaaaaatacattcgatggtctatctatcagattattatgtgttataaggtactttttctcataataaactagagtatgagtaagatagtgtttttcaaaacatataaatctaaaattgatggatgagatatacagctattaatttcgaaaatatataaatctaaaattgatggataagatatacagctattaatttcgaaaatatattttaatctgataactttaaacatggatttttgatggtggtttaacgttttaaaaaaagattttgttattgtagtatatgataatattaaaagatggatataaagaatttgctgactgcatgtactattttttacattactacattggctacggcagatatacctactccgccaccaacgggtcatgtgacaagggagaatatcttgataagaggcataatcaatgttgtaatcggtgtccacctggagaatttgccaaggttagatgtaatggtaacgataacacaaaatgtgaacgctgcccacctcatacatataccacaatccccaattattctaatggatgtcatcaatgtagaaaatgcccaaccggatcatttgataaggtaaagtgtaccggaacacagaacagtaaatgttcgtgtcttcctggttggtattgcgctactgattcttcacagactgaagattgttgaaattgtgtaccaaaaaggagatgtccatgcggatactttggtggaatagatgaacaaggaaatcctatttgtaaatcgtgctgtattggtgaatattgcaactacctacgtaattatagacttgatccattttctccatgcaaactatctaaatgtaattaattatgattttgatgataatgttaccatacattatatcgctacttggttagtgtattattcagtatgaagacctattaataattacttatcttttgacgatcttgttataattataatataaaaacttatggcatagtaactcataattgctgacgcgataaattcgtaataatctgttttgttcaaatttttataaggaatctacaggcataaaaataaaaatataatttataatatactcttacagcgcgccatcatgaatagcagcagtaaattaattgctgttattaatggatttagaaatagtggacgattttgtgatattaatatagttattaatgatgaaaggataaacgctcacagactcatcctatctggagcctccgaatatttttccattctgttttccaataattttatcgattctaatgaatacgaagttaatctaagtcatttagattatcaaagtgttaacgatttgatcgattacatttatgggatacctttgagcctaactaacgataacgtgaaatatattctttcaaccgctgattttttacaaattggatctgccattactgagtgcgaaaaatacatacttaaaaatctttgttctagaaactgtatcgatttctacatatacgctgataaatataataacaagaaaatagaatcagcgtcgtttaacacaatattacgaaatattttgagactcatcaacgatgaaaactttaaatacttaacagaggaatcaatgataaaaattttaagcgatgatatgttaaatataaaaaatgaggattttgcaccactaattctcattaaatggttagagagtactcaacaatcatgcaccgtcgagttacttagatgcctcagaatatcattgctttccccacaagttataaaatcactttatagtcatcaactggttagttcaatctacgaatgtataacattcttaaacaatatagcattcttggatgaatcatttcctagataccatagcatcgagttgatatctatcggtataagtaattcgcatgataagatttccataaactgctacaatcataaaaaaaatacatgggaaatgatatcttcacgtagatataggtgtagtttcgcagtggccgtcctggataatattatctatatgatgggtggatatgatcagtccccgtatagaagttcaaaggttatagcgtacaatacatgtacaaattcttggatatatgatataccagagctaaaatatcctcgttctaattgtgggggactggctgatgacgaatacatttattgtataggcggcatacgcgatcaggattcatcgttgacatctagtattgatagatggaagccatcaaaaccatattggcagaagtatgctaaaatgcgcgaaccaaaatgtgatatgggggttgcgatgttaaacggattaatatatgtcatgggtggaatcgttaaaggtgacacgtgtaccgacgcactagagagtttatcagaagatggatggatgaagcatcaacgtcttccaataaaaatgtccaatatgtcgacgattgttcatgatggcaagatttatatatctggaggttacaacaatagtagtgtagttaatgtaatatcgaatctagtccttagctataatccgatatatgatgaatggaccaaattatcatcattaaacattcctagaattaatcccgctctatggtcagcgcataataaattatatgtaggaggaggaatatctgatgatgttcgaactaatacatctgaaacatacgataaagaaaaagattgttggacattggataatggtcacgtgttaccacgcaattatataatgtataaatgcgaaccgattaaacataaatatccattggaaaaaacacagtacacgaatgattttctaaagtatttggaaagttttataggtagttgatagaacaaaatacataattttgtaaaaataaatcactttttatactaatatgacacgattaccaatacttttgttactaatatcattagtatacgctacaccttttcctcagacatctaaaaaaataggtgatgatgcaactctatcatgtaatcgaaataatacaaatgactacgttgttatgagtgcttggtataaggagcccaattccattattcttttagctgctaaaagcgacgtcttgtattttgataattataccaaggataaaatatcttacgactctccatacgatgatctagttacaactatcacaattaaatcattgactgctagagatgccggtacttatgtatgtgcattctttatgacatcaactacaaatgacactgataaagtagattatgaagaatactccacagagttgattgtaaatacagatagtgaatcgactatagacataatactatctggatctacacattcaccagaaactagttctgagaaaccagaggatatagataattttaattgctcgtcggtattcgaaatcgcgactccggaaccaattactgataatgtagaagatcatacagacaccgtcacatacactagtgatagcattaatacagtaagtgcatcatctggagaatccacaacagacgagactccggaaccaattactgataaagaagaagatcatacagtcacagacactgtctcatacactacagtaagtacatcatctggaattgtcactactaaatcaaccaccgatgatgcggatctttatgatacgtacaatgataatgatacagtaccaccaactactgtaggcggtagtacaacctctattagcaattataaaaccaaggactttgtagaaatatttggtattaccgcattaattatattgtcggccgtggcaatattctgtattacatattatatatataataaacgttcacgtaaatacaaaacagagaacaaagtctagatttttgacttacataaatgtctgggatagtaaaatctatcatattgagcggaccatctggttcaggaaagacagccatagccaaaagactatgggaatatatttggatttgtggtgtcccataccactagatttcctcgtcctatggaacgagaaggtgtcgattaccattacgttaacagagaggccatctggaagggaatagccgccggaaactttctagaacatactgagtttttaggaaatatttacggaacttctaaaactgctgtgaatacagcggctattaataatcgtatttgtgtgatggatctaaacatcgatggcgttagaagtcttaaaaatacgtacctaatgccttactcggtgtatataagacctacctctcttaaaatggttgagaccaagcttcgttgtagaaacactgaagcggatgatgagattcatcgtcgtgtgatgttggcaaaaactgacatggatgaggcaggtgaagccggtctattcgacactattatcattgaagatgatgtgaatttagcatatagtaagttaattcagatactacaggaccgtattagaatgtattttaacactaattagagacttaagacttaaaacttgataattaataatataactcgtttttatatgtggctatttcaacgtctaatgtattagttaaatattaaaacttaccacgtaaaacttaaaatttaaaatgatatttcattgacagatagatcacacattatgaactttcaaggacttgtgttaactgacaattgcaaaaatcaatgggtcgttggaccattaataggaaaaggtggattcggtagtatttatactactaatgacaataattatgtagtaaaaatagagcccaaagctaacggatcattatttaccgaacaggcattttatactagagtacttaaaccatccgttatcgaagaatggaaaaaatctcacaatataaagcacgtaggtcttatcacgtgcaaggcatttggtctatacaaatccattaatgtggaatatcgattcttggtaattaatagattaggtgcagatctagatgcggtgatcagagccaataataatagattaccaaaaaggtcggtgatgttgatcggaatcgaaatcttaaataccatacaatttatgcacgagcaaggatattctcacggagatattaaagcgagtaatatagtcttggatcaaatagataagaataaattatatctagtggattacggattggtttctaaattcatgtctaatggcgaacatgttccatttataagaaatccaaataaaatggataacggtactctagaatttacacctatagattcgcataaaggatacgttgtatctagacgtggagatctagaaacacttggatattgtatgattagatggttgggaggtatcttgccatggactaagatatctgaaacaaagaattgtgcattagtaagtgccacaaaacagaaatatgttaacaatactgcgactttgttaatgaccagtttgcaatatgcacctagagaattgctgcaatatattaccatggtaaactctttgacatattttgaggaacccaattacgacgagtttcggcacatattaatgcagggtgtatattattaagtgtggtgtttggtcgatgtaaaatttttgtcgataaaaattaaaaaataacttaatttattattgatctcgtgtgtacaaccgaaatcatggcgatgttttacgcacacgctctcggtgggtacgacgagaatcttcatgcctttcctggaatatcatcgactgttgccaatgatgtcaggaaatattctgttgtgtcagtttataataacaagtatgacattgtaaaagacaaatatatgtggtgttacagtcaggtgaacaagagatatattggagcactgctgcctatgtttgagtgcaatgaatatctacaaattggagatccgatccatgatcaagaaggaaatcaaatctctatcatcacatatcgccacaaaaactactatgctctaagcggaatcgggtacgagagtctagacttgtgtttggaaggagtagggattcatcatcacgtacttgaaacaggaaacgctgtatatggaaaagttcaacatgattattctactatcaaagagaaggccaaagaaatgaatgcactcagttcaggacctatcatcgattaccacgtctggataggagattgtatctgtcaagttactgctgtggacgtacatggaaaggaaattatgagaatgagattcaaaaagggtgcggtgctacagatcccaaatctggtaaaagttaaacttggggagaatgatacagaaaatctttcttctactatatcggcggcaccatcgaggtaaccacctctcaagaagaccgcgtgaataatgtactcatgaaacgtttggaaactatacgccatatgtggtctgttgtatatgatcattttgatattgtgaatggtaaagaatgctgttatgtgcatacgcattcatctaatcaaaatcctataccgagtactgtaaaaacaaatttgtacatgaagactatgggatcatgcattcaaatggattccatggaagctctagagtatcttagcgaactgaaggaatcaggtggatggagtcccagaccagaaatgcaggaatttgaatatccagatggagtggaagacactgaatcaattgagagattggtagaggagttcttcaatagatcagaacttcaggctggtaaattagtcaaatttggtaattctattaattgttaaacatacatctgtttcagctaagcaactaagaacacgtatacggcagcagcttccttttatactctcatcttttaccaacacaaagggtggatatttgttcattggagttgataataatacacacaaagtatttggattcacggtgggttacgactacctcagactgatagagaatgatatagaaaagcatatcaaaagactttgtgttgtgcatttctgtgagaagaaagaggacatcaagtacacgtgtcgattcatcaaggtatataaacctggggatgaggctacctcgacatacgtgtgcgctatcaaagtggaaagatgctgttgtgctgtgtttgcagattggccagaatcatggtatatggatactaatggtatcaagaagtattctccagatgaatgggtgtcacatataaaattttaattaatgtaactatagagaacaaataataggttgtaatatcatatagacaataactaacaattaattagtaactgttatctcttttttaactaaccaactaactatatacctattaatacatcgtaattatagttcttaacatctattaatcattgattcgcttctttaattttttataaactaacattgttaattgaaaagggataacatgttacagaatataaattatatatggatttttttaaaaaggaaatacttgactggagtgtatatttatctcttcattatatagcacgcgtgtgttccaattcttccacatcccatataatacaggattataatctcgttcgaacatacgagaaagtggataaaacaatagttgattttttatctaggttgccaaatttattccatattttagaatatggggaaaatattctacatatttattctatggatgatgctaatacgaatattataattttttttctagatagagtattaaatattaataagaacgggtcatttatacacaatctcaggttatcatcatccattaatataaaagaatatgtatatcaattagttaataatgatcatccagataataggataagactaatgcttgaaaatggacgtagaacaagacattttttgtcctatatatcagatacagttaatatctatatatgtattttaataaatcatggattttatatagatgcagaagacagttacggttgtacattattacatagatgtatatatcactataagaaatcagaatcagaatcatacaatgaattaattaagatattgttaaataatggatccgatgtagataaaaaagatacgtacggaaacacaccttttatcctattatgtaaacacgatatcaacaacgtggaattgtttgagatatgtttagagaatgctaatatagactctgtagactttaatagatatacacctcttcattatgtctcatgtcgtaataaatatgattttgtaaagttattaatttctaaaggagcaaatgttaatgcgcgtaataaattcggaactactccattttattgtggaattatacacggtatctcgcttataaaactatatttggaatcagacacagagttagaaatagataatgaacatatagttcgtcatttaataatttttgatgctgttgaatctttagattatctattatccagaggagttattgatattaactatcgtactatatacaacgaaacatctatttacgacgctgtcagttataatgcgtataatacgttggtctatctattaaacagaaatggtgattttgagacgattactactagtggatgtacatgtatttcggaagcagtcgcaaacaacaacaaaataataatggaagtactattgtctaaacgaccatctttgaaaattatgatacagtctatgatagcaattactaaaaataaacaacataatgcagatttattgaaaatgtgtataaaatatactgcgtgtatgaccgattatgatactcttatagatgtacagtcgctacagcaatataaatggtatattttaaaatgtttcgatgaaatagatatcatgaagagatgttatataaaaaataaaactgtattccaattagttttttgtatcaaagacattaatactttaatgagatatggtaaacatccttctttcgtgaagtgcactagtctcgacgtatacggaagtcgtgtacgtaatatcatagcatctattagatatcgtcagagattaattagtctattatccaagaagctggatgcgggagataaatggtcgtgttttcctaacgaaataaaatataaaatattggaaaactttaacgataacgaactatccacatatctaaaaatcttataaacactattaaaatataaaatctaagtaggataaaatcacactacatcattgtttccttttagtgctcgacagtgtatactatttttaacactcataaataaaaatgaaaacgatttccgttgttacgttgttatgcgtactacctgctgttgtttattcaacatgtactgtacccactatgaataacgctaaattaacgtctaccgaaacatcgtttaatgataaacagaaagttacatttacatgtgatcagggatatcattctttggatccaaatgctgtctgcgaaacagataaatggaaatacgaaaatccatgcaagaaaatgtgcacagtttctgattatgtctctgaattatatgataagccattatacgaagtgaattccaccatgacactaagttgcaacggcgaaacaaaatattttcgttgcgaagaaaaaaatggaaatacttcttggaatgatactgttacgtgtcctaatgcggaatgtcaacctcttcaattagaacacggatcgtgtcaaccagttaaagaaaaatactcatttggggaatatatgactatcaactgtgatgttggatatgaggttattggtgcttcgtacataagttgtacagctaattcttggaatgttattccatcatgtcaacaaaaatgtgatataccgtctctatctaatggattaatttccggatctacattttctatcggtggcgttatacatcttagttgtaaaagtggttttatactaacgggatctccatcatccacatgtatcgacggtaaatggaatcccatactcccaacatgtgtacgatctaacgaaaaatttgatccagtggatgatggtcccgacgatgagacagatttgagcaaactctcgaaagacgttgtacaatatgaacaagaaatagaatcgttagaagcaacttatcatataatcatagtggcgttaacaattatgggcgtcatatttttaatctccgttatagtattagtttgttcctgtgacaaaaataatgaccaatataagttccataaattgctaccgtaaatataaatccgttaaaataattaataatttaataacaaacaagtatcaaaagattaaagacttatagctagaatcaattgagatgtcttcttcagtggatgttgatatctacgatgccgttagagcatttttactcaggcactattataacaagagatttattgtgtatggaagaagtaacgccatattacataatatatacaggctatttacaagatgcgccgttataccgttcgatgatatagtacgtactatgccaaatgaatcacgtgttaaacaatgggtgatggatacacttaatggtataatgatgaatgaacgcgatgtttctgtaagcgttggcaccggaatactattcatggaaatgtttttcgattacaataaaaatagtatcaacaatcaactaatgtatgatataattaatagcgtatctataattctagctaatgagagatatagaagcgcttttaacgacgatggtatatacatccgtagaaatatgattaacaagttgtacggatacgcatctctaactactattggcacgatcgctggaggtgtttgttattatctgttgatgcatctagttagtttgtataaataattatttcaatatactagttaaaattttaagattttaaatgtataaaaaactaataacgtttttatttgtaataggtgcattagcatcctattcgaataatgagtacactccgtttaataaactgagtgtaaaactctatatagatggagtagataatatagaaaattcatatactgatgataataatgaattggtgttaaattttaaagagtacacaatttctattattacagagtcatgcgacgtcggatttgattccatagatatagatgttataaacgactataaaattattgatatgtataccattgactcgtctactattcaacgcagaggtcacacgtgtagaatatctaccaaattatcatgccattatgataagtacccttatattcacaaatatgatggtgatgagcaacaatattctattactgcagagggaaaatgctataaaggaataaaatatgaaataagtatgatcaacgatgatactctattgagaaaacatactcttaaaattggatctacttatatatttgatcgtcatggacatagtaatacatattattcaaaatatgatttttaaaaatttaaaatatattatcacttcagtgacagtagtcaaataacaaacaacaccatgagatatattataattctcgcagttttgttcattaatagtatacacgctaaaataactagttataagtttgaatccgtcaattttgattccaaaattgaatggactggggatggtctatacaatatatcccttaaaaattatggcatcaagacgtggcaaacaatgtatacaaatgtaccagaaggaacatacgacatatccgcatttccaaagaatgatttcgtatctttctgggttaaatttgaacaaggcgattataaagtggaagagtattgtacgggactatgcgtcgaagtaaaaattggaccaccgactgtaacattgactgaatacgacgaccatatcaatttgtacatcgagcatccgtatgctactagaggtagcaaaaagattcctatttacaaacgcggtgacatgtgtgatatctacttgttgtatacggctaacttcacattcggagattctaaagaaccagtaccatatgatatcgatgactacgattgcacgtctacaggttgcagcatagactttgtcacaacagaaaaagtgtgcgtgacagcacagggagccacagaagggtttctcgaaaaaattactccatggagttcgaaagtatgtctgacacctaaaaagagtgtatatacatgcgcaattagatccaaagaagatgttcccaatttcaaggacaaaatggccagagttatcaagagaaaatttaataaacagtctcaatcttatttaactaaatttctcggtagcacatcaaatgatgttaccacttttcttagcatgcttaacttgactaaatattcataactaatttttattaatgatacaaaaacgaaataaaactgcatattatacactggttaacgcccttataggctctaaccattttcaagatgaggtccctgattatagtccttctgttcccctctatcatctactccatgtctattagacgatgtgagaagactgaagaggaaacatggggattgaaaatagggttgtgtataattgccaaagatttctatcccgaaagaactgattgcagtgttcatctcccaactgcaagtgaaggattgataactgaaggcaatggattcagggatatacgaaacaccgataaattataaaaaaagcaatgtgtccgctgtttccgttaataatactattttcgtaactggcggattattcataaataactctaatagcacgatcgtggttaacaatatggaaaaacttgacatttataaagacaaacaatggtcgattatagaaatgcctatggctagggtatatcacggcatcgactcgacatttggaatgttatattttgccggaggtctatccgttaccgaacaatatggtaatttagagaaaaacaacgagatatcttgttacaatcctagaacgaataagtggtttgatatttcatatactatttataagatatccatatcatcattgtgtaaactaaataacgtcttctatgtatttagtaaggacattggatatgtggaaaagtatgatggtgcatggaagttagtacatgatcgtctccccgctataaaggcattatcaacttctccttattgattgaaaatgaaaatataaatagtttttatgtatagcagtattaccctatagttttattgcttactactaacatggatacagatgttacaaatgtagaagatatcataaatgaaatagatagagagaaagaagaaatactaaaaaatgtagaaattgaaaataataaaaacattaacaagaatcatccaagtggatatattagagaagcactcgttattaatacaagtagtaatagtgattccattgataaagaagttatagaatgtatcagtcacgatgtaggaatatagatcatatctactaatttttataatcgatacaaaacataaaaaacaactcgttattacatagcaggcatggaatccttcaagtattgttttgataacgatggcaagaaatggattatcggaaatactttatattctggtaattcaatactatataaggtcagaaaaaatttcactagttcgttctacaattacgtaatgaaaatagatcacaaatcacacaagccattgttgtctgaaatacgattctatatatctgtattggatcctttgactatcgacaactggacacgggaacgtggtataaagtatttggctattccagatctgtatggaattggagaaaccgatgattatatgttcttcgttataaagaattcgggaagagtattcgccccaaaggatactgaatcagtcttcgaagcatgcgtcactatgataaacacgttagagtttatacactctcgaggatttacccatggaaaaatagaaccgaggaatatactgattagaaataaacgtctttcactaattgactattctagaactaacaaactatacaagagtggaaactcacatatagattacaacgaggacatgataacttcaggaaatatcaattatatgtgtgtagacaatcatcttggagcaacagtttcaaaacgaggagatttagaaatgttgggatattgcatgatagaatggttcggtggcaaacttccatggaaaaacgaaagtagtataaaagtaataaaacaaaaaaaagaatataaaaaatttatagctactttctttgaggactgttttcctgaaggaaatgaacctctggaattagttagatatatagaattagtatacacgttagattattctcaaactcctaattatgacagactacgtaaactgtttatacaagattgaaattatattctttttttatagagtgtggtagtgttacggatatctaatattaatattagactatctctatcgcgctacacgaccaatatcgattactatggatatcttcagggaaatcgcatcttctatgaaaggagagaatgtattcatttctccagcgtcaatctcgtcagtattgacaatactgtattatggagctaatggatccactgctgaacagctatcaaaatatgtagaaacggaggagaacacggataaggttagcgctcagaatatctcattcaaatccatgaataaagtatatgggcgatattctgccgtgtttaaagattcctttttgagaaaaattggcgataagtttcaaactgttgacttcactgattgtcgcactatagatgcaatcaacaagtgtgtagatatctttactgaggggaaaatcaatccactattggatgaaccattgtctcctgatacctgtctcctagcaattagtgccgtatactttaaagcaaaatggttgatgccattcgaaaaggaatttaccagtgattatcccttttacgtatctccgacggaaatggtagatgtaagtatgatgtctatgtacggcaaggcatttaatcacgcatctgtaaaggaatcattcggcaacttttcaatcatagaactgccatatgttggagatactagtatgatggtcattcttccagacaagattgatggattagaatccatagaacaaaatctaacagatacaaattttaagaaatggtgtaactctctggaagctacgtttatcgatgttcacattcccaagtttaaggtaacaggttcgtataatcttgtggatactctagtaaagtcaggactgacagaggtgttcggttcaactggagattatagcaatatgtgtaattcagatgtgagtgtcgacgctatgattcacaaaacgtatatagatgtcaatgaagagtatacagaagcagctgcagcaacttgtgcactggtgtcagactgtgcatcaacaattacaaatgagttctgtgtagatcatccgttcatctatgtgattaggcatgttgatggaaaaattcttttcgttggtagatattgctctccgacaactaattgttaaccattttttttaaaaaaatagaaaaaacatgtggtattagtgcaggtcgttgttcttccaattgcaattggtaagatgacggccaactttagtacccacgtcttttcaccacagcactgtggatgtgacagactgaccagtattgatgacgtcagacaatgtttgactgaatatatttattggtcgtcctatgcataccgcaacaggcaatgcgctggacagttgtattccacactcctctcttttagagatgatgcggaatcagtgttcatcgacattcgcgagctggtaaaaaatatgccgtgggatgatgtcaaagattgtacagaaatcatccgttgttatataccggatgagcaaaaaaccatcagagagatttcggccatcatcggactttgtgcatatgctgctacttactggggaggtgaagaccatcccactagtaacagtctgaacgcattgtttgtgatgcttgagatgctcaattacgtggattataacatcatattccggcgtatgaattgatgagttgtacatcttgacattttctttcttctcttctccctttcttctcttctcccttcctccctcttctccctttcccagaaacaaacttttttacccactataaaataaaatgagtatactacctattatatttcttcctatatttttttattcttcattcgttcagacttttaacgcgcctgaatgtatcgacaaagggcaatattttgcatcattcatggagttagaaaacgagccagtaatcttaccatgtcctcaaataaatacgctatcatccggatataatatattagatattttatgggaaaaacgaggagcggataatgatagaattataccgatagataatggtagcaatatgctaattctgaacccgacacaatcagactctggtatttatatatgcattaccacgaacgaaacctactgtgacatgatgtcgttaaatttgacaatcgtgtctgtctcagaatcaaatatagatcttatctcgtatccacaaatagtaaatgagagatctactggcgaaatggtatgtcccaatattaatgcatttattgctagtaacgtaaacgcagatattatatggagcggacatcgacgccttagaaataagagacttaaacaacggacacctggaattattaccatagaagatgttagaaaaaatgatgctggttattatacatgtgttttagaatatatatacagaggtaaaacatataacgtaaccagaattgtaaaattagaggtacgggataaaataataccttctactatgcaattaccagatggcattgtaacttcaataggtagtaatttgactattgcgtgtagagtatcgttgagacctcccacaacggatgcagacgtcttttggataagtaatggtatgtattacgaagaagatgatggggacggagacggtagaataagtgtagcaaataaaatctatatgaccgataagagacgtgttattacatcccggttaaacattaatcctgtcaaggaagaagatgctacaacgtttacgtgtatggcgtttactattcctagcatcagcaaaacagttactgttagtataacgtgaatgtatgttgttacatttccatgtcaattgagtttataagaatttttatacattatcttccaacaaacaattgacgaacgtattgctatgattaactcccacgatactatgcatattattaatcattaacttgcagactatacctagtgctattttgacatactcatgttcttgtgtaattgcggtatctatattattaaagtacgtaaatctagctatagttttattatttaattttagataatataccgtctccttatttttaaaaattgccacatcctttattaaatcatgaatgggaatttctatgtcatcgttagtatattgtgaacaacaagagcagatatctataggaaagggtggaatgcgatacattgatctatgtagttttaaaacacacgcgaactttgaagaatttatataaatcattccatcgatacatccttctatgttgacatgtatatatccaggaattcttttattaatgtcaggaaatgtataaactaaaacattgcccgaaagcggtgcctctatctgcgttatatccgttcttaacttacaaaatgtaaccaatacctttgcatgacttgttttgttcggcaacgttagtttaaacttgacgaatggattaattacaatagcatgatccgcgcatctattaagtttttttactttaacgcccttgtatgtttttacagagactttatctaaatttctagtacttgtatgtgttataaatataacgggatatagaactgaatcacctaccttagatacccaattacattttatcagatccagataataaacaaattttgtcgccctaactaattctatattgttatatattttacaattggttatgatatcatgtaataacttggagtctaacgcgcatcgtcgtacgtttatacaattgtgatttagtgtagtatatctacacatgtatttttccgcactatagtattctggactagtgataaaactatcgttatatctgtcttcaatgaactcatcgagatattgctctctgtcatattcatacacctgcataaactttctagacatcttacaatccgtgttattttaggatcatatttacatatttacgggtatatcaaagatgttagattagttaatgggaatcgtctataataatgaatattaaacaattatatgaggacttttaccacaaagcatcataaaaatgagtcgtcgtctgatttatgttttaaatatcaaccgcaaatcaactcataaaatacaagagaatgaaatatatacatattttagtcattgcaatatagaccatacttctacagaacttgattttgtagttaaaaactatgatctaaacagacgacaacatgtaactgggtatactgcactacactgctatttgtataataattactttacaaacgatgtactgaagatattattaaatcatgacgtaaatgtaacgatgaaaaccagtagcggacgtatgcctgtttatatattgcttactagatgttgcaatatttcacatgatgtagtgatagatatgatagacaaagataaaaaccacttattacatagagactattccaacctattactagagtatataaaatctcgttacatgttattaaaggaagaggatatcgatgagaacatagtatccactttattagataagggaatcgatcctaactttaaacaagacggatatacagcgttacattattattatttgtgtctcgcacacgtttataaaccaggtgagtgtagaaaaccgataacgataaaaaaggccaagcgaattatttctttgtttatacaacatggagctaatctaaacgcgttagataattgtggtaatacaccattccatttgtatcttagtattgaaatgtgtaataatattcatatgactaaaatgctgttgacttttaatccgaatttcaaaatatgtaataatcatggattaacgcctatactatgttatataacttccgactacatacaacacgatattcttgttatgttaatacatcactatgaaacaaatgttggagaaatgccgatagatgagcgtcgtatgatcgtattcgagtttatcaaaacatattctacacgtccggcagattcgataacttatttgatgaataggtttaaaaatataaatatttatacccgctatgaaggaaagacattattacacgtagcatgtgaatataataatacacacgtaatagattatcttatacgtatcaacggagatataaatgcgttaaccgacaataacaaacacgctacacaactcattatagataacaaagaaaattccccgtataccatcgattgtttactgtatatacttagatatattgtagataagaatgtgataagatcgttggtggatcaacttccatctctacctatcttcgatataaaatcatttgagaaattcatatcctactgtatacttttagatgacacattttacgataggcacgttaagaatcgcgattctaaaacgtatcgatacgcattttcaaaatacatgtcgtttgataaatacgatggtataataactaaatgtcacgacgaaacaatgttactcaaactgtccactgttctagacactacactatatgcagttttaagatgccataattcgaaaaagttaagaagatacctcaacgagttaaaaaaatataataacgataagtcctttaaaatatattctaatattatgaatgagagataccttaatgtatattataaagatatgtacgtgtcaaaggtatatgataaactatttcctgttttcacagataaaaattgtctactaacattactaccttcagaaattatatacgaaatattatacatgctgacaattaacgatctttataatatatcgtatccacctaccaaagtatagttgtatttttctcatgcgatgtgtgtaaaaaaactgatattatataaatattttagtgccgtataataaagatgacgatgaaaatgatggtacatatatatttcgtatcattattgttattgctattccacagttacgccatagacatcgaaaatgaaatcacagaattcttcaataaaatgagagatactctaccagctaaagactctaaatggttgaatccagcatgtatgttcggaggcacaatgaatgatatagccgctctaggagagccattcagcgcaaagtgtcctcctattgaagacagtcttttatcgcacagatataaagactatgtggttaaatgggagaggctagaaaagaatagacggcgacaggtttctaataaacgtgttaaacatggtgatttatggatagccaactatacatctaaattcagtaaccgtaggtatttgtgtaccgtaactacaaagaatggtgactgtgttcagggtatagttagatctcatattaaaaaacctccttcatgcattccaaaaacatatgaactaggtactcatgataagtatggcatagacttatactgtggaattctttacgcaaaacattataataatataacttggtataaagataataaggaaattaatatcgacgacattaagtattcacaaacgggaaagaaattaattattcataatccagagttagaagatagtggaagatacaactgttacgttcattacgacgacgttagaatcaagaatgatatcgtagtatcaagatgtaaaatacttacggttataccgtcgcaagaccacaggtttaaactaatactagatccaaaaatcaacgtaacgataggagaacctgccaatataacatgcactgctgtgtcaacgtcattattgattgacgatgtactgattgaatgggaaaatccatccggatggcttataggattcgattttgatgtatactctgttttaactagtagaggcggtattaccgaggcgaccttgtactttgaaaatgttactgaagaatatataggtaatacatataaatgtcgtggacacaactattattttgaaaaaacccttacaactacagtagtattggagtaaatacacaatgcatttttatatacattactgaataattattattattatttatatcgtatttgtgctataacgcgactatctaggtatttgtatctcactgatagagaacatataaatatagactctattaaacagttgtgtaaaatatcaaatcctaatagatgtggatgtacggctttacatgagtacttttataattatagatcagtcaacggaaaatacaagtatagatacaacggttactatcaatattatttatctagcgattatgaaaattataatgaatattattatgatgattatgatagaactggtatgaacagtgagagtgataatatatcaatcaaaacagaatatgaattctatgatgaaacacaagatcaaagtacacaactagtaggttacgacattaaactcaaaaccaatgaggatgattttatggctatgatagatcagtgggtgtccatgattatatagatgaatcaattaataaagtagtatatggaagagagtctcacgtaagatggcgggatatatggcaagaacataatgatggcgtatacagtataggaaaggagtgcatagataatatatacgaagacaaccataccgtagacgaattctacaagatagacagcgtatcagatgtagatgacgcggaacacatatctccgataactaatgatgtatctacacaaacatgggaaaagaaatcagagttagatagatacatggaaatgtatcctcgtcatagatatagtaagcattctgtctttaagggattttctgacaaagttagaaaaaatgatttagacatgaatgtggtaaaagaattactttctaacggtgcatctctaacaattaaggatagcagtaataaggatccaataaccgtttattttcgaagaacgataatgaatttagaaatgattgatattattaacaaacatacaactattgatgaacgaaagtatatagtacactcctatctaaaaaattataaaaatttcgattatccatttttcaggaagttagttttgactaataaacattgtctcaacaattattataatataagcgacagcaaatatggaacaccgctacatatattggcgtctaataaaaaattaataactcctaattacatgaagttattagtgtataacggaaatgatataaacgcacgaggtgaagatacacaaatgcgaactccattacacaaatatttgtgtaaatttgtatatcataatattgaatatggtatccgatactataatgaaaagattatagacgcatttatagagttaggagccgatctaactattccaaataacgatggaatgataccagtagtttactgtatacactcaaatgcagaatatggttataacaatattactaacataaagataatacgtaaactacttaatcttagtagacgtgcgtcacataatctatttagagatcgagtcatgcacgattatataagtaatacatatattgatcttgagtgtttagatattattagatcgttggatggattcgatatcaatggttactttgaaggacgtacaccacttcattgcgctatacaacataacttcactcagattgctaagtacttattagatcgaggagctgatatagtcgtacccaacacattgattatacatcagtacatacagtaaatagcatagatatggaggaggatacaaatatttcaaataaagttataaggtacaacactgtcaataatatatggaagacattacctaacttctggactggaactataaatccaggcgtggtctcgcataaagatgatatatatgttgtatgcgacatcaaagatgaaaaaaatgttaagacttgtatatttagatataacacgaatacgtataacggatgggaattggttacgacgacagaaagcagattatcagctctgcatactattcttcatgacaataccataatgatgttacattgttatgaatcgtatatgttacaagatacatttaatgtgtacactcgcgaatggaatcatatgtgtcatcaacattcgaatagttatatcatgtacaatatactacccatctactaaatataatagaataaaataaatgagtatgatcattttagataacgattgattttatcattaccgcttcattcttatattctttgcttacggaacctatatttagaaacatctactaacgattttttatgcttgcattattaatggtatgtaatatgattgattgtgtacgcaataccaatttgttaagtatgaatacggggtacaaacataaactgaaatttaacattatttatttatgatatatatcgttatcgttattgtttggtctataccatggatatctttaaagaactaatcttaaaacaccctgatgaaaatgttttgatttctccagtttctattttatctactttatctattctaaatcatggagcagctggttctacagctgaacaactatcaaaatatatagagaatatgaatgagaatacacccgatgataagaaggatgacaataatgacatggacgtagatattccgtattgtgcgacactagctaccgcaaataaaatatacggtagcgatagtatcgagttccacgcctccttcctacaaaaaataaaagacgattttcaaactgtaaactttaataatgctaaccaaacaaaggaactaatcaacgaatgggttaagacgatgacaaatggtaaaattaattccttattgactagtccgctatccattaatactcgtatgacagttgttagcgccgtccattttaaagcaatgtggaaatatccattttctaaacatcttacatatacagacaagttttatatttctaagaatatagttaccagtgttgatatgatggtgggtaccgagaataacttgcaatatgtacatattaatgaattattcggaggattctctattatcgatattccatacgagggaaactctagtatggtaattatactaccggacgacatagaaggtatatataacatagaaaaaaatataacagatgaaaaatttaaaaaatggtgtggtatgttatctactaaaagtatagacttgtatatgccaaagtttaaagtggaaatgacagaaccgtataatctggtaccgattttagaaaatttaggacttactaatatattcggatattatgcagattttagcaagatgtgtaatgaaactatcactgtagaaaaatttctacatacgacgtttatagatgttaatgaggagtatacagaagcatcggccgttacaggagtatttatgactaacttttcgatggtatatcgtacgaaggtctacataaaccatccattcatgtacatgattaaagacaacacaggacgtatactttttatagggaaatactgctatccgcaataaatataaacaaatagacttttatcacgtttatctatgtctaaatattacaaatagtaatagtataaactaaagctgataatacttaaaaaaataataatatcatttacaattaatagtataaactaaaaattaaacaaatcgttattataagtaatatcaaaatgatgatatacggattaatagcgtgtcttatattcgtgacttcatccatcgctagtccactttatattcccgttattccacccattacggaagataaatcgttcaatagtgtagaggtattagtttccttgtttagagatgaccaaaaagactatacggtaacttctcagttcaataactacactatcgataccaaagactggactatcggcgtactatccacacctgatggtttggatataccattgactaatataacttattggtcacggtttactataggtcgtgcattgttcaaatcagagtctgaggatattttccaaaagaaaatgagtattctaggtgtttctatagaatgtaagaagtcgtcgacattacttacttttttgaccgtgcgtaaaatgactcgagtatttaataaatttccagatatggcttattatcgaggagactgtttaaaagccgtttatgtaacaatgacttataaaaatactaaaactggagagactgattacacgtacctctctaatggggggttgcctgcatactatcgtaatggggtcgatggttgattattgattagtatattccttattcacacaaaaagaacatttttataaacatgaaaccactgtctaaatgtaattatgatcttgatttatagatgaagatcagcctttagaggattttaaccagtatgtttaatatgaaaaaaataaacataacatattttgagattaagcgctattgtgcttaattattttgctctataaactgaatatatagccacaattattgacgggcttgtttatgaccggcaatcatgaatttacagaaattatctctggctatatatcttactgcgacatgttcgtggtgttatgaaacatgcataagaaaaactgcgttgtatcatgacattcaattggagcatgtagaagacaataaagatagtgtagcgtcgctaccgtacaagtagtcaatcaaagagaacgtagtagattgttggctacatttaattggacagatatagctgagggtgttagaaatgagttcattaaaatatgtgatatcaacggaacatatttatataattatactattgctgttagtataattattgattccacggaagaactaccaacagttactccaattacaacaacatatgaaccttctacatataattatactatcgatgatagcactgttattactactgaagaactacaagtgactcctcatatggatctccatcgatgatacatgtattaaaatactttccgaataagtcttttaaatattgtattaattatgaaaaactatgctatgcgagtatgatgcaaagatgtttaatgatacgatactagattttatctctagcgagagatgtcgttagaatcatttatcataactacgtttaataataattcatcaacgaatatcgataacatgtgtcatttatacgttaaagtctgtccgtcttctctattgtttagactgtttgtagaatgctgtgatataaacaaactagtagaaggtacgactccgttacactgttatctaatgaatgaaggatttgaatcatctgttttaaaaaacctattaaaggagtatgtcatgaatacgtttaatgttcatgacatccattacacaaatatttaactcatgatgaagttgagaatgatatgctttctgatagtatagatagctttagctaatataaaaatatattaatccactatatattctagacttgatttaaaaccgataaactactactacgtactgtataagttgttaaaaaaaggagcagaccctaattatgtagatgatagaggtaatacttttcttcattacttctgcatctatatgtccacttatgagaaaacgtcatttaataagatgcatcgtgaaaagaaatttattaaagagttggtaaaatatgaaaccgaaagtaaataatataggaaatacacctctacataactacgtatctcaatatgatatcactctcattcctcatccacaacccattaaaaaaatggaaattaaagccctctattagcataaacggctacaggtctacctttacaatggcctctccttgtgcccagttcagaccctgtcattgccacgctactaaggactccctgaataccgtggccgacgtcagacattgtctgactgaatacatcctgtgggtttctcatagatggacccatagagaaagcgcagggtctctctacaggcttctcatctctttcagaactgatgcaacggagctctttggtggtgagttgaaggattcacttccgtgggacaatatcgacaattgcgtggagatcattaaatgtttcatcagaaatgactccatgaaaaccgccgaagaacttcgtgcaatcattggactttgtactcaatcagctatcgtctctggaagagtcttcaacgataagtatatcgacatactacttatgctgcgaaagattctgaacgagaacgactatctcaccctcttggatcatatccgcactgctaaatactaaatctccttcatgctctctcactacactttttatcatcttatgaggaatgattgccttcatcatttttcgtgaaataggaataattagcaccagaatagctatggattgcacatgtattctatgtcgtctactggatgaagatgtgacgtacaaaaaaataaaactagaaattgaaacgtgtcacaacttatcaaaacatatagatagacgaggaaacaatgcgctacattgttacgtcttcaataaatgcgatacagacattaagattgttcgactgttactctctcgcggagtcgagagactttgtagaaacaacgaaggattaactccgctaggagcatacagtaagcatagatacgtaaaatctcaaattgtgcatctactgatatccagctattcgaattcctctaacgaactcaagtcgaatataaatgatttcgatctgtattcgtatatgtcttcggataatatcgacttacgtctgctaaaatacctaattgtggataaacggatacgtccgtccaagaatacgaattatgcaatcaatggtctcggattggtggatatatacgtaacgacgcctaatccgagaccagaagtattgctatggcttcttaaatcagaatgttacagcaccggttacgtatttcgtacctgtatgtacgacagtgatatgtgtaagaactctcttcattactatatatcgtctcatagagaatctcaatctctatccaaggatgtaattaaatgtttgatcaataacaatgtttccatccatggcagagacgaaggaggatctttacccatccaatactactggtcttgctcaaccatagatatagagattgttaaattattaataaaggatgtggacacgtgtagagtatacgacgtcagccctatattagaggcggattatctaaacaagcgatttagagtaaccccatataatgtagacatggaaatcgttaatcttcttattgagagacgtcatactcttgtcgacgtaatgcgtagtattacttcttacgattccagagactataaccactacatcatcgataacattctaaagagatttagacaacaggatgaatccatcgtacaagccatgttgataaactacttacattacggcgatatggtcgttcgatgcatgttagataacggacaacaactatcctctgcacgactactttgttaataataatctcgtcgatgtaaacgtcgtaaggtttatcgtggaaaataatggacacatggctgtaaatcacgtatcgaacaatggccgtctatgtatgtacggtctgatattatcgagatttaataattgcgggtatcactgttatgaaaccatactaatagatgtatttgatatactaagcaagtacatggataatatagatatgatcgataatgagaataaaactctactatattacgcggtcgatgtcaataatatacaatttgcaaagcggttattggaatatggagcgagtgttacaacatcacgctcgataatcaatacggccatccagaaaagtagttacagaagagaaaacaaaacgaggatagttgatttattacttagctaccatcccactctagagactatgattgacgcatttaatagagatatacgctatctatatcctgaaccattattcgcctgtatcagatacgccttaatcctagatgatgattttccttctaaagtaagtatgatatctccggtcgtcataaggaactaaagcgctatagagtagacattaatagaatgaagaatgcctacatatcaggcgtctccatgtttgatatattatttaaacgaagcaaacgccacagattgagatacgcaaagaatccgacatcaaatggtacaaaaaagaactaacgtccatcattacagaaactgtaaagaacaatgagaggatcgactccatagtggacaacattaatacagacgataacttgatttcgaaattacccatggagatactttattactccattaaataatttatcatggagcgataatgtcctgtttcatttgtttccatgacatattacaaaatcgattccgtccaagatgataaaaacatttaccggcatcataaacacggagtttattttatatgtctcgcataaacattactaaaaaaatatattgttcggttttctttcacatctttaattatgaaaaagtaaatcattatgagatggacgagattgtacgcatcgttcgcgacagtatgtggtacatacctaacgtatttatggacgacggtaagaatgaaggtcacgtttctgtcaacaatgtttgtcatatgtattttacgttctttgatgtggatacatcgtctcatctgtttaagctagttattaaacactgcgatctgaataaacgaggtaactctccattacattgctatacgatgaatacacgatttaatccatctgtattaaagatattgttacaccacggcatgcgtaactttgatagcaaggatgaaaaaggacatattcctctacaccactatctgattcattcactatcaatcgataacaagatctttgatatactaacggacaccattgatgactttagtaaatcatccgatctattgctgtgttatcttagatataaattcaatgggagcttaaactattacgttctgtacaaaggatccgaccctaattgcgtcgacgaggatggactcacttctcttcattactactgtaaacacatatccacgttctacaaaagcaattattacaagttaagtcacactaagatgcgagccgagaagcgattcatctacgcgataatagattatggagcaaacattaacgcggttacacacttaccttcaacagtataccaaacatagtcctcgtgtggtgtatgctcttttatctcgaggagccgatacgaggatacgtaataatcttgattgtacacccatcatggaacgattgtgcaacaggtcatattctcataatgttactcaattggcacgaacaaaaggaagaaggacaacatctactttatctattcataaaacataatcaaggatacactctcaatatactacggtatctactagataggttcgacattcagaaagacgaatactataataccgcctttcaaaattgtaacaacaatgttgcctcatacatcggatacgacatcaaccttccgactaaagacggtattcgacttggtgtttgaaaacagaaacatcatatacaaggcggatgttgtgaatgacatcatccaccacagactgaaagtatctctacctatgattaaatcgttgttctacaagatgtcagaattctctccctacgacgattactacgtaaaaaagatactagcctactgcctattaagggacgagtcattcgcggaactacatagtaaattctgtttaaacgaggactataaaagtgtatttatgaaaaatatatcattcgataagatagattccatcatcgtgacataagtcgccttaaagagattcgaatctccgacaccgacctgtatacggtatcacagctatcttaaagccatacattcggacagacacatttcatttcccatgtacgacgatctcatagaacagtgccatctatcgatggagcataaaagtaaactcgtcgacaaagcactcaataaattagagtctaccatcggtcaatctagactatcgtatttgcctccggaaattatgcgcaatatcatctaaacagtatgttgtacggaaagaaccattacaaatattatccatgatagaaagaaaatatctatatgattggagaagtaggaaacaggaacaagacgacgattactacattattaaatcatgaagtccgtattatactcgtatatattgtttctctcatgtataataataaacggaagagatatagcaccgcatgcaccatccgatggaaagtgtaaagacaacgaatacaaacgccataatttgtgtccgggaacatacgcttccagattatgcgatagcaagactaacacacgatgtacaccctgtggttcgggtaccttcacatctcgcaataatcatttacccgcttgtctaagttgtaacggaagacgcgatcgtgtaacacgactcacaatagaatctgtgaatgctctcccggatattattgtcttctcaaaggatcatccggatgcaaggcatgtgtttcccaaacaaaatgtggaataggatacggagtatccggagacgtcatctgttctccgtgtggtctcggaacatattctcacaccgtctcttccgcagataaatgcgaacccgtacccagtaatacctttaactatatcgatgtggaaattaatctgtatcccgtcaacgacacgtcgtgtactcggacgaccactaccggtctcagtgaatccatctcaacgtcggaactaactattactatgaatcataaagactgtaatcccgtatttcgtgaggaatacttctctgtccttaataaggtagcaacttcaggtttctttacaggagaaaggtgtgcactctgaatttcgagattaaatgcaataacaaagattcttcctccaaacagttaacgaaagcaaagaatgatgacggtatcatgccgcattcggagacagtaactctagtgggcgactgtatatctagcgtcgacatctatatactatatagtaataccaatactcaagactacgaaactgatacaatctcttatcatgtgggtaatgttctcgatgtcgatagccatatgcccggtagttgcgatatacataaactgatcactaattccaaacccacccgctttttatagtaagtttttcacccataaataataaatacaataattaatttctcgtaaaagtagaaaatatattctaatttattgcatggtaaggaagtagaatcataaagaacagtactcaatcaatagcaattatgaaacaatatatcgtcctggcatgcatgtgcctgccagtcttcagcaatcatcctcatcctcatcctcgtgtacggaagaagaaaacaaacatcatatgggaatcgatgttattatcaaagtcacaaagcaagaccaaacaccgaccaatgataagatttgccaatccgtaacggaaattacagagtccgagtcagatccaaatcccgaggtggaatcagaagatgattccacatcagtcgaggatgtagatcctcctaccacttattactccatcatcggtggaggtctgagaatgaactttggattcaccaaatgtcctcagattaaatccatctcagaatccgctgatggaaacacagtgaatgctagattgtccagcgtgtccccaggacaaggtaaggactctcccgcgatcactcatgaagaagctcttgctatgatcaaagactgtgaggtgtctatcgacatcagatgtagcgaagaagagaaagacagcgacatcaagacccatccagtactcgggtctaacatctctcataagaaagtgagttacgaagatatcatcggttcaacgatcgtcgatacaaaatgtgtcaagaatctagagtttagcgttcgtatcggagacatgtgcaaggaatcatctgaacttgaggtcaaggatggattcaagtatgtcgacggatcggcatctgaaggtgcaaccgatgatacttcactcatcgattcaacaaaactcaaagcgtgtgtctgaatcgataactctattcatctgaaattggatgagtagggttaatcgaacgattcaggcacaccacgaattaaaaaagtgtaccggacactatattccggtttgcaaaacaaaaatgttcttaactacattcacaaaaagttacctctcgcgacttcttctttttctgtctcaatagtgtgatacgattatgacactattcctattcctattcctatttcctttcagggtatcacaaaaatattaaacctctttctgatggtctcataaaaaaagttttacaaaaatatttttattctctttctctctttgatggtctcataaaaaaagttttacaaaaatatttttattctctttctctctttgat

SEQ ID NO: 6 - DNA, 197116 bp, Vaccinia virus
  source 1..197116: mol_type = other DNA
  misc_feature 1..197116: note = VIR37
atcaaagagagaaagagaataaaaatatttttgtaaaactttttttatgagaccatcaaagagagaaagagaataaaaatatttttgtaaaactttttttatgagaccatcagaaagaggtttaatatttttgtgataccctgaaaggaaataggaataggaataggaatagtgtcataatcgtatcacactattgagacagaaaaagaagaagtcgcgagaggtaactttttgtgaatgtagttaagaacatttttgttttgcaaaccggaatatagtgtccggtacacttttttaattcgtggtgtgcctgaatcgttcgattaaccctactcatccaatttcagatgaatagagttatcgattcagacacacgctttgagttttgttgaatcgatgagtgaagtatcatcggttgcaccttcagatgccgatccgtcgacatacttgaatccatccttgacctcaagttcagatgattccttgcacatgtctccgatacgaacgctaaactctagattcttgacacattttgtatcgacgatcgttgaaccgatgatatcttcgtaactcactttcttatgagagatgttagacccgagtactggatgggtcttgatgtcgctgtctttctcttcttcgctacatctgatgtcgatagacacctcacagtctttgatcatagcaagagcttcttcatgagtgatcgcgggagagtccttaccttgtcctggggacacgctggacaatctagcattcactgtgtttccatcagcggattctgagatggatttaatctgaggacatttggtgaatccaaagttcattctcagacctccaccgatgatggagtaataagtggtaggaggatctacatcctcgactgatgtggaatcatcttctgattccacctcgggatttggatctgactcggactctgtaatttccgttacggattggcaaatcttatcattggtcggtgtttggtcttgctttgtgactttgataataacatcgattcccatatgatgtttgttttcttcttccgtacacgaggatgaggatgaggatgattgctgaagactggcaggcacatgcatgccaggacgatatattgtttcataattgctattgattgagtactgttctttatgattctacttccttaccatgcaataaattagaatatattttctacttttacgagaaattaattattgtatttattatttatgggtgaaaaacttactataaaaagcgggtgggtttggaattagtgatcagtttatgtatatcgcaactaccgggcatatggctatcgacatcgagaacattacccacatgataagagattgtatcagtttcgtagtcttgagtattggtattactatatagtatatagatgtcgacgctagatatacagtcgcccactagagttactgtctccgaatgcggcatgataccgtcatcattctttgctttcgttaactgtttggaggaagaatctttgttattgcatttaatctcgaaattcagagtgcacacctttctcctgtaaagaaacctgaagttgctaccttattaaggacagagaagtattcctcacgaaatacgggattacagtctttatgattcatagtaatagttagttccgacgttgagatggattcactgagaccggtagtggtcgtccgagtacacgacgtgtcgttgacgggatacagattaatttccacatcgatatagttaaaggtattactgggtacgggttcgcatttatctgcggaagagacggtgtgagaatatgttccgagaccacacggagaacagatgacgtctccggatactccgtatcctattccacattttgtttgggaaacacatgccttgcatccggatgatcctttgagaagacaataatatccgggagagcattcacagattctattgtgagtcgtgttacacgatcgcgtcttccgttacaacttagacaagcgggtaaatgattattgcgagatgtgaaggtacccgaaccacagggtgtacatcgtgtgttagtcttgctatcgcataatctggaagcgtatgttcccggacacaaattatggcgtttgtattcgttgtctttacactttccatcggatggtgcatgcggtgctatatctcttccgtttattattatacatgagagaaacaatatatacgagtataatacggacttcatgatttaataatgtagtaatcgtcgtcttgttcctgtttcctacttctccaatcatatagatattttctttctatcatggataatatttgtaatggttctttccgtacaacatactgtttagatgatattgcgcataatttccggaggcaaatacgatagtctagattgaccgatggtagactctaatttattgagtgctttgtcgacgagtttacttttatgctccatcgatagatggcactgttctatgagatcgtcgtacatgggaaatgaaatgtgtctgtccgaatgtatggctttaagatagctgtgataccgtatacaggtcggtgtcggagattcgaatctctttaaggcgacttatgtcacgatgatggaatctatcttatcgaatgatatatttttcataaatacacttttatagtcctcgtttaaacagaatttactatgtagttccgcgaatgactcgtcccttaataggcagtaggctagtatcttttttacgtagtaatcgtcgtagggagagaattctgacatcttgtagaacaacgatttaatcataggtagagatactttcagtctgtggtggatgatgtcattcacaacatccgccttgtatatgatgtttctgttttcaaacaccaagtcgaataccgtctttagtcggaaggttgatgtcgtatccgatgtatgaggcaacattgttgttacaattttgaaaggcggtattatagtattcgtctttctgaatgtcgaacctatctagtagataccgtagtatattgagagtgtatccttgattatgttttatgaatagataaagtagatgttgtccttcttccttttgttcgtgccaattgagtaacattatgagaatatgacctgttgcacaatcgttccatgatgggtgtacaatcaagattattacgtatcctcgtatcggctcctcgagataaaagagcatacaccacacgaggactatgtttggtatactgttgaaggtaagtgtgtaaccgcgttaatgtttgctccataatctattatcgcgtagatgaatcgcttctcggctcgcatcttagtgtgacttaacttgtaataattgcttttgtagaacgtggatatgtgtttacagtagtaatgaagagaagtgagtccatcctcgtcgacgcaattagggtcggatcctttgtacagaacgtaatagtttaagctcccattgaatttatatctaagataacacagcaatagatcggatgatttactaaagtcatcaatggtgtccgttagtatatcaaagatcttgttatcgattgatagtgaatgaatcagatagtggtgtagaggaatatgtcctttttcatccttgctatcaaagttacgcatgccgtggtgtaacaatatctttaatacagatggattaaatcgtgtattcatcgtatagcaatgtaatggagagttacctcgtttattcagatcgcagtgtttaataactagcttaaacagatgagacgatgtatccacatcaaagaacgtaaaatacatatgacaaacattgttgacagaaacgtgaccttcattcttaccgtcgtccataaatacgttaggtatgtaccacatactgtcgcgaacgatgcgtacaatctcgtccatctcataatgatttactttttcataattaaagatgtgaaagaaaaccgaacaatatatttttttagtaatgtttatgcgagacatataaaataaactccgtgtttatgatgccggtaaatgtttttatcatcttggacggaatcgattttgtaatatgtcatggaaacaaatgaaacaggacattatcgctccatgataaattatttaatggagtaataaagtatctccatgggtaatttcgaaatcaagttatcgtctgtattaatgttgtccactatggagtcgatcctctcattgttctttacagtttctgtaatgatggacgttagttcttttttgtaccatttgatgtcggattctttgcgtatctcaatctgtggcgtttgcttcgtttaaataatatatcaaacatggagacgcctgatatgtaggcattcttcattctattaatgtctactctatagcgctttagttccttatgacgaccggagatatcatacttactttagaaggaaaatcatcatctaggattaaggcgtatctgatacaggcgaataatggttcaggatatagatagcgtatatctctattaaatgcgtcaatcatagtctctagagtgggatggtagctaagtaataaatcaactatcctcgttttgttttctcttctgtaactacttttctggatggccgtattgattatcgagcgtgatgttgtaacactcgctccatattccaataaccgctttgcaaattgtatattattgacatcgaccgcgtaatatagtagagttttattctcattatcgatcatatctatattatccatgtacttgcttagtatatcaaatacatctattagtatggtttcataacagtgatacccgcaattattaaatctcgataatatcagaccgtacatacatagacggccattgttcgatacgtgatttacagccatgtgtccattattttccacgataaaccttacgacgtttacatcgacgagattattattaacaaagtagtcgtgcagaggatagttgttgtccgttatctaacatgcatcgaacgaccatatcgccgtaatgtaagtagtttatcaacatggcttgtacgatggattcatcctgttgtctaaatctctttagaatgttatcgatgatgtagtggttatagtctctggaatcgtaagaagtaatactacgcattacgtcgacaagagtatgacgtctctcaataagaagattaacgatttccatgtctacattatatggggttactctaaatcgcttgtttagataatccgcctctaatatagggctgacgtcgtatactctacacgtgtccacatcctttattaataatttaacaatctctatatctatggttgagcaagaccagtagtattggatgggtaaagatcctccttcgtctctgccatggatggaaacattgttattgatcaaacatttaattacatccttggatagagattgagattctctatgagacgatatatagtaatgaagagagttcttacacatatcactgtcgtacatacaggtacgaaatacgtaaccggtgctgtaacattctgatttaagaagccatagcaatacttctggtctcggattaggcgtcgttacgtatatatccaccaatccgagaccattgattgcataattcgtattcttggacggacgtatccgtttatccacaattaggtattttagcagacgtaagtcgatattatccgaagacatatacgaatacagatcgaaatcatttatattcgacttgagttcgttagaggaattcgaatagctggatatcagtagatgcacaatttgagattttacgtatctatgcttactgtatgctcctagcggagttaatccttcgttgtttctacaaagtctctcgactccgcgagagagtaacagtcgaacaatcttaatgtctgtatcgcatttattgaagacgtaacaatgtagcgcattgtttcctcgtctatctatatgttttgataagttgtgacacgtttcaatttctagttttatttttttgtacgtcacatcttcatccagtagacgacatagaatacatgtgcaatccatagctattctggtgctaattattcctatttcacgaaaaatgatgaaggcaatcattcctcataagatgataaaaagtgtagtgagagagcatgaaggagatttagtatttagcagtgcggatatgatccaagagggtgagatagtcgttctcgttcagaatctttcgcagcataagtagtatgtcgatatacttatcgttgaagactcttccagagacgatagctgattgagtacaaagtccaatgattgcacgaagttcttcggcggttttcatggagtcatttctgatgaaacatttaatgatctccacgcaattgtcgatattgtcccacggaagtgaatccttcaactcaccaccaaagagctccgttgcatcagttctgaaagagatgagaagcctgtagagagaccctgcgctttctctatgggtccatctatgagaaacccacaggatgtattcagtcagacaatgtctgacgtcggccacggtattcagggagtccttagtagcgtggcaatgacagggtctgaactgggcacaaggagaggccattgtaaaggtagacctgtagccgtttatgctaatagagggctttaatttccatttttttaatgggttgtggatgaggaatgagagtgatatcatattgagatacgtagttatgtagaggtgtatttcctatattatttactttcggtttcatattttaccaactctttaataaatttcttttcacgatgcatcttattaaatgacgttttctcataagtggacatatagatgcagaagtaatgaagaaaagtattacctctatcatctacataattagggtctgctcctttttttaacaacttatacagtacgtagtagtagtttatcggttttaaatcaagtctagaatatatagtggattaatatatttttatattagctaaagctatctatactatcagaaagcatatcattctcaacttcatcatgagttaaatatttgtgtaatggatgtcatgaacattaaacgtattcatgacatactcctttaataggttttttaaaacagatgattcaaatccttcattcattagataacagtgtaacggagtcgtaccttctactagtttgtttatatcacagcattctacaaacagtctaaacaatagagaagacggacagactttaacgtataaatgacacatgttatcgatattcgttgatgaattattattaaacgtagttatgataaatgattctaacgacatctctcgctagagataaaatctagtatcgtatcattaaacatctttgcatcatactcgcatagcatagtttttcataattaatacaatatttaaaagacttattcggaaagtattttaatacatgtatcatcgatggagatccatatgaggagtcacttgtagttcttcagtagtaataacagtgctatcatcgatagtataattatatgtagaaggttcatatgttgttgtaattggagtaactgttggtagttcttccgtggaatcaataattatactaacagcaatagtataattatataaatatgttccgttgatatcacatattttaatgaactcatttctaacaccctcagctatatctgtccaattaaatgtagccaacaatctactacgttctctttgattgactacttgtacggtagcgacgctacactatctttattgtcttctacatgctccaattgaatgtcatgatacaacgcagtttttcttatgcatgtttcataacaccacgaacatgtcgcagtaagatatatagccagagataatttctgtaaattcatgattgccggtcataaacaagcccgtcaataattgtggctatatattcagtttatagagcaaaataattaagcacaatagcgcttaatctcaaaatatgttatgtttatttttttcatattaaacatactggttaaaatcctctaaaggctgatcttcatctataaatcaagatcataattacatttagacagtggtttcatgtttataaaaatgttctttttgtgtgaataaggaatatactaatcaataatcaaccatcgaccccattacgatagtatgcaggcaaccccccattagagaggtacgtgtaatcagtctctccagttttagtatttttataagtcattgttacataaacggcttttaaacagtctcctcgataataagccatatctggaaatttattaaatactcgagtcattttacgcacggtcaaaaaagtaagtaatgtcgacgacttcttacattctatagaaacacctagaatactcattttcttttggaaaatatcctcagactctgatttgaacaatgcacgacctatagtaaaccgtgaccaataagttatattagtcaatggtatatccaaaccatcaggtgtggatagtacgccgatagtccagtctttggtatcgatagtgtagttattgaactgagaagttaccgtatagtctttttggtcatctctaaacaaggaaactaatacctctacactattgaacgatttatcttccgtaatgggtggaataacgggaatataaagtggactagcgatggatgaagtcacgaatataagacacgctattaatccgtatatcatcattttgatattacttataataacgatttgtttaatttttagtttatactattaattgtaaatgatattattatttttttaagtattatcagctttagtttatactattactatttgtaatatttagacatagataaacgtgataaaagtctatttgtttatatttattgcggatagcagtatttccctataaaaagtatacgtcctgtgttgtctttaatcatgtacatgaatggatggtttatgtagaccttcgtacgatataccatcgaaaagttagtcataaatactcctgtaacggccgatgcttctgtatactcctcattaacatctataaacgtcgtatgtagaaatttttctacagtgatagtttcattacacatcttgctaaaatctgcataatatccgaatatattagtaagtcctaaattttctaaaatcggtaccagattatacggttctgtcatttccactttaaactttggcatatacaagtctatacttttagtagataacataccacaccattttttaaatttttcatctgttatatttttttctatgttatatataccttctatgtcgtccggtagtataattaccatactagagtttccctcgtatggaatatcgataatagagaatcctccgaataattcattaatatgtacatattgcaagttattctcggtacccaccatcatatcaacactggtaactatattcttagaaatataaaacttgtctgtatatgtaagatgtttagaaaatggatatttccacattgctttaaaatggacggcgctaacaactgtcatacgagtattaatggatagcggactagtcaataaggaattaattttaccatttgtcatcgtcttaacccattcgttgattagttcctttgtttggttagcattattaaagtttacagtttgaaaatcgtcttttattttttgtaggaaggaggcgtggaactcgatactatcgctaccgtatattttatttgcggtagctagtgtcgcacaatacggaatatctacgtccatgtcattattgtcatccttcttatcatcgggtgtattctcattcatattctctatatattttgatagttgttcagctgtagaaccagctgctccatgatttagaatagataaagtagataaaatagaaactggagaaatcaaaacattttcatcagggtgttttaagattagttctttaaagatatccatggtatagaccaaacaataacgataacgatatatatcataaataaataatgttaaatttcagtttatgtttgtaccccgtattcatacttaacaaattggtattgcgtacacaatcaatcatattacataccattaataatgcaagcataaaaaatcgttagtagatgtttctaaatataggttccgtaagcaaagaatataagaatgaagcggtaatgataaaatcaatcgttatctaaaatgatcatactcatttattttattctattatattaacacatacatttttaacagcaacacattcaatattgtattgttatttttatattatttacacaattaacaatatattattagtttatattactgaattaataatataaaattcccaatcttgtcataaacacacactgagaaacagcataaacacaaaatccatcaaaaatgtcgatgaaatatctgatgttgttgttcgctgctatgataatcagatcattcgccgatagtggtaacgctatcgaaacgacattgccagaaattacaaacgctacaacagatattccagctatcagattatgcggtccagagggagatggatattgtttacacggtgactgtatccacgctagagatatcgacggtatgtattgtagatgctctcatggttatacaggcattagatgtcagcatgtagtattagtagactatcaacgttcagaaaaaccaaacactacaacgtcatatatcccatctcccggtattgtgcttgtattagtaggcattattattatgtgttgtctattatctgtttataggttcactcgaagaactaataaactacctctacaagatatggttgtgccataatttttataaatttttttatgagtatttttacaaaaaaaatgtataaagtgtatgtcttatgtatatttataaaaatgctaagtatgcgatgtatctatgttatttgtatttatctaaacaatacctctacctctagatattatacaaaaattttttatttcggcatattaaagtaaaatctagttaccttgaaaatgaatacagtgggtggttccgtatcaccagtaagaacataatagtcgaatacagtatccgattgagattttgcatacaatactagtctagaaagaaatttgtaatcattttctgtgacgggagtccatatatctgtatcatcgtctagtttatcagtgtcccatgctatatttctgttatcatcattagttaatgaaaataactctcgtgcttcagaaaagtcaaatattgtatccatacatacatctccaaaactatcgcttatacgtttatctttaacgatacctatacctagatggttatttactaacagacattttccagatctattgactataactcctatagtttccacatcaaccaagtaatgatcatctattgttatataacaataacataactcttttccatttttatcagtatgtatatctatatcaacgtcgtcgttgtagtgaatagtagtcattgatctattatatgaaacggatatgtctagaacggcaattgtcttacgtccagttaacactttcgttgatttaaagtctagagtctttgcaaacataatatccttatccgactttatatttcctgtagggtggtataattttattttgcctccacatatcggtgtttccaaatatattactagacaatattccatatagttattagttaagggtacccaattagaacacgtacgcttattatcatcatttggatcgtatttcataaaagttattgtactatcgatgtcaacacattctacattttttaatcgtctatatagtatttttctgatattttctataatatcagaattgtcttccatcggaagttgtatactatcggaatcagttacatgtttaaataattctctgatgtcattccttatacaatcaaattcattattaaacagtttaatagtctgtagacctttatcgtcgtaaatatccattgtcttattagttacgcttatttttatgtgttttacgttgctttattatattttataagaatgattgtttgacgaatcacgagaactattaagacacattattaggtatatattataaaaaagtttttgattacgatgttataagaggaaagaggacacattaacatcatacatcaattaactacattcttataacatcgtaatcaaaagaattgcaattttgatgtataacaactgtcaatgggttatggaattgtatattacatattatacggtatgttggtaacgacaaataccgatcggtaatcgtttgccggtgtaatagaattatatatatctatctattacaccggctgagtatacataataataagttgtggtagtatgatctccatatttataatttaggactttgtattcagtatttttggaatcataaaaaataaaaaaaagttttactaatttaaaatttaaaaagtatttacatttttttcactgtttagtcgcggatatggaattcgatcctgccaaaatcaatacatcatctatagatcatgtaacaatattacaatacatagatgaaccaaatgatataagactaacagtatgcattatccgaaatattaataacattacatattatatcaatatcacaaaaataaatacacatttggctaatcaatttcgggcttggaaaaaacgtatcgccggaagggactatatgactaacttatctagagatacaggaatacaacaatcaaaacttactgaaactatacgtaactgtcaaaaaaatagaaacatatatggtctatatatacactacaatttagttattaatgtggttattgattggataaccgatgtgattgttcaatcaatattaagagggttggtaaattggtacatagctaataatacctatactccaaatacacccaataatacaacaaccatttctgagttggatatcatcaaaatactaaataaatacgaggacgtgtatagagtaagtaaagaaaaagaatgtggaatttgctatgaagttgtttactcaaaacgattagaaaacgatagatactttggtttattggattcgtgtactcatatattttgcataacatgcatcaatatatggcataaaacacgaagagaaaccggtgcgtcggataattgtcctatatgtcgtacccgttttagaaacataacaatgagcaagttctataagctagttaactaataaataaaaagtttaatttgttgacgacgtatgtcgttattttttctcgtataaaagattaatttgattctaatataatctttagtattggataaatatcaattcaaattaattccattagattatatcataaataaaaatagtagcacgcactacttcagccaaatattcttttttgaaacgccatctatcgtagtgaggacacaagtgaacctataatgagcaaatttattagtatcggttacatgaaggactttacgtagagtggtgattccactatctgtggtacgaacggtttcatcttctttgatgccatcacccagatgttctataaacttggtatcctcgtccgatttcatatcctttgccaaccaatacatatagctaaactcaggcatatgttccacacatcctgaacaatgaaattctccagaagatgttacaatgtctagatttggacatttggtttcaaccgcgttaacatatgagtgaacacacccatacatgaaagcgatgagaaataggattttcatcttgccaaaatatcactagaaaaaatttatttatcaattttaaaggtataaaaaatacttattgttgctcgaatattttgtatttgatggtatacggaagattagaaatgtaggtattatcatcaactgattctatggttttatgtattctatcatgtttcactattgcgttggaaataatatcatatgcttccacatatattttattttgttttaactcataatactcacgtaattctggattattggcatatctgtgaataattttagctccatgatcagtaaatattaatgagaacatagtattaccacctaccattatttttttcatttcgttcaattcttgattgcaaagatctatataatcattatagcgttgacttatggactctggaatcttagacgatgtacagtcatctataatcatggcatatttaatacattgttttatagcatagtagttatctacgatgttagatatttctctcaatgaatcaatcacacaatctaatgtaggtttatgacataatagcattttcagcagttcaatgtttctagattcgttgatggcaatggctatacatgtatatccgttatttgatctaatgttgacatctgaaccggattctagcagtaaagatactagagattgtttattatatctaacagccttgtgaagaagtgtttctcctcgtttgtcaatcatgttaatgtctttaagataaggtaggcaaatgtttatagtactaagaattgggcaagcataagacatgtcacaaagaccctttttgtatgtataagtgtagaaattataacatccatagttggatttacataggtgtccaatcgggatctctccatcatcgagatgattgacggcatctcccccttccttttttagtagatatttcatcgtgtaagaatcaatattaatatttctaaagtatccgtgtatagcctctttatttaccacagctccatattccaacatgcattccactaaagggatatcgatatcgccgaatgtcatatactcaattagtatatgttggaggacatccgagttcattgttttcaatatcaaagagatggtttccttatcatttctccatagtggtacaatactacacattattccgtgaggctttccattctccaaaaacaatttgaccaaatctacatctttattgtatctataatcactatttagataatcagccataattcctcgagtgcaacatgttagatcgtctatatatgaataagccgtgttatctattcctttcattaacaatttaacgatgtctatatctatatgagatgacttaatataatattgaagagctgtacaatagtttttatctatagaagacggcttgattccgtgattaattagacatttaacaacttccggacgcacatatgctctcgtatccgactctgaatacagatgagagatgatatacagatgcaatacggtaccgcaatttcgtagttgataatcatcatacgcgtatccgtactcgtcctcataaagaacactgcagccattttctatgaacaaatcaataattttaggaacaggatcattgtcattacataattttctataactgaacgatggttttcacatttaacactcaagtcaaatccatgttctaccaacacctttatcaagtcaacgtctacatttttggatttcatatagctgaatatattaaagtcatttatgttgctaaatccagtggcttctagtagagccatcgctatatcctttaactttaacatgtctactatttgtgtattcttctaatggggtagctgtctccaatttttgcgtaatggattagtgccactgtctagtagtagtttgacgacctcgacattattacaatgctcattaaaaaggtatgcgtgtaaagcattattcttgaattggttcctggtatcattaggatctctgtctctcaacatctgtttaagttcatcgagagccacctcctcattttccaaatagtcaaacattttgactgaatagaagtgaatgagctactgtgaactctatacacccacacaactaatgtcattaaatattatttttttgaatgtatttataccatgtcaaaaacttgtacaattattaataaaaataatttagtgtttaaattttaccagttccagattttacacctccgttaaccccactttttacaccactggacgaccctcctccccacattccaccgccaccagatgtataagttttagatcctttattactaccatcatgtccatggataaagacactccacatgccgccactaccccctttagaagacatattaataagacttaagagttaaggacaagtttaacaataaaattaatcacgagtaccctactaccaacctacactattatatgattatagtttctatttttacagtaccttaactaaagtttctagtcacaagagcaatactaccaacctacactattatatgattatagtttctatttttataggaacgcgtacgagaaaatcaaatgtctaatttctaacggtagtgttgataaacgattatcgtcaatggatacctcctctatcatgtcgtctattttcttactttgttctattaacttattagcattatatattatttgattataaaacttatattgcttattagcccaatctgtaaatatcggattattaacatatcgtttctttgtaggtttatttaacttgtacatcactgtaagcatgtccgtaccatttattttaatttgacgcatatccgcaatttctttttcgcagtcggttataaattctatatatgatggatacatgctacatgtgtacttataatcgactaatatgaagtacttgatacatattttcagtaacgatttattattaccacctatgaataagtacctgtgatcgtctaggtaatcaactgttttcttaatacattcgatggttggtaatttactcagaataatttccaatatcttaatatataattctgctatttctggaatatatttatctgccagtataacacaaatagtaatacatgtaaacccatattttgttattatattaatgtctgcgccattatctattaaccattctactaggctgacactatgcgacttaatacaatgataaagtatactacatccatgtttatctattttgtttatatcatcaatatacggcttacaaagttttagtatcgataacacatccaactcacgcatagagaaggtagggaataatggcataatatttattaggttatcatcattgtcattatctacaactaagtttccattttttaaaatatactcgacaactttaggatctctattgccaaatttttgaaaatatttatttatatgcttaaatctatataatgtagctccttcatcaatcatacatttaataacattgatgtatactgtatgataagatacatattctaacaatagatcttgtatagaatctgtatatcttttaagaattgtggatattaggatattattacgtaaactattacacaattctaaaatataaaacgtatcacggtcgaataatagttgatcaactatataattatcgattttgtgatttttcttcctaaactgtttacgtaaatagttagatagaatattcattagttcatgaccactatagttactatcgaataacgcgtcaaatatttcccgtttaatatcgcatttgtcaagataataatagagtgtggtatgttcacgataagtataataacgcatctctttttcgtgtgaaattaaatagtttatcacgtccaaagatgtagcataaccatcttgtgacctagtaataatataataatagagaactgttttacccattctatcatcataatcagtggtgtagtcgtaatcgtaatcgtctaattcatcatcccaattataatattcaccagcacgtctaatctgttctattttgatcttgtatccatactgtatgttgctacatgtaggtattcctttatccaataatagtttaaacacatctacattgggatttgatgttgtagcgtatttctctacaatattaataccatttttgatactatttatttctatacctttcgaaattagtaatttcaataagtctatatcgatgttatcagaacatagatattcgaatatatcaaaatcattgatatttttatagtcgactgacgacaataacaaaatcacaacatcgtttttgatattattatttttcttggtaacgtatgcctttaatggagtttcaccatcatactcatataatggatttgcaccactttctatcaatgattgtgcactgctggcatcgatgttaaatgttttacaactatcatagagtatcttatcgttaaccatgattggttgttgatgctatcgcattttttggtttctttcatttcagttatgtatggatttagcacgtttgggaagcataagctcatatgatttcagtactgtagtgtcagtactattagtttcgatcagatcaatgtctagatctatagaatcaaaacacgataggtcagaagataatgaatatctgtaggcttcttgttgtactgtaacttctcgttttgttagatggttgcatcgtgctttaacatcaatggtacaaattttatcctcgctttgtgtatcatattcgtccctactataaaattgtatattcagattatcatgagatgtgtatacgctaacggtatcaataaacggagcacaccatttagtcataaccgtaatccaaaaatttttaaagtatatcttaacgaaagaagttgtgtcattgtctacggtgtatggtactagatcctcataagtgtatatatctagagtaatgtttaatttatcaaatggttgataatatggatcctcatggcaatttcctaagacgaaaataagacataaacacgcaataaatctaattgcggacatggttactccttaaaaaaatactaataatcaccttggctatttagtaagtgtcatttaacactatactcatattaatccatggactcataatctctatacgggattaacggatgttctatatacggggatgagtagttctcttctttaactttatactttttactaatcatatttagactgatgtatgggtaatagtgtttgaagagctcgttctcatcatcagaataaatcaatatctctgtttttttgttatacagatgtattacagcctcatatattacgtaatagaacgtgtcatctaccttattaactttcaccgcatagttgtttgcaaatacggttaatcctttgacctcgtcgatttccgaccaatctgggcgtataatgaatctaaactttaatttcttgtaatcattcgaaataatttttagtttgcatccgtagttatcccctttatgtaactgtaaatttctcaacgcgatatctccattaataatgatgtcgaattcgtgctgtatacccatactgaatggatgaacgaataccgacggcgttaatagtaatttactttttcatctttacatattgggtactagttttactatcataagtttataaattccacaagctactatggaataagccaaccatcttagtataacacacatgtcttaaagtttattaattaattacatgttgttttatatatcgctacgaatttaaacagagaaatcagtttaggaaaaaaaattatctatctacatcatcacgtctctgtattctacgatagagtgctactttaagatgagacatatccgtgtcatcaaaaatatactccattaaaatgattattccggcagcgaacttgatattggatatatcacaacctttgttaatatctacgacaatagacagcagtcccatggttccataaacagtgagtttatctttctttgaagagatattttgtagagatcttataaaactgtcgaatgacatcgcatttatatctttagctaaatcgtatatgttaccatcgtaatatctaaccgcgtctatcttaaacgtttccatcgctttaaagacgtttccgatagatggtctcatttcatcagtcatactgagccaacaaatataatcgtgtataacatctttgatagaatcagactctaaagaaaacgaatcggctttattatacgcattcatgataaacttaatgaaaaatgtttttcgttgtttaagttggatgaatagtatgtcttaataattgttattatttcattaattaatatttagtaacgagtacactctataaaaacgagaatgacataactaatcataactagttatcaaagtgtctaggacgcgtaattttcatatggtatagatcctgtaagcattgtctgtattctggagctattttctctatcgcattagtgagttcagaatatgttataaatttaaatcgaataacgaacataactttagtaaagtcgtctatattaactcttttattttctagccatcgtaataccatgtttaagatagtatattctctagttactacgatctcatcgttgtctagaatatcacatactgaatctacatccaattttagaaattggtctgtgttacatatctcttctatattattgttgatgtattgtcgtagaaaactattacgtagaccattttctttataaaacgaatatatagtactccaattatctttaccgatatatttgcacacataatccattctctcaatcactacatctttaagattttcgttgttaagatatttggctaaactatataattctattagatcatcaacagaatcagtatatatttttctagatccaaagacgaactctttggcgtcctctataatattcccagaaaagatattttcgtgttttagtttatcgagatctgatctgttcatatacgccatgattgtacggtacgttatgataaccgcataaaataaaaatccattttcatttttaaccaatactattcataattgagattgatgtaatactttgttactttgaacgtaaagacagtacacggatccgtatctccaacaagcacgtagtaatcaaatttggtgttgttaaacttcgcaatatttatcaatttagatagaaacttatactcatcatctgttttaggaatccatgtattattaccactttccaacttatcattatcccaggctatgtttcgtccatcatcgttgcgcagagtgaataattcttttgtattcggtagttcaaatatataatccatgcatagatcggtaaagctattgtagatgtgatttttcctaaatctaatataaaactcgtttactagcaaacactttcctgatttatcgaccaagacacatatggtttctaaatctatcaagtggtggggatccatagttatgacgcagtaacatagattattaccttcttaactgtcgctaatatctatatatttattgttatcgtattggattctgcatatagatggcttgtatgtcaaagatatagaacacataaccaatttatagtcgcgctttacattctcgaatctaaagttaagagatttagaaaacattatatcctcggatgatgttatcactgtttctggagtaggatatattaaagtctttacagatttcgtccgattcaaataaatcactaaataatatcccacattatcatctgttagagtagtatcattaaatctattatattttatgaaagatatatcactgctcacctctatatttcgtacatttttaaactgtttgtataatatctctctgatacaatcagatatatctattgtgtcggtagacgataccgttacatttgaattaatggtgttccattttacaacttttaacaagttgaccaattcatttctaatagtatcaaacgctccatgattaaatattttaatagtatccattttatatcactacggacacaaagtagctgacataaaccattgtataatttttatgttttatgtttattagcgtacacattttggaagttccggcttccatgtatttcctggagagcaagtagatgatgaggaaccagataggttatatccgtacttgcacttaaagtttacattgtcgttgtatgagtatgatcttttaaacccgctagacaagtatccgtttgatattgtaggatgtggacatttaacaatctgacacgtgggtggatcggaccattctcctcctgaacacaggacaccagagttaccaatcaacgaatatccactattgcaactataagttacaacgcttccatcggtataaaaatcctcgtatccgttatgtcttccgttggatatagatggaggggattggcatttaacagattcacaaataggtgcctcgggattccataccatagatccagtagatcctaattcacaatacgatttagattcaccgatcaaatgatatccgctattacaagagtacgttatactagagccaaagtctactccgccaatatcaagttggccattatcgatatctcgaggcgatgggcatctccgtttaatacattgattaaagagtgtccatccagtacctgtacatttagcatatataggtcccattttttgctttctgtatccaggtagacatagatattctatagtgtctcctatgttgtaattagcattagcatcagtctccacactattcttaaatttcatattaatgggtcgtgacggaatagtacagcatgatagaacgcatcctattcccaacaatgtcaggaacgtcacgctctccaccttcatatttatttatccgtaaaaatgttatcctggacatcgtacaaataataaaaagcccatatatgttcgctattgtagaaattgtttttcacagttgctcaaaaacgatggcagtgacttatgagttacgttacactttggagtctcatctttagtaaacatatcataatattcgatattacgagttgacatatcgaacaaattccaagtatttgattttggataatattcgtattttgcatctgctataattaagatataatcaccgcaagaacacacgaacatctttcctacatggttaaagtacatgtacaattctatccatttgtcttccttaactatatatttgtatagataattacgagtctcgtgagtaattccagtaattacatagatgtcgccgtcgtactctacagcataaactatactatgatgtctaggcatgggagacttttttatccaacgatttttagtgaaacattccacatcgtttaatactacatatttttcatacgtggtataaactccacccattacatatatatcatcgtttacgaataccgacgcgcctgaatatctaggagtaattaagtttggaagtcttatccatttcgaagtgccgtgtttcaaatattctgccacacccgttgaaatagaaaattctaatcctcctattacatataactttccattgttaacacaagtactaacttctgattttaacgacgacatattagtaaccgttttccattttttcgtttcaagatctacccgcgatacggaataaacatgtctattgttaatcatgccgccaataatgtatagacaattatgtaaaacatttgcattatagaattgtctatctgtattaccgactatcgtccaatattctgttctaggagagtaatgggttattgtggatatataatcagagtttttaatgactactatattatgttttataccatttcgtgtcactggctttgtagatttggatatagttaatcccaacaatgatatagcattgcgcatagtattagtcataaacttgggatgtaaaatgttgatgatatctacatcgtttggatttttatgtatccactttaataatatcatagctgtaacatcctcatgatttacgttaacgtcttcgtgggataagatagttgtcagttcatcctttgataattttccaaattctggatcggatgtcaccgcagtaatattgttgattatttctgacatcgacgcattatatagttttttaattccatatcttttagaaaagttaaacatccttatacaatttgtggaattaatattatgaatcatagtttttacacatagatctactacaggcggaacatcaattattatggcagcaactagtatcatttctacattgtttatggtgatgtttatcttcttccagcgcatatagtctaatagcgattcaaacgcgtgatagtttataccattcaatataatcgcttcatcctttagatggtgatcctgaatgcgtttaaaaaaattatacggagatgccgtaataatttccttattcacttgtataatttccccattgatagaaaatatcacgctttccattcttgaagtactataagtaattatagtataatgtaaaggtttatatattcaatattttttataaaaaaatcatttcgacattaattcctttttaaatttccgtctatcatctatagaaacatattctatgaatttataaaatgcttttacgtgtcctatcgtaggcgatagaaccgctaaaaagcctattgaatttctacaaaagaatctattatatggtatagggagagtataaaacattaaatgcccgtacttattaaagtattcagtagccaatcctaactctttcgaatacttattaatggctcttgttctgtacgaatctatttttttgaacaacggacctagtggtatatcttgttctatgtatctaaaataatgtctgactagatccgttagtttaatatcctcagtcatcttgtctagaatggcaaatctaactgcgggtttaggctttagtttagtttttatatctacatctatgtctttatctaacaccaaaaatataatagctaatattttattacaatcatccggatattcttctacgatctcactaactaatgtttctttggttatactagtatagtcactatcggacaaataaagaaaatcagatgatcgatgaataatacatttaaattcatcatctgtaagatttttgagatgtctcattaaaatattattagggtcagtactcattatcattaggcagctattacttattttattatttttcaccatatagatcaatcattagatcatcaaaatatgtttcaatcatcctaaagagtatggtgaatgactcttcccatctaatttctgaacgttcaccaatgtctctagccactttggcactaatagcgatcattcgcttagcgtcttctatattattaactggttgattcaatctatctagcaatggaccgtcggacagcgtcattctcatgttcttaatcaatgtacatacatcgccgtcatctaccaattcatccaacaacataagctttttaaaatcatcattataataggtttgatcgttgtcatttctccaaagaatatatctaataagtagagtcctcatgcttagtaatttaactattttagttaacaactattttttatgttaaatcaattagtacaccgctatgtttaatacttattcatattttagtttttaggattgagaatcaatacaaaaattaatgcatcattaattttagaaatacttagtttccacgtagttaatgaaacatttgaactcatcgtacaagacgttctcgtacaggacgtaactataaaccggtttatatttgttcaagatagatacaaatccgataactttttttacgaattctacgggatccactttaaaagtgtcataccgggttctttttatttttttaaacagatcaatggtgtgatgttgattaggtcttttacgaatttgatatagaatagcgtttacatattctccataatggtcaatcgccatttgttcgtatgtcataaattctttaattatatgacactgtgtattgtttagttcatccttgttcattgttaggaatctatccaaaatggcaattatactagaactataggtgcgttgtatacacatattgatgtgtctgtttatacaatccatgatatttggatccatgctactaccttcgggtaaaattgtagcatcatataccatttctagtactttaggttcattattatccattgcagaggacgtcatgatcgcatcctaaaaaaatatattatttttatgttattttgttaaaaataatcatcgaatacttcgtaagatactccttcatgaacataatcagttacaaaacgtttatatgaagtaaagtatctacgatttttacaaaagtccggatgcataagtacaaagtacgcgataaacggaataataatagatttatctagtctatctttttctatagctttcatagttagatacatggtctcagaagtaggattatgtaacatcagcttcgataaaatgactgggttatttagtcttacacattcgctcatacatgtatgaccgttaactacagagtctacactaaaatgattgaacaatagatagtctaccattgtttcgtattcagatagtacagcgtagtacatggcatcttcacaaattatatcattgtctaatagatatttgacgcatcttatggatcccacttcaacagccatcttaaaatcggtaaaatcatattgctttcctttatcattaataatttctaaaacatcatctctatcataaaagatacaaatattaactgtttgatccgtaataacattgctagtcgatagcaatttgttaataagatgcgctgggctcaatgtcttaataagaagtgtaagaggactatctccgaatttgttttgtttattaacatccgttgatggaagtaaaagatctataatgtctacattcttgactgttttagagcatacaatatggagaggtgtatttccatcatgatctggttttgagggactaattcctagtttcatcatccatgagattgtagaagcttttggattgtctgacataagatgtctatgaatatgatttttgccaaatttatccactatcctggcttcgaatccgatggacattatttttttaaacactctttctgaaggatctgtacacgccaacaacggaccacatccttcttcatcaaccgagttgttaatcttggctccatactgtaccaataaatttattctctctatgacttcatcatctgttcccgagagataatatagaggcgttttatgctgtttatcacacgcgtttggatctgcgccgtgcgtcagcagcatcgcgactattctattattattaattttagaagctatatgcaatggataatttccatcatcatccgtctcatttggagagtatcctctatgaagaagttcttcgacaaatcgttcatctagtcctttaattccacaatacgcatgtagaatgtgataattatttccagaaggttcgatagcttgtagcatattcctaaatacatctaaatttttactattatatttggcataaagagatagataatactcggccgacataatgttgtccattgtagtataaaaattaatatttctatttctatttctgtatatttgcaacaatttactctctataacaaatatcataacttagttcttttatgtcaagaaggcactggtttagttcatctataaatgtcacgccataactaccacgcatgctatactcagaattatgataaagatatttatccttggggtgtaggtaatggggattaatctttgttggatcagtctctaagttaacacatgtcacacatgatccatttatagttatatcacacgatgatgatttatgaattgattccggaagatcgctatcgtattttgtggttccacaattcatttccatacatgttattgtcacactaatattatgatgaactttatctagccgctgagtggtaaacaacagaacagatagtttattatctttaccaacaccctcagccgctgccacaaatctctgatccgtatccatgatggtcatgtttatttctagtccgtatccagtcaacactatgttagcatttctgtcgatatagctttcactcatatgacactcaccaataatagtagaattaatgtcgtaatttacaccaatagtgagttcggcggcaaagtaccaataccggtaatcttgtcgaggaggacatatagtattcttgtattctaccgaatacccgagagatgcgatacaaaagagcaagactaatttgtaaaccatcttactcaaaatatgtaacaatagtacgatgcaatgagtaagacaataggaaatctatcttatatacacataattattctatcaattttaccaattagttagtgtaatgttaacaaaaatgtgggagaatctaattagtttttctttacacaattgacgtacatgagtctgagttccttgtttttgctaattatttcatccaatttattattcttgactatatcgagatcttttgtataggagtcagacttgtattcaacatgcttttctataatcattttagctatttcggcatcatccaatagtacattttccagattagcagaatagatattaatgtcgtatttgaacagagcctgtaacatctcaatgtctttattatctatagccaatttaatgtccggaatgaagagaagggaattattggtgtttgtcgacgtcatatagtcgagcaagagaatcatcatatccacgtgtccattttttatagtggtgtgaatacaactaaggagaatagccagatcaaaagtagatggtatttctgaaagaaagtatgatacaatacttacatcattaagcatgacggcatgataaaatgaagttttccatccagttttcccatagaacatcagtctccaatttttcttaacaaacagttttaccgtttgcatgttaccactatcaaccgcataatacaatgcagtgtttcccttgtcatcaaattgtgaatcatccagtccactgaatagcaaaatctttactattttggtatcttccaatgtggctgcctgatgtaatggaaattcattctctagaagatttttcaatgctccagcgttcaacaacgtacatactagacgcacgttattatcagctattgcataatacaaggcactatgtccatggacatccgccttaaatgtatctttactagagagaaagcttttcagctgcttagacttccaagtattaattcgtgacagatccatgtctgaaacgagacgctaattagtgtatattttttcattttttataattttgtcatattgcaccagaattaataatatctctaatagatctgattagtagatacatggctatcgcaaaacaacatatacacatttaataaaaataatatttattaagaaaattcagatttcacgtacccatcaatataaataaaataatgattccttacaccgtacccatattaaggagattccaccttacccataaacaatataaatccagtaatatcatgtctaatgatgaacacaaatggtgtattaaattccagtttttcaggagatgatctcgccgtagctaccataatagtagatgcctctgctacagttccttgttcgtcgacatctatctttgcattctgaaacattttataaatatataatgggtccctagtcatatgtttaaacgacgcattatctggattaaacatactaggagccatcatttcggctatcgacttaatatccctcttattttcgatagaaaatttagggagtttaagattgtacactttattccctaattgaaacgaccaatagtctaattttgcagccgtaatagaatctgtgaaatgggtcatattatcacctattgccaggtacatactaatattagcatccttatacggaaggcgtaccatgtcatattctttgtcatcgattgtgattgtatttccttgcaatttagtaactacgttcatcatgggaaccgttttcgtaccgtacttattagtaaaactagcattgcgtgttttagtgatatcaaacggatattgccatgtacctttaaaatatatagtattaatgattgcccatagagtattattgtcgagcatattagaatctactacattagacataccggatctacgttctactatagaattaattttattaaccgcatctcgtctaaagtttaatctatataggccgaatctatgatattgttgataatacgacggtttaatacacacagtattatctacgaaactttgataagttagatcagtgtacgtatatttagatgttttcagcttagctaatcctgatattaattctgtaaatgctggacccagatctctttttctcaaatccatagtcttcaataattctattctagtattacctgatgcaggcaatagcgacataaacatagaaaacgaatagccaaacggcgagaagacaatattatcatcttgaatatttttatacgctactataccggcattggtaaatccttgcagacgataggtagacgctgaacacgttaacgatagtatcaataacgcaatcatgattttatggtattaataattaaccttatttttatgttcggtataaaaaaattattgatgtctacacatccttttgtaattgacatctatatatccttttgtataatcaactctaatcactttaacttttacagttttccctaccagtttatccctatattcaacatatctatccatatgcatcttaacactctctgccaagatagcttcagagtgaggatagtcaaaaagataaatatatagagcataatccttctcgtatactctgccctttattacatcgcccgcattgggcaacgaataacaaaatgcaagcatcttgttaacgggctcgtaaattgggataaaaattatgtttttatatctattttattcaagagaatattcaggaatttctttttccggttgtatctcgtcgcagtatatatcatttgtacattgtttcatattttttaatagtttacaccttttagtaggactagtatcgtacaattcatagctgtattttgaattccaatcacgcataaaaatatcttccaattgttgacgaagacctaatccatcatccggtgtaatattaatagatgctccacatgtatccgtaaagtaatttcctgtccaatttgaggtacctatataggccgttttatcggttaccatatatttggcatggtttaccctagaatacggaatgggaggatcagcatctggtacaataaatagctttacttctatatctatgtttttagattttagcatagcgatagatcttaaaaagtttctcatgataaacgaagatcgttgccagcaactaatcaatagcttaacggatacttgtctgtctatagcggatcttcttaattcatcttctatataaggccaaaacaaaattttacccgccttcgaataaataatagggataaagttcataacagatacataaacgaatttactcgcatttctaatacatgacaataaagcggttaaatcattggttctttccatagtacatagttgttgcggcgcagaagcaataaatacagagtgtggaacaccacttacgttaatactaagaggatgatctgtattataatacgacggataaaagtttttccaattatatggtagattgttaactccaagataccagtatacctcaaaaatttgagtgagatccgctgccaagttcctattattgaagatcgcaatacccaattctttgacctgagttagtgatctccaatccatgttagcgcttcctaaataaatatgtgtattatcagatatccaaaattttgtatgaagaactcctcctaggatatttgtaatatctatgtatcgtacttcaactccggccatttgtagtctttcaacatcctttaatggtttgttagatttattgacggctactctaactcttactcctcttttgggtaattgtacaatctcgtttaatattatcgtgccgaaattcgtacccacttcatccgataaactccaataaaaagatgatatatctagtgtttttgtggtattggatagaatttccctccacatgttaaatgtagacaaatatactttatcaaattgcatacctataggaatagtctctgtaatcactgcgattgtattatccggattcattttatttgttaaaaaataatcctatatcacttcactctattaaaaatccaagtttctatttctttcatgactgattttttaacttcatccgtttccttatgaagatgatgtttggcaccttcataaatttttatttctctattacaatttgcatgttgcatgaaataatatgcacctaaaacatcgctaatctcattgtttgttccctggagtatgagagtcgggggggtgttaatcttggaaattatttttctaaccttgttggtagccttcaagacctgactagcaaatccagccttaattttttcatgattgattaatgggtcgtattggtatttataaactttatccatatctctagatactgattctggacatagctttccgactggcgcatttggtgtgatggttcccataagtttggcagctagcagattcagttttgaaacagcatctgcattaactagaggagacattagaatcattgctgtaaacaagtttggattatcgtaagaggctagtatagaaattgttgctcccatggaatgacccaataagtagatttaatagttaccacgtgctgtaccaaagtcatcaatcatcattttttcaccattacttcttccatgtccaatatgatcatgtgagaatactaaaattcctaacgatgatatgttttcagctagttcgtcataacgtccagaatgtttaccagctccatgacttatgaatactaatgccttaggatatgtaataggtttccaatatttacaatatatgtaatcattgtccagattgaacatacagtttgcactcatgattcacgttatataactatcaatattaacagttcgtttgatgatcatattatttttatgttttattgataattgtaaaaacatacaattaaatcaatatagaggaaggagacggatactgtcttttgtgagatagtcatggcgactaaatcagattatgaggatgctgttttttactttgtggatgatgataaaatatgtagtcgcgactccatcatcgatctaatagatgaatatatcacgtggagaaatcatgttatagtgtttaacaaagatattaccagttgtggaagactgtacaaggaattgatgaagttcgatgatgccgctatacagtactatggtattgataaaattaatgagattgtcgaagctatgagcgaaggagaccactacatcaattttacaaaagtccatgatcaggaaagtttattcgctaccataggaatatgtgctaaaatcactgaacattggggatacaaaaagatttcagaatctagattccaatcattgggaaacattacagatctgatgaccgacgataatataaacatcttgatactttttctagaaaaaaaattgaattgatgatataggggtcttcataacgcataattattacgttagcattctatatccgtgttaaaaaaaattatcctatcatgtatttgagagttttatatgtagcaaacatgatagctgtgatgccaataagctttagatattcacgcgtgctagtgttagggatggtattatctggtggtgaaatgtccgttatataatctacaaaacaatcatcgcatatagtatgcgatagtagagtaaacatttttatcgtttctactgggttcatacatcgtctacccaattcggttatgaatgaaattgtcgccaatcttacacccaaacccttgttatccattagcatagtattaacttcgttatttatgtcataaactgtaaatgattctgtagatgccatatcatacatgatattcatgtccctattataatcattactaactttatcacaatatatgttgataatatctatatatgatctagtctttgtgggcaactgtctatacaagtcgtctaaacgttgtttactcatatagtatcgaacagccatcattacatggtcccgttccgttgatagataatcgagtatgttagtggacttgtcaaatctatataccatattttctggaagtggatatacatagtcgtgatcaacattattgctagcctcatcttctatatcctgtactataccattatctatatcatctacataatctacgatattattatacataaacatcgacaacatactattgtcaattatctaagtcctgttgatccaaacccttgatctcctctatctgtactatctagagattgtacttcttccagttctggataatatatacgttgatagattagctgggctattctatcccccgtatttacattaaacgtacattttccattattaataagaataactcctatgtttcccctataatcttcgtctattacaccgcctcctatatcaatgccttttagggacagaccagacctaggagctattctaccatagcagaacttaggcatggacatactaatatctgtcttaattaactgtcgttctccaggagggatagtataatcgtaagcgctatataaatcatatccggcggcgtaaggtgattgcctagtaggagatttagctctgttagtttccttaacaaatctaactggtgagttaatattcatgttgaacataaaactaatattttatttcaaaattatttaccatcccatatattccatgaataagtgtgatgattgtacacttctatagtatctatatacgattcacgataaaatcctcctatcaatagcagtttattatccactatgatcaattctggattatccctcggataaataggatcatctatcagagtccatgtattgctggattcacaataaaattccgcatttctaccaaccaagaataaccttctaccgaacactaacgcgcatgatttataatgaggataataagtggatggtccaaactgccactgatcatgattgggtagcaaatattctgtagttgtatcagtttcagaatgtcctcccattacgtatataacattgtttatagatgccactgctggattacatctaggtttcagaagactcggcatattaacccaagcagcatccccgtggaaccaacgctcaacagatgtgggatttggtagacctcctactacgtataatttattgttagcgggtatcccgctagcatacagtctggggctattcatcggaggaattggaatccaattgtttgatatataatttacagctatagcattgttatgtatttcattgttcatccatccaccgatgagatatactacttctccaacatgagtacttgtacacatatggaatatatctataatttgatccatgttcataggatactctatgaatggatacttgtatgatttgcgtggttgtttatcacaatgaaatattttggtacagtctagtatccattttacattatttatacctctgggagaaagataatttgacctgattacatttttgataaggagtagcagatttcctaatttatttcttcgctttatataccacttaatgacaaaatcaactacataatcctcatctggaacatttagttcatcgctttctagaataagtttcatagatagataatcaaaattgtctatgatgtcatcttccagttccaaaaagtgtttggcaataaagtttttagtatgacataagagattggatagtccgtattctatacccatcatgtaacactcgacacaatattcctttctaaaatctcgtaagataaagtttatacaagtgtagatgataaattctacagaggttaatatagaagcacgtaataaattgacgacgttatgactatctatatatacctttccagtatatgagtaaataactatagaagttaaactgtgaatgtcaaggtctagacaaacccttgtaactggatctttatttttcgtgtatttttgacgtaaatgtgtgcgaaagtaaggagataactttttcaatatcgtagaattgactattatattgccacctatagcatcaataattgttttgaatttcttagtcatagacaatgctaatatattcttacagtacacagtattaacaaatatcggcatttatgtttctttaaaagtcaacatctagagaaaaatgattatctttttgagacataactcccattttttggtattcacccacacgtttttcgaaaaaattagtttttccttccaatgatatattttccatgaaatcaaacggattggtaacattataaatttttttaaatcccaattcagaaatcaatctatccgcgacgaattctatatatgttttcatcatttcacaattcattcctataagtttaactggaagagccgcagtaagaaattcttgttcaatggatactgcatctgttataatagatctaacggtttcttcactcggtggatacaataaatgtttaaacatcaaacatgcgaagtcgcagtgtagaccctcgtctctactaattagttcgttggaaaacgtgagtccgggcattaggccacgctttttaagccaaaatatggaagcgaatgatccggaaaagaagattccttctactgcagcaaaggcaataagtctctctccataaccggcgctgtcatgtatccacttttgagcccaatcggccttcttttttacacaaggcattgtttctatggcattaaagagatagtttttttcattactatctttaacataagtatcgatcaaaagactatacatttccgaatgaatgttttcaatggccatctgaaatccgtagaaacatctagcctcggtaatctgtacttctgtacaaaatcgttccgccaaattttcattcactattccgtcactggctgcaaaaaacgccaatacatgttttataaaatatttttcgtctggtgttagtttattccaatcattgatatctttagatatatctacttcttccactgtccaaaatgatgcctctgcctttttatacatgttccagatgtcatgatattggattgggaaaataacaaatctatttggatttggtgcaaggatgggttccataactaaattaacaatatcaataaattttttttcagttatctatatgcctgtacttggattttttgtacatcgatatcgccgcaatcactacaataattacaagtattattgatagcattgttattagtactatcataattaaattatcgacattcatgggtgctgaataatcgttattatcatcattatcattttgtaattgtgacatcatactaaataaatcgtttgcgagattgttgtgggaagcgggcatggaggatgcattatcattattatttaacgccttccatttggattcacaaatatggcgcgcgttcaacattttatggaaactataattttgtgaaaacagataacaagaaaactcgtcatcgttcaaatttttaacgatagtaaaccgattaaacgtcgagctaatttctaacgctagcgactctgttggatatgggtttccagatatatatcttttcagttcccctacgtatctataatcatctgtaggaaatggaagatatttccatttatctactgttcctaatatcatatgtggtggtgtagtagaaccattaagcgcgaaagatgttatttcgcatcgtattttaacttcgcaataatttctggttagataacgcactctaccagtcaagtcaatgatattagcctttacagatatattcatagtagtcgtaacgatgactccatcttttagatgcgatactcctttgtatgtaccagaatcttcgtacctcaaactcgatatatttaaacaagttaatgagatattaacgcgttttatgaatgatgatatataaccagaagttttatcctcggtggctagcgctataaccttatcattataataccaactagtgtgattaatatgtgacacgtcagtgtgggtacaaatatgtacattatcgtctacgtcgtattcgatacatccgcatacagccaacaaatataaaatgacaaatactctaacgccgttcgtacccatcttgatgcggtttaataaatgttttgatttcaatttattgtaaaaaaagattcggttttatactgttcgatattctcattgcttatattctcatctatcatctccacacagtcaaatccgtggttagcatgcacctcatcaaccggtaaaagactatcggactcttctatcattataactctagaatatttaatttggtcattattaatcaagtcaattatcttatttttaacaaacgtgagtattttactcattttttataaaaacttttagaaatatacagactctatcgtgtgtctatatcttctttttatatccaatgtatttatgtctgatttttcttcatttatcatatataatggtccaaattctacacgtgcttcggattcatccagatcattaaggttcttataattgtaacatccttctcttccctcttctacatcttccttcttattcttattcttagcgtcacagaatctaccacagcaggatcccatgacgagcgtcatattaaactaatccattttcaattataatatatgattagtaatgaccattaaaataaaaaatattcttcataaccggcaagaaagtgaaaagttcacattgaaactatgtcagtagtatacatcatgaaatgatgatatatatatactctattttggtggaggattatatgatataattcgtggataatcattcttaagacacatttcttcattcgtaaatcttttcacgttaaatgagtgtccatattttgcaatttcttcatatgatggcggtgtacgtggacgaggctgctcctgttcttgttgtggtcgccgactgtcgtgtttgcgtttatccctccattatcgcgattgcgtagatggagtactattatataccttgtaattaaatttttttattaattaaacgtataaaaacgttccgtatctgtatttaagagccagatttcgtctaatagaacaaatagctacagtaaaaataactagaataattgctacacccactagaaaccacggatcgtaatacggcaatcggttttcgataataggtggaacgtatattttatttaaggacttaacaattgtctgtaaaccacaatttgcttccgcggatcctgtattaactatctgtaaaagcatatgttggccgggcggagccgaacattctccgatatccaatttctgtatatctataatattattaacctccgcatacgcattacagttcttttctagcttggataccgcactaggtacatcgtctagatctattcctatttcctcagcgatagctcttctatccttttccggaagcaatgaaatcacttcaataaatgattcaaccatgagtgtgaaactaagtcgagaattactcatgcatttgttagttattcggagcgcgcaatttttaaactgtcctataacctctcctatatgaatagcacaagtgacattagtagggatagaatgttgagctaatttttgtaaataactatctataaaaagattatacaaagttttaaactctttagtttccgccatttatccagtctgagaaaatgtctctcataataaatttttccaagaaactaattgggtgaagaatggaaacctttaatctatatttatcacagtctgttttggtacacatgatgaattcttctaatgccgtactaaattcgatatctttttcgatttctggatatgtttttaataaagtatgaacaaagaaatggaaatcgtaataccagttatgtttaactttgaaattgttttttattttcttgttaatgattccagccacttgggaaaagtcaaagtcgtttaatgccgatttaatacgttcattaaaaacaaactttttatcctttagatgaattattattggttcattggaatcaaaaagtaagatattatcgggtttaagatctgcgtgtaaaaagttgtcgcagcatggtagttcgtagattttaatgtataacagagccatctgtaaaaagataaactttatgtattgtaccaaagatttaaatcctaatttgatagctaactcggtatctactttatctgccgaatacagtgctaggggaaaaattataatgtttcctctttcgtattcgtagttagttctcttttcatgttcgaaaaagtgaaacatgcggttaaaatagtttataacattaatattactgttaataactgccgggtaaaagtgggatagtaatttcacgaatttgatactgtcctttctctcgttaaacgcctttagaaaaactttagaagaatatctcaatgatagttcctgaccatccatagtttgtatcaataatagcaacatatgaagaacacgtttatacagagtatgtaaaaatgttaatttatagtttaatcccatggcccacgcacacacgattaattttttttcatctccctttagattgttgtatagaaatttgggtactgtgaactccgccgtagtttccatgggactatataattttgtggcctcgaatacaaattttactacatagttatctatcttaaaaactataccatatcctcctgtagatatgtgataaaaatcgtcgtttataggataaaatcgtttatccttttgttggaaaaaggatgaattaatgtaatcattctcttctatctttagtagtgtttccttattaaaattcttaaaataatttaacaatctaactgacggagcccaattttggtgtaaatctaattgggacattatattgttaaaatacaaacagtctcctaatataacagtatctgataatctatggggagacatccattgatattcaggggatgaatcattggcaacacccatttattgtacaaaaagccccaatttacaaacgaaagtccaggtttgatagagacaaactattaactattttgtctctgtttttaacacctccacagtttttaatttctttagtaatgaaattattcacaatatcagtatcttctttatctaccagagattttactaacttgataaccttggctgtctcattcaatagggtagtaatatttgtatgtgtgatattgatatctttttgaattgtttcttttagaagtgattctttgatggtgccagcatacgaattacaataatgcagaaactcggttaacatgcaggaattatagtaagccaattccaattgttgcctgtgttgtattagagtgtcaatatgagcaatggtgtccttgcgtttctctgatagaatgcgagcagcgattttggcgttatcatttgacgatatttctggaatgacgaatcctgtttctactaactttttggtaggacaaagtgaaacaatcaagaagatagcttctcctcctatttgtggaagaaattgaactcctctagatgatctactgacgatagtatctccttgacagatattggaccgaattacagaagtacctggaatgtaaagccctgaaaccccctcattttttaagcagattgttgccgtaaatcctgcactgtgaccaagatagagagctcctttggtgaatccatctctatgtttcagtttaaccaagaaacagtcagctggtctaaaatttccatctctatctaatacagcatctaacttgatgtcaggaactatgaccggtttaatgttatatgtaacattgagtaaatccttaagttcataatcatcactgtcatcagttatgtacgatccaaacaatgtttctactggcatagtggatacgaagatgctatccatcagaatgtttccctgattagtattttctatatagctattcttctttaaacgattttccaaatcagtaactatgttcatttttttaggagtaggacgcctagccagtatggaagaggattttctagatcctctcttcaacatctttgatctcaatggaatgcaaaaccccatagtgaaacaaccaacgataaaaataatattgtttttcactttttataattttaccatctgactcatggattcattaatatctttataagagctactaacgtataattctttataactgaactgagatatatacaccggatctatggtttccataattgagtaaatgaatgctcggcaataactaatggcaaatgtataaaacaacgaaattatactagagttgttaaagttaatattttctatgagctgttccaataaattatttgttgtgactgcgttcaagtcataaatcatcttgatactatccagtaaacagtctttaagttctggaatattatcatcccattgtaaagcccctaattcgactatcgaatatcctgctctgatagcagtttcaatatcgacggacgtcaatactgtaataaaggtggtagtattgtcatcatcgtgataaactacgggaatatggtcgttagtaggtacggtgactttacacaacgcgatatataactttccttttgtaccatttttaacgtagttgggacgtcctgcagggtattgttttgaagaaatgatatcgagaacagatttgatacgatatttgttggattcctgattattcactataatataatctagacagatagatgattcgataaatagagaaggtatatcgttggtaggataatacatccccattccagtattctcggatactctattgatgacactagttaagaacatgtcttctattctagaaaacgaaaacatcctacatggactcattaaaacttctaacgctcctgattgtgtctcgaatgcctcgtacaaggatttcaaggatgccatagattctttgaccaacgatttagaattgcgtttagcatctgatttttttattaaatcgaatggtcggctctctggtttgctaccccaatgataacaatagtcttgtaaagataaaccgcaagaaaatttatacgcatccatccaaataaccctagcaccatcggatgatattaatgtattattatagattttccatccacaattattgggccagtatactgttagcaacggtatatcgaatagattactcatgtaacctactagaatgatagttcgtgtactagtcataatatctttaatccaatctaagaaatttaaaattagattttttacactgttaaagttaacaaaggtattacccggatacgtggatatcatatatggcattggtccattatcagtaatagctccataaactgatacggcgatggtttttatatgtgtttgatctaacgaggaagaaattcgcgcccacaattcatctctagatatgtatttaatatcaaacggtaacacatcaatttcgggacgcgtatatgtttctaaatttttaatccaaatataatgatgacctatatgccctattatcatactgtcaactatagtacacctagagaacttacgatacatctgtttcctataatcgttaaattttacaaatctataacatgctaaaccttttgacgacaaccattcattaatttctgatatggaatctgtattctcgataccgtattgttctaaagccagtgctatatctccctgttcgtgggaacgctttcgtataatatcgatcaacggataatctgaagtttttggagaataatatgactcatgatctatttcgtccataaacaatctagacataggaattggaggcgatgatcttaattttgtgcaatgagtcgtcaatcctataacttctaatattgtaatattcatcatcgacataacactatctatgttatcatcgtatattagtataccacggccttcttcatttcgtgccaaaataatatacagtcttaaataattacgcaatatctcaatagtttcataattgttagctgttttcatcaaggtttgtatcctgtttaacatgatggcgttctataacgtctctattttctatttttaattttttaaatttttaacgatttactgtggctagatacccaatctctctcaaatatttttttagcctcgcttacaagctgtttatctatactattaaaactgacgaatccgtgattttggtaatgggttccgtcgaaatttgccgaagtgatatgaacatattcgtcgtcgactatcaacaattttgtattattctgaatagtgaaaaccttcacagatagatcattttgaacacacaacgcgtctagacttctggcggttgccatagaatatacgtcgttcttatcccaattaccaactagaagtctgatcttaactcctctattaatggctgcttctataatggagttgtaaatgtcaggccaatagtagctattaccgtcgacacgtgtagtgggaactatggccaaatgttcaatatctatactagtcttagccgacttgagtttatcaataactacatcagtgtctagatctctagaatatcccaataggtgttctggagaatcagtaaagaacactccacctataggattcttaatatgatacgcagtgctaactggcagacaacaagccgcagagcataaattcaaccatgaattttttgcgctattaaaggctttaaaagtatcaaatcttctacgaagatctgtggccagcgggggataatcagaatatacacctaacgttttaatcgtatgtatagatcctccagtaaatgacgcgtttcctacataacatctttcatcatctgacacccaaaaacaaccgagtagtagtcccacattattttttttatctatattaacggttataaaatttatatccgggcagtgactttgtagctctcccagatttcttttccctcgttcatctagcaaaactattattttaatccctttttcagatgcctcttttagtttatcaaaaataagcgcgcccctagtcgtactcagaggattacaacaaaaagatgctatgtatatatatttcttagctagagtgataatttcgttaaaacattcaaatgttgttaaatgatcggatctaaaatccatattttctggtagtgtttctaccagcctacattttgctcccgcaggtaccggtgcaaatggccacatttagttaacataaaaacttatacatcctgttctatcaacgattctagaatatcatcggctatatcgctaaaattttcatcaaagtcgacatcacaacctaactcagtcaatatattaagaagttccatgatgtcatcttcgtttatttctatatccgtatccattgtagattgttgaccgattatcgagtttaaatcattactaatactcaatccttcagaatacaatctgtgtttcattgtaaatttataggcggtgtatttaagttggtagattttcaattatgtatcaccgctttgcgcaagtcgggtactcaagtttaccatcccagcatgtggtgcgcagcgtgtgacttcttgaactcaacctatatcctcgcttgcaaacaaattctacgctctcaccagttcttgagtaaagtttctgctttgcggtccacctcagcgcaatgttatagttttccattatctctctactgattacacaggggtgcaggcatttaggcggttcggaccattgtccgtttctgcaagttattctcttgttgccttccagctgataaagattttgacactggtattcgacgctggacgcgggggcatagacggaaaggggaaaactggtaatatccccattgtctatggggggcggtggtccgcactttccagtgctatccttgcattgtggtggttcggtccagttgccgttgagacacatgacctcctcgtctccaaacatttcgtatggactgcggcattgataccgaacgcgttcaccagaggggtacttagacatctgccgggacacaatgtatgcattctgtacagtcggaggatttacacagctcgtagtatccactccaccccctccactcccagatgtacatcttggggccggtatccacccggtagaagtacacttagctgtgttaccccgtgttgccggatagaaaccgtttctacattgatatgtgatttcgtctcctgtcctatgttttatcctgagtggactgtaatctccgttaggtatatatgggttgtcacaagacttctcctcacatgagggaagaggtctccagccgctttcagtgcatacagcatcacccctctcactatactcgtaacccatattgcacttgtactggaatctctcattttccttgtagattattttttgactaattgggcttccattgattacgtctggacttttgcaacttatctccacgcatttaggtttttcttttgaccaaaaaccatcgtctgagcagtgcatctcttcgtccccttcaatcttatagccactattacatacgaaccggactgcctgcccgaaatggtattcgcggtccggttccatcgcactgctgactatctttccgttctccggggcggtaacaggaaggcatttcacaacttcacaaatgggtatatcgtttgtccagccgtctgtgtcgcactctctatagttaatttctccaagcagttgatagccttcgttgcaagtatatactgctttcacaccatattcaaatacattacctccagtcagtgtgaaagtaccgaaaggggtgtcccctgggtgcccgcacggccgtttctggcatttccggagtgggttcagggcgacccactcaccttttctacataccataataacgtttccgagagacctgtatccaggccgacacttgtagatcgcttgcgtgccctcaggataggtctggtctgaccaggaccccgtaagaatttcagtattccggcgtgggggcagttcattgcagtcctcagatcctccccccccagaacctcctccaccgctgccgccgcctccatatagcaacagtagttcttgctcctccttgattctagcatcctcttcattattttcttctacgtacataagcatgtccaatacgttagacaacacaccgacgatggcggccgccacagacacgaatatgactagaccgatgaccatttaaaaacccctctctagctttcacttaaactgtatcgattattcttttagaacatgtataatataaaaacattattctatttcgaatttaggcttccaaaaatttttcatccgtaaaccgataataatatatatagacttgttaatagtcggaataaatagattaatgcttaaactatcatcatctccacgattagagatacaatatttacattctttttgctgtttcgaaactttatcaatacacgttaatacaaacccaggaaggagatattgaaactgaggctgttgaaaatgaaacggtgaatacaataattcagataatgtaaaatcatgattccgtattctgatgatattagaactgctaatggatgtcgatggtatgtatctaggagtatctattttaacaaagcatcgatttgctaatatacaattatcattttgattaattgttattttattcatattcttaaaaggtttcatatttatcaattcttctacattaaaaatttccatttttaatttatgtagccccgcaatactcctcattacgtttcattttttgtctataatatccattttgttcatctcggtacatagattatccaattgagaagcgcatttagtagttttgtacattttaagtttattgacgaatcgtcgaaaactagttatagttaacattttattatttgataccctgatattaatacccctgccgttactattatttataactgatgtaacccacgtaacattagaattaattatcgatagtaatgcatcgacgcttccaaaattgtctattataaactcaccgataatttttttattgcatgttttcatattcattaggattatcaaatctttaatcttattacgattgtatgcgttgatattacaagacgtcattctaaaagacggaggatctccatcaaatgccagacaatcacgtacaaagtacatggaaataggttttgttctattgcgcatcatagattcatatagaacacccatagaaatactaatttgttttactctataaaatactaatgcatctatttcatcgttttgtataacgtctttccaagtgccaaattccaaatttttttcattgatagtaccaaattcttctatctctttaactacttgcatagataggtaattacagtgatgcctacatgccgttttttgaaactgaatagatgcgtctagaagcgatgctacactagtcacaatcaccactttcatatttagaatatatgtatgtaaaaatatagtagaatttcattttgtttttttctatgctataaatgaattctcattttgcatctgctcatactccgttttatatcaataccaaagaaggaagatatctggttctaaaagccgttaaagtatgcgatgttagaactgtagaatgcgaaggaagtaaagcttcctgcgtactcaaagtagataaaccctcatcgcccgcgtgtgagagaagaccttcgtccccgtccagatgcgagagaatgaataaccctggaaaacaagtcccgtttatgaggacggacatgctacaaaatatgttcgcggctaatcgcgataatgtagcttctagacttttgtcctaaaatactattatatccttttcgatattaataaatccgtgtcgtccaggttttttatctctttcagtatgtgaatagataggtattttatctctattcatcatcgaatttaagagatccgataaacattgtttgtattctccagatgtcagcatctgatacaacaatatatgtgcacataaacctctggcacttatttcatgtaccttccccttatcactaaggagaatagtatttgagaaatatgtatacatgatattatcatgaattagatatacagaatttgtaacactctcgaaatcacacgatgtgtcggcgttaagatctaatatatcactcgataacacattttcatctagatacactagacattttttaaagctaaaatagtctttagtagtgacagtaactatgcgattattttcatcgatgatacatttcatcggcatattattacgcttaccatcaaagactataccatgtgtatatctaacgtattctagcatggttgccatacgtgcattaaacttttcaggatctttggatagatcttccaatctatctatttgagaaaacatttttatcatgttcaatagttgaaacgtcggatccactatatagatattatctataaagattttaggaactacgttcatggtatcctggcgaatattaaaactatcaatgatatgattatcgttttcatcttttatcaccatatagtttctaagatatgggattttacttaatataatattatttcccgtgataaattttattagaaaggccaaatctataagaaaagtcctagaattagtctgaagaatatctatatcgccgtaccgtatatttggattaattagatatagagaatatgatccgtaacatatacaacttttattatggcgtctaagatattcttccatcaacttattaacatttttgactagggaagatacattatgacgtcccattacttttgccttgtctattactgcgacgttcatagaatttagcatatctcttgccaattcttccattgatgttacattataagaaattttagatgaaattacatttggagctttaatagtaagaactcctaatatgtccgtgtatgtggtcactaatacagattgtagttctataatcgtaaataatttacctatattatatgtttgagtctgtttagaaaagtagctaagtatacgatcttttatttctgatgcagatgtatcaacatcggaaaaaaatctttttttattcttttttactaaagatacaaatatgtctttgttaaaaacagttattttctgaatatttctagcttgtaattttaacatatgatattcgttcacactaggtactctgcctaaataggtttctataatctttaatgtaatattaggaagagtattctgatcaggattcctattcattttgaggatttaaaactctgattattgtctaatatggtctcaacacaaactttttcacagagcgatagagtttttgataactcgtttttcttaagaaatataaaactactgtttccagagctcgctctatcttttattttatctaattcgatacaaactcctgatactggttcagaaagtaattcattaattttcagtcctttatagaagatatttaatatagataatacaaaattttcagttcttgatatcgatctgattgatcctagaactagatatattaataacgtgctcattaggcagtttatggcagcttgataattagatatagtatattccagttcatatttattagataccgcattgcccagattttgatattctatgaattcctctgaaaataaatccaaaataactagacattctattttttgtggattagtgtactctcttccctctatcatgttcactactggtgtccacgatgataaatatctagagggaatataatatagtccataggatgccaatctagcaatgtcgaataactgtaatttgattcttcgttcttcattatgaattgattcttgaggtataaacctaacacaaattatattattagacttttcgtatgtaatgtctttcatgttataagtttttaatcctggaatagaatctattttaatgaggcttttaaacgcagagttctccaacgagtcaaagcataatactctgttgtttttcttatatacgatgttacgattttcttctttgaatggaataggtttttgaattagtttataattacaacataatagataaggaagtgtgcaaatagtacgcggaaaaaacataatagctcccctgttttcatccatggttttaagtaaatgatcactggcttctttagtcaatggatattcgaacattaaccgtttcatcatcattggacagaatccatatttcttaatgtaaagagtgatcaaatcattgtgtttattgtaccatcttgttgtaaatgtgtattcggttatcggatctgctcctttttctattaaagtatcgatgtcgatctcgtctaagaattcaactatatcgacatatttcatttgtatacacataaccattactaacgtagaatgtataggaagagatgtaacgggaacagggtttgttgattcgcaaactattctaatacataattcttctgttaatacgtcttgcacgtaatctattatagatgccaagatatctatataattattttgtaagatgatgttaactatgtgatctatataagtagtgtaataattcatgtatttcgatatatgttccaactctgtctttgtgatgtctagtttcgtaatatctatagcatcctcaaaaaatatattcgcatatattcccaagtcttcagttctatcttctaaaaaatcttcaacgtatggaatataataatctattttacctcttctgatatcattaatgatatagtttttgacactatcttctgtcaattgattcttattcactatatctaagaaacggatagcgtccctaggacgaactactgccattaatatctctattatagcttctggacataattcatctattataccagaattaatgggaactattccgtatctatctaacatagttttaagaaagtcagaatctaagacctgatgttcatatattggttcatacatgaaatgatctctattgatgatagtgactatttcattctctgaaaattggtaactcattctatatatgctttccttgttgatgaaggatagaatatactcaatagaatttgtaccaacaaactgttctcttatgaatcgtatatcatcatctgaaataatcatgtaaggcatacatttaacaattagagacttgtctcctgttatcaatatactattcttgtgataatttatgtgtgaggcaaatttgtccacgttctttaattttgttatagtagatatcaaatccaatggagctacagttcttggcttaaacagatatagtttttctggaacgaattctacaacattattataaaggactttgggtagataagtgggatgaaatcctattttaattaatgcgatagccttgtcctcgtgcagatatccaaacgcttttgtgatagtatggcattcattgtctagaaacgctctacgaatatctgtgacagatatcatctttagagaatatactagtcgcgttaatagtactacaatttgtattttttaatctatctcaataaaaaaattaatatgtatgattcaatgtataactaaactactaactgttattgataactagaatcagaatctaatgatgacgtaaccaagaagtttatctactgccaatttagctgcattatttttagcatctcgtttagattttccatctgccttatcgaatactcttccgtcgatgtctacacaggcataaaatgtaggagagttactaggccccactgattcaatacgaaaagaccaatctctcctagtaatttggcagtactcattaataacggtgacagggttagcacctttccaatcaataatttttttagccggaataacatcatcaaaagacttatgatcctctctcattgatttttcgcgggatacatcatctattatggcgtcagccataacatcagcatccggcttatccgcctccgttgtcataaaccaacgaggaggaatatcgtcggagctgtacaccatagcactacgttgaagatcgtacagagctttattaacttctcgcttctccatattaagttgtctagttagttgtgcagcagtagctccttcgattccaatggttttaatagcctcacacacaatctctgcgttagaacgttcgtcgatatagattttagacatttttagagagaactaacacaaccagcaataaaactgaacctactttatcatttttttattcatcatcctctggtggttcgtcgttcctatcgaatgtggatctgattaacccgtcatctataggtgatgctggttctggagattctggaggagatggattattatctggaagaatctctgttatttccttgttttcatgtatcgattgcgttgtaacattaagattgcgaaatgctctaaatttgggaggcttaaagtgttgtttgcaatctctacacgcatgtctaactagtggaggttcgtcagcggctctagtttgaatcatcatcggcgtagtattcctacttttacagttaggacacggtgtattgtatttctcgtcgagaacgttaaaataatcgttgtaactcacatcctttattttatctatattgtattctactcctttcttaatgcattttataccgaataagagatagcgaaggaattctttttcggtgccgctagtacccttaatcatatcacatagtgttttatattccaaatttgtggcaatagacggtttatttctatacgatagtttgtttctggaatcctttgagtattctataccaatattattctttgattcgaatttagtttcttcgatattagattttgtattacctatattcttgatgtagtactttgatgatttttccatggcccattctattaagtcttccaagttggcatcatccacatattgtgatagtaattctcggatatcagtagcggctaccgccattgatgtttgttcattggatgagtaactactaatgtatacattttccatttataacacttatgtattaactttgttcatttatattttttcattattatgttgatattaacaaaagtgaatatatatgttaataattgtattgtggttatacggctacaatttcataatgagtggaagtcagtgtccgatgatcaatgacgatagctttactctgaaaagaaagtatcaaatcgatagtgcggagtcaacaataaaaatggataagaagaggataaagtttcagaatagagccaaaatggtaaaagaaataaatcagacaataagagcagcacaaactcattacgagacattgaaactaggatacataaaatttaagagaatgattaggactactactctagaagatatagcaccatctattccaaataatcagaaaacttataaactattctcggacatttcagccatcggcaaagcatcacagaatccgagtaagatggtatatgctctgctgctttacatgtttcccaatttgtttggagatgaccatagattcattcgttatagaatgcatccaatgagtaaaatcaaacacaagatcttctctcctttcaaacttaatcttattagaatattagtggaagaaagattctataataatgaatgcagatctaataaatggagaataattggaacacaagttgataaaatgttgatagctgaatctgataaatatacaatagatgcaaggtataacctaaaacccatgtatagaatcaagggaaaatctgaagaagataccctcttcatcaaacagatggtagaacaatgtgtgacatcccaggaattggtggaaaaagtgttgaagatactgtttagagatttgttcaagagtggagaatacaaagcatacagatacgatgatgatgtagaaaatggatttattggattggatacactaaaattaaacattgttcatgatatagttgaaccatgtatgcctgttcgtaggccagtggctaagatactgtgtaaagaaatggtaaataaatactttgagaatccgctacatattattggtaaaaatcttcaagagtgcattgactttgttagtgaataggcatttcatctttctccaatactaattcaaattgttaaattaataatggatagtataaatagttattagtgataaaatagtaaaaataattattagaataagagtgtagtatcatagataactctcttctataaaaatggattttattcgtagaaagtatcttatatacacagtagaaaataatatagattttttaaaggatgatacattaagtaaagtaaacaattttaccctcaatcatgtactagctctcaagtatctagttagcaattttcctcaacacgttattactaaggatgtattagctaataccaatttttttgttttcatacatatggtacgatgttgtaaagtgtacgaagcggttttacgacacgcatttgatgcacccacgttgtacgttaaagcattgactaagaattatttatcgtttagtaacgcaatacaatcgtacaaggaaaccgtgcataaactaacacaagatgaaaaatttttagaggttgccgaatacatggacgaattaggagaacttataggcgtaaattatgacttagttcttaatccattatttcacggaggggaacccatcaaagatatggaaatcatttttttaaaactgtttaagaaaacagacttcaaagttgttaaaaaattaagtgttataagattacttatttgggcatacctaagcaagaaagatacaggcatagagtttgcggataatgatagacaagatatatatactctatttcaacaaactggtagaatcgtccatagcaatctaacagaaacgtttagagattatatctttcccggagataagactagctattgggtgtggttaaacgaaagtatagctaatgatgcggatatcgttcttaatagacacgccattaccatgtatgataaaattcttagttatatatactctgagataaaacaaggacgcgttaataaaaacatgcttaagttagtttatatctttgagcctgaaaaagatatcagagaacttctgctagaaatcatatatgatattcctggagatatcctatctattattgatgcaaaaaacgacgattggaaaaaatattttattagtttttataaagctaattttattaacggtaatacatttattagtgatagaacgtttaacgaggacttattcagagttgttgttcaaatagatcccgaatatttcgataatgaacgaattatgtctttattctctacgagtgctgcggacattaaacgatttgatgagttagatattaataacagttatatatctaatataatttatgaggtgaacgatatcacattagatacaatggatgatatgaagaagtgtcaaatctttaacgaggatacgtcgtattatgttaaggaatacaatacatacctgtttttgcacgagtcggatcccatggtcatagagaacggaatactaaagaaactgtcatctataaaatccaagagtagacggctgaacttgtttagcaaaaacattttaaaatattatttagacggacaattggctcgtctaggtcttgtgttagatgattataaaggagacttgttagttaaaatgataaaccatcttaagtctgtggaggatgtatccgcattcgttcgattttctacagataaaaaccctagtattcttccatcgctaatcaaaactattttagctagttataatatttccatcatcgtcttatttcaaaggtttttgagagataatctatatcatgtagaagaattcttggataaaagcatccatctaaccaagacggataagaaatatatacttcaattgataagacacggtagatcatagaacagaccaaatatattattaataatttgtatatacatagatataattatcacatattaaaaattcacacatttttgataaatgggaactgctgcaacaattcagactcccaccaaattaatgaataaagaaaatgcagaaatgattttggaaaaaattgttgatcatatagttatgtatattagtgacgaatcaagtgattcagaaaataatcctgaatatattgattttcgtaacagatacgaagactatagatctctcattataaaaagtgatcacgagtttgtaaagctatgtaaaaatcatgcagagaaaagttctccagaaacgcaacaaatgattatcaaacacatatacgaacaatatcttattccagtatctgaagtactattaaaacctataatgtccatgggtgacataattacatataacggatgtaaagacaatgaatggatgctagaacaactctctaccctaaactttaacaatctccgcacatggaactcatgtagcataggcaatgtaacgcgtctgttttatacattttttagttatctgatgaaagataaactaaatatataagtataatcccattctaatactttaacctgatgtattacctgcatcttattagaatattaacctaactaaaagacataacataaaaactcattacatagttgataaaaagcggtaggatataaatattatggctgccaccgttccgcgttttgacgacgtgtacaaaaatgcacaaagaagaattctagatcaagaaacattttttagtagaggtctaagtagaccgttaatgaaaaacacatatctatttgataattacgcgtatggatggataccagaaactgcaatttggagtagtagatacgcaaacttagatgcaagtgactattatcccatttcgttgggattacttaaaaagttcgagtttctcatgtctctatataaaggtcctattccagtatacgaagaaaaagtaaatactgaattcatagccaatggatcgttctctggtagatacgtatcatatcttcgaaagttttctgctcttccaacaaacgagtttattagttttttgttactgacttccattccaatctataatatcttgttctggtttaaaaatactcagtttgatattactaaacacacattattcagatacgtctatacagataatgccaaacacctggcgttggctaggtatatgcatcaaacaggagactataagcctttgtttagtcgtctcaaagagaattatatatttaccggtcccgttccaataggtatcaaagatatagatcaccctaatcttagtagagcaagaagtccatccgattatgagacattagctaatattagtactatattgtactttaccaagtatgatccggtattaatgtttttattgttttacgtacctgggtattcaattactacaaaaattactccagccgtagaatatctaatggataaactgaatctaacaaagagcgacgtacaactgttgtaaattattttatgcttcgtaaaatgtaggttttgaaccaaacattctttcaaagaatgagatgcataaaactttattatccaatagattgactatttcggacgtcaatcgtttaaagtaaacttcgtaaaatattctttgatcactgccgagtttaaaacttctatcgataattgtctcatatgttttaatatttacaagttttttggtccatggtacattagccggacaaatatatgcaaaataatatcgttctccaagttctatagtttctggattatttttattatattcagtaaccaaatacatattagggttatctgcggatttataatttgagtgatgcattcgactcaacataaataattctagaggagacgatctactatcaaattcggatcgtaaatctgtttctaaagaacggagaatatctatacatacctgattagaattcatccgtccttcagacaacatctcagacagtctggttttgtacatcttaatcatattcttatgaaacttggaaacatctcttctagtttcactagtacctttattaattctctcaggtacagattttgaattcgacgatgccgagtatttcatcgttgtatatttcttcttcgattgcataatcagattcttatataccgcctcaaactctattttaaaattattaaacaatactctactattaatcagtcgttctaactctttcgctatttctatagacttatctacatcttgactgtctatctctgtaaacacggagtcggtatctccatacacgctacgaaaacgaaatctgtaatctataggcaacgatgttttcacaatcggattaatatctctatcgtccatataaaatggattacttaatggattggcaaaccgtaacataccgttagataactctgctccatttagtaccgattctagatacaagatcattctacgtcctatggatgtgcaactcttagccgaagcgtatgagtatagagcactatttctaaatcccatcagaccatatactgagttggctactatcttgtacgtatattgcatggaatcataaatggccttttcagttgaactggtagcctgttttaacatctttttatatctggctctctctgccaaaaatgttcttaatagtctaggaatggttccttctatcgatctatcgaaaattgctatttcagagatgaggttcggtagtctaggttcacaatgaaccgtaatatatctaggaggtggatatttctgaagcaatagctgattatttatttcttcttccaatctattggtactaacaacgacaccgactaatgtttccggagatagatttccaaagatacacacattaggatacagactgttataatcaaagattaatacattattactaaacattttttgttttggagcaaataccttaccgccttcataaggaaacttttgttttgtttctgatctaactaagatagttttagtttccaacaatagctttaacagtggacccttgatgactgtactcgctctatattcgaataccatggattgaggaagcacatatgttgacgcacccgcgtctgtttttgtttctactccataatactcccacaaatactgacacaaacaagcatcatgaatacagtatctagccatatctaaagctatgtttagattataatccttatacatctgagctaaatcaacgtcatcctttccgaaagataatttatatgtatcattaggtaaagtaggacataatagtacgactttaaatccattttcccaaatatctttacgaattactttacatataatatcctcatcaacagtcacataattacctgtggttaaaacctttgcaaatgcagcggctttgcctttcgcgtccgtagtatcgtcaccgatgaacgtcatttctctaactcctctatttaatactttacccatgcaactgaacgcgttcttggatatagaatccaatttgtacgaatccaatttttcagatttttgaatgaatgaatatagatcgaaaaatatagttccattattgttattaacgtgaaacgtagtattggccatgccgcctactcccttatgactagactgatttctctcataaatacagagatgtacagcttcctttttgtccggagatctaaagataatcttctctcctgttaataactctagacgattagtaatatatctcagatcaaagttatgtccgttaaaggtaacgacgtagtcgaacgttagttccaacaattgtttagctattcgtaacaaaactatttcagaacatagaactagttctcgttcgtaatccatttccattagtgactgtatcctcaaacatcctctatcgacggcttcttgtatttcctgttccgttaacatctcttcattaatgagcgtaaacaataatcgtttaccacttaaatcgatataacagtaacttgtatgcgagattgggttaataaatacagaaggaaacttcttatcgaagtgacactctatatctagaaataagtacgatcttgggatatcgaatctaggtatttttttagcgaaacagttacgtggatcgtcacaatgataacatccattgttaatctttgtcaaatattgctcgtccaacgagtaacatccgtctggagatatcccgttagaaatataaaaccaactaatattgagaaattcatccatggtggcattttgtatgctgcgtttctttggctcttctatcaaccacatatctgcgacggagcattttctatctttaatatctagattataacttattgtctcgtcaatgtctatagttctcatctttcccaacggcctcgcattaaatggaggaggagacaatgactgatatatttcgtccgtcactacgtaataaaagtaatgaggaaatcgtataaatacggtctcaccatttcgacatctggatttcagatataaaaatctgttttcaccgtgactttcaaaccaattaatgcaccgaacatccatttatagaatttagaaatatattttcatttaaatgaatcccaaacattggggaagagccgtatggaccattatttttatagtactttcgcaagcgggtttagacggcaacatagaagcgtgtaaacgaaaactatatactatagtcagcactcttccatgtcctgcatgtagacggcacgcgactatcgctatagaggacaataatgtcatgtctagcgatgatctgaattatatttattattttttcatcagattatttaacaatttggcatctgatcccaaatacgcgatcgatgtgacaaaggttaaccctttataaacttaacccattataaaacttatgattagtcacaactgaaataaccgcgtgattattttttggtataattctacacggcatggtttctgtaactatgaattcaacccccgttacattagtgaaatctttaacaaacagcaagggttcgtcaaagacataaaactcattgtttacaatcgaaatagaccccctatcacacttaaaataaaaaatatccttatcctttaccaccaaataaaattctgattggtcaatgtgaatgtattcacttaacagttccacaaatttatttattaactccgaggcacatacatcgtcggtattttttatggcaaactttactcttccagcatccgtttctaaaaaaatattaacgagttccatttatatcatccaatattattgaaatgacgttgatggacagatgatacaaataagaaggtacggtacctttgtccaccatctcctccaattcatgctctattttgtcattaactttaatgtatgaaaacagtacgccacatgcttccatgacagtgtgtaacactttggatacaaaatgtttgacattagtataattgttcaagactgtcaatctataatagatagtagctataatatattctatgatggtattgaagaagatgacaaccttggcatattgatcatttaacacagacatggtatcaacagatagcttgaatgaaagagaatcagtaattggaataagcgtcttctcgatagagtgtccgtataccaacatgtctgatattttgatgtattccattaaattatttagttttttctttttattttcgttaaacagcatttctgtcaacggaccccaacatcgttgaccgattaagttttgattgatttttccgtgtaatgcgtatctagtcagatcgtatagcctatccaataatccatcatctgtgcgtagatcacatcgtacactttttaattctctatagaagagcgacagacatctggagcaattacagacagcaatttctttattctctacagatgtaagatacttgaagacattcctatgatgatgcagaattttggataacacggtattgatggtatctgttaccataattcctttgatggctgatagtgtcagagcacaagatttccaatctttgacaatttttagcaccattatctttgttttgatatctatatcagacagcatggtgcgtctgacaacacagggattaagacggaaagatgaaatgattctctcaacatcttcaatggataccttgctattttttctggcattatctatatgtgcgagaatatcctctagagaatcagtatcctttttgatgatagtggatctcaatgacatgggacgtctaaaccttcttattttatcaccagattgcatggtgatttgtcttctttcttttatcataatgtaatctctaaattcatcggcaaattgtctatatctaaaatcataatatgagatgtttacctctacaaatatctgttcgtccaatgttagagtatctacatcagttttgtattccaaattaaacatggcaacggatttaattttatattcctctattaagtcctcgtcgataataacagaatgtagataatcatttaatccatcgtacatggttggaagatgcttgttgacaaaatctttaattgtcttgatgaaggtgggactatatctaacatcttgattaataaaatttataacattgtccataggatactttgtaactagttttatacacatctcttcatcggtaagtttagacagaatatcgtgaacaggtggtatattatattcatcagatatacgaagaacaatgtccaaatctatattgtttaatatattatatagatgtagcgtagctcctacaggaatatctttaactaagtcaatgatttcatcaaccgttagatctattttaaagttaatcatataggcattgatttttaaaaggtatgtagccttgactacattctcattaattaaccattccaagtcactgtgtgtaagaagattatattctatcataagcttgactacatttggtcccgataccattaaagaattcttatgatataaggaaacagcttttaggtactcatctactctacaagaattttggagagccttaacgatatcagtgacgtttattatttcaggaggaaaaaacctaacattgagaatgtcggagttaatagcttccagatacagtgattttggcaatagtccgtgtaatccataatccagtaacacgagctggtgcttgctagacaccttttcaatgtttaatttttttgaaataagctttgataaagccttcctcgcaaattccggatacatgaacatgtcggcgacatgattaagtattgttttttcattatttttatattttctcaacaagttctcaataccccaatagatgatagaatatcacccaatgcgtccatgttgtctatttccaacaggtcgctatatccaccaatagaagtttttccaaaaaagattctaggaacagttctaccaccagtaatttgttcaaaatagtcacgcaattcattttcgggtttaaattctttaatatcgacaatttcatacgctcctcttttgaaactaaacttatttagaatatccagtgcatttctacaaaaaggacatgtatacttgacaaaaattgtcactttgttattggccaacctttgttgtacaaattcctcggccattttaatatttaagtgatataaaactatctcgacttatttaactctttagtcgagatatatggacgcagatagctatatgatagccaactacagaaggcaaacgctataaaaaacataattacgacgagcatatttataaatatttttattcagcattacttgatatagtaatattaggcacagtcaaacattcaaccactctcgatacattaactctctcattttctttaacaaattctgcaatatcttcgtaaaaagattcttgaaactttttagaatatctatcgactctagatgaaatagcgttcgtcaacatactatgttttgtatacataaaggcgcccattttaacagtttctagtgacaaaatgctagcgatcctaggatcctttagaatcacatagattgacgattcgtctctcttagtaactctagtaaaataatcatacaatctagtacgcgaaataatattatccttgacttgaggagatctaaacaatctagttttgagaacatcgataagttcatcgggaatgacatacatactatctttaatagaactcttttcatccagttgaatggattcgtccttaaccaactgattaatgagatcttctattttatcattttccagatgatatgtatgtccattaaagttaaattgtgtagcgcttctttttagtctagcagccaatactttaacatcactaatatcgatatacaaaggagatgatttatctatggtattaagaattcgtttttcgacatctgtcaaaaccaattcctttttgcctgtatcatccagttttccatcctttgtaaagaaattattttctactagactattaataagactgataaggattcctccataattgcacaatccaaactttttaacaaaactagactttacaagatctacaggaatgcgtacttcaggtttcttagcttgtgattttttcttttgtggacattttcttgtgaccaactcatctaccatttcattgattttagcagtgaaataagctttcaatgcacgggcactgatactattgaaaacgagttgatcttcaaattccgccatttaagttcaccaaacaacttttaaatacaaatatatcaatagtagtagaataagaactataaaaaaaataataattaaccaataccaaccccaacaaccggtattattagttgatgtgactgttttctcatcacttagaacagatttaacaatttctataaagtctgtcaaatcatcttccggagaccccataaatacaccaaatatagcggcgtacaacttatccatttatacattgaatattggcttttctttatcgctatcttcatcatattcatcatcaatatcaacaagtcccagattacgagccagatcttcttctacattttcagtcattgatacacgttcactatctccagagagtccgataacgttagccaccacttctctatcaatgattagtttcttgagtgcgaatgtaatttttgtttccgttccggatctatagaaaactacaggtgtgataattgccttggccaattgtctttctcttttactgagtgattctagttcaccttctatagatctgagaatggatgattctccagtcgaaacatattctaccatggatccgtttaatttgttgatgaagatggattcatccttaaatgttttctctgtaatagtttccaccgaaagactatgcaaagaatttggaatgcgttccttgtgcttaatgtttccatagacggcttctagaagttgatacaacataggactagccgcggtaacttttatttttagaaagtatccatcgcttctatcttgtttagatttatttttataaagtttagtctctccttccaacataataaaagtggaagtcatttgactagataaactatcagtaagttttatagagatagacgaacaattagcgtattgagaagcatttagtgtaacgtattcgatacattttgcattagatttactaatcgattttgcatactctataacacccgcacaagtctgtagagaatcgctagatgcagtaggtcttggtgaagtttcaactctcttcttgattaccttactcatgattaaacctaaataattgtactttgtaatataatgatatatattttcactttatctcatttgagaataaaaatgtttttgtttaaccactgcatgatgtacagatttcggaatcgcaaaccaccagtggttttattttatccttgtccaatgtgaattgaatgggagcggatgcgggtttcgtacgtagatagtacattcccgtttttagaccgagactccatccgtaaaaatgcatactcgttagtttggaataactcggatctgctatatggatattcatagattgactttgatcgatgaaggctcccctgtctgcagccatttttatgatcgtcttttgtggaatttcccaaatagttttataaactcgcttaatatcttctggaaggtttgtattctgaatggatccaccatctgccataatcctattcttgatctcatcattccataattttctctcggttaaaactctaaggagatgcggattaactacttgaaattctccagacaatactctccgagtgtaaatattactggtatacggttccaccgactcattatttcccaaaatttgagcagttgatgcagtcggcataggtgccaccaataaactatttctaagaccgtatgttctgattttatcttttagaggttcccaattccaaagatccgacggtacaacattccaaagatcatattgtagaataccgttactggcgtacgatcctacatatgtatcgtatggtccttccttctcagctagttcacaactcgcctctaatgcaccgtaataaatggtttcgaagatcttcttatttagatcttgtgcttccaggctatcaaatggataatttaagagaataaacgcgtccgctaatccttgaacaccaataccgataggtctatgtctcttattagagatttcagcttctggaataggataataattaatatctataattttattgagatttctgacaattactttgaccacatccttcagtttgagaaaatcaaatcgcccatctattacaaacatgttcaaggcaacagatgccagattacaaacggctacctcattagcatccgcatattgtattatctcagtgcaaagattactacacttgatagttcctaaattttgttgattactctttttgttacacgcatccttataaagaatgaatggagtaccagtttcaatctgagattctataatcgctttccagacgactcgagcctttattatagatttgtatctcctttctctttcgtatagtgtatacaatcgttcgaactcgtctccccaaacattgtccaatccaggacattcatccggacacatcaacgaccactctccgtcatccttcactcgtttcataaagagatcaggaatccaaagagctataaatagatctctggttctatgttcctcgtttcctgtattctttttaagatcgaggaacgccataatatcagaatgccacggttccaagtatatggccataactccaggccgtttgtttcctccctgatctatgtatctagcggtgttattataaactctcaacattggaataataccgtttgatataccattggtaccggagatatagcttccactggcacgaatattactaattgatagacctattccccctgccattttagagattaatgcgcatcgttttaacgtgtcatagataccctctatgctatcatcgatcatgttaagtagaaaacagctagacatttggtgacgactagttcccgcattaaataaggtaggagaagcgtgcgtaaaccatttttcagaaagtagattgtacgtctcaatagctgagtctatatcccattgatgaattcctactgcgacacgcattaacatgtgctgaggtctttcaacgatcttgttgtttattttcaacaagtaggatttttccaaagttttaaaaccaaaatagttgtatgaaaagtctcgttcgtaaataataaccgagttgagtttatccttatatttgttaactatatccatggtgatacttgaaataatcggagaatgtttcccatttttaggattaacatagttgaataaatcctccatcacttcactaaatagtttttttgtttccttgtgtagatttgatacggctattctggcggctagaatggcataatccggatgttgtgtagtacaagtggctgctatttcggctgccagagtgtccaattctaccgttgttactccattatatattccttgaataaccttcatagctattttaataggatctatatgatccgtgtttaagccataacataattttctaatacgagacgtgattttatcaaacatgacattttccttgtatccatttcgtttaatgacaaacatttttgttggtgtaataaaaaaattatttaacttttcattaatagggatttgacgtatgtagcgtacaaaattatcgttcctggtatatagataaagagtcctatatatttgaaaatcgttacggctcgattaaactttaatgattgcatagtgaatatatcattaggatttaactccttgactatcagggcggcaccagaaattaccatcaaaagcattaatacagttatgccgatcgcagttagaacggttatagcatccaccatttatatctaaaaattagatcaaagaatatgtgacaaagtcctagttgtatactgagaattgacgaaacaatgtttcttacatatttttttcttattagtaactgacttaatagtaggaactggaaagctagacttgattattctataagtatagatacccttccaaataatattctctttgataaaagttccagaaaatgtagaattttttaaaaagttatcttttgctattaccaagattgtgtttagacgcttattattaatatgagtgatgaaatccacaccgcctctagatatcgcttttatttccacattagatggtaaatccaatagtgaaactatctttttaggaatgtatggactcgcgtttagaggagtgaacgtcttaggcgtcggaaaggatgattcatcaaacgaataaacaatttcacaaatggatgttaatgtattagtaggaaattttttgacgctagtggaattgaagattctaatggatgatgttctacctatttcatccgataacatgttaatttccgacaccaacggttttaatatttcgatgatatacggtagtctctctttcggacttatatagcttattccacaatacgagtcattatatactccaaaaaacaaaataactagtataaaatctgtatcgaatgggaaaaacgaaattatcgacataggtatagaatctggaacattgaacgtattaatacttaattctttttctgtggtaagtaccgataggttattgacattgtatggttttaaatattctataacttgagacttgatagatattagtgatgaattgaaaattatttttatcaccacgtgtgtttcaggatcatcgtcgacgcccgtcaaccaaccgaatggagtaaaataaatatcattaatatatgctctagatattagtatttttatcaatcctttgattatcatcttctcgtaggcgaatgattccatgatcaagagtgatttaagaacatcctccggagtattaatgggcttagtaaacagtccatcgttgcaataataaaagttatccaagttaaaggatattatgcattcgtttaaagatatcacctcatctgacggagacaattttttggtaggttttagagactttgaagctacttgtttaacaaagttattcatcgtcgtttactattctatttaattttgtagttaatttatcacatatcacattaattgactttttggtccatttttccatacgtttatattcttttaatcctgcgttatccgtttccgttatatccagggatagatcttgcaagttaaatagaatgctcttaaataatgtcatttttttatccgctaaaaatttaaagaatgtataaacttttttcaaagatttaaaacttttaggtggagttctagtacacaatatcataaacaaactaataaacatcccgcattcagattccaacagctgattaacttccacattaatacagcctattttcgctccaaatgtacattcgaaaaatctgaataaaacatcgatgtcacaatttgtattatccaatacagaatgtctgtgattcgtgttaaaaccatcggagaaggaatagaaataaaaattattatagtggtggaattcagttggaatattgcctccggagtcataaaaggatactaaacattgttttttatcataaattacacatttccaatgagacaaataacaaaatccaaacattacaaatctagaggtagaacttttaattttgtctttaagtatatacgataagatatgtttattcataaacgcgtcaaatttttcatgaatcgctaaggagtttaagaatctcatgtcaaattgtcctatataatccacttcggatccataagcaaactgagagactaagttcttaatacttcgattgctcatccaggctcctctctcaggctctattttcatcttgacgacctttggattttcaccagtatgtattcctttacgtgataaatcatcgattttcaaatccatttgtgagaagtctatcgccttagatactttttcccgtagtcgaggtttaaagaaatacgctaacggtatactagtaggtaactcaaagacatcatatatagaatggtaacgcgtctttaactcgtcggttaactctttcttttgatcgagttcgtcgctactattgggtctgctcaggtgccccgactctactagttccaacatcataccgataggaatacaagacactttgccagcggttgtagatttatcatatttctccactacatatccgttacaatttgttaaaaatttagatacatctatattgctacataatccagctagtgaatatatatgacataataaattggtaaatcctagttctggtattttactaattactaaatctgtatatctttccatttatcatggaaaagaatttaccagatatcttcttttttccaaactgcgttaatgtattctcttacaaatattcacaagatgaattcagtaatatgagtaaaacggaacgtgatagtttctcattggcggtgtttccagttataaaacatagatggcataacgcacacgttgtaaaacataaaggaatatacaaagttagtacagaagcacgtggaaaaaaagtatctcctccatcactaggaaaacccgcacacataaacctaaccgcgaagcaatatatatacagtgaacacacaataagctttgaatgttatagttttctaaaatgtataacaaatacagaaatcaattcgttcgatgagtatatattaagaggactattagaagctggtaatagtttacagatattttccaattccgtaggtaaacgaacagatactataggtgtactagggaataagtatccatttagcaaaattccattggcctcattaactcctaaagcacaacgagagatattttcagcgtggatttctcatagacctgtagttttaactggaggaactggagtgggtaagacgtcacaggtacccaagttattgctttggtttaattatttatttggtggattctctactctagataaaatcactgactttcacgaaagaccagtcattctatctcttcctaggatagctttagttagattgcatagcaataccattttaaaatcattgggatttaaggtactagatggatctcctatttctttacggtacggatctataccggaagaattaataaacaaacaaccaaaaaaatatggaattgtattttctacccataagttatctctaacaaaactatttagttatggcactcttattatagacgaagttcatgagcatgatcaaataggagatattattatagcagtagcgagaaagcatcatacgaaaatagattctatgtttttaatgactgccacgttagaggatgacagggaacggctaaaagtatttttacctaatcccgcatttatacatattcctggagatacactgtttaaaattagcgaggtatttattcataataagataaatccatcttccagaatggcatacatagaagaagaaaagagaaatttagttactgctatacagatgtatactcctcctgatggatcatccggtatagtctttgtggcatccgttgcacagtgtcacgaatataaatcatatttagaaaaaagattaccgtatgatatgtatattattcatggtaaggtcttagatatagacgaaatattagaaaaagtgtattcatcacctaatgtatcgataattatttctactccttatttggaatccagcgttactatacacaatgttacacacatttatgatatgggtagagtttttgtccccgctccttttggaggatcgcaacaatttatttctaaatctatgagagatcaacgaaaaggaagagtaggaagagttaatcctggtacatacgtctatttctatgatctgtcttatatgaagtctatacagcgaatagattcagaatttctacataattatatattgtacgctaataagtttaatctaacactccccgaagatttgtttataatccctacaaatttggatattctatggcgtacaaaggaatatatagactcgttcgatattagtacagaaacatggaataaattattatccaattattatatgaagatgatagagtatgctaaactttatgtactaagtcctattctcgctgaggagttggataactttgagaggacgggagaattaactagtattgtacgagaagccattttatctctaaatttacgaattaagattttaaattttaaacataaagatgatgatacgtatatacacttttgtaaaatattattcggtgtctataacggaacaaacgctactatatattatcatagacctctaacgggatatatgaatatgatttcagatactatatttgttcctgtagataataactaaaaatcaaactctaatgaccacatctttttttagagatgaaaaattttctacatctccttttgtagacacgactaaacattttgcagaaaaaagtttattagtgtttagataatcgtatacttcatcagtgtagatagtaaatgtgaacagataaaaggtattcttgctcaatagattggtaaattccatagaatatattaatcctttcttcttgagatcccacatcatttcaaccagagacgttttatccaatgatttacctcgtactataccacatacaaaactagattttgcagtgacgtcgtacctggtattcctaccaaacaaaattttacttttagttcttttagaaaattctaaggtagaatctctatttgccaatatgtcatctatggaattaccactagcaaaaaatgatagaaatatatattgatacatcgcagctggttttgatctactatactttaaaaacgaatcagattccataattgcctgtatatcatcagctgaaaaactatgttttacacgtattccttcggcatttctttttaatgatatatcttgtttagacaatgataaagttatcatgtccatgagagacgcgtctccgtatcgtataaatatttcattagatgttagacgcttcattaggggtatacttctataaggtttcttaatcagtccatcattggttgcgtcaagaactactatcggatgttgttgggtatctctagtgttacacatggccttactaaagtttgggtaaataactatgatatctctattaattatagatgcatatatttcattcgtcaaggatattagtatcgacttgctatcgtcattaatacgtgtaatgtaatcatataaatcatgcgatagccaaggaaaatttaaatagatgttcatcatataatcgtcgctataattcatattaatacgttgacattgactaatttgtaatatagcctcgccacgaagaaagctctcgtattcagtttcatcgataaaggataccgttaaatataactggttgccgatagtctcatagtctattaagtggtaagtttcgtacaaatacagaatccctaaaatattatctaatgttggattaatctttaccataactgtataaaatggagacggagtcataactattttaccgtttgtacttactggaatagatgaaggaataatctccggacatgctggtaaagacccaaatgtctgtttgaagaaatccaatgttccaggtcctaatctcttaacaaaaattacgatattcgatcccgatatcctttgcattctatttaccagcatatcacgaactatattaagattatctatcatgtctattctcccaccgttatataaatcgcctccgctaagaaacgttagtatatccatacaatggaatacttcatttctaaaatagtattcgttttctaattctttaatgtgaaatcgtatactagaaagggaaaaattatctttgagttttccgttagaaaagaaccacgaaactaatgttctgattgcgtccgattccgttgctgaattaatggatttacaccaaaaactcatataacttctagatgtagaagcattcgctaaaaaattagtagaatcaaaggatataagtagatgttccaacaagtgagcaattcccaagatttcatctatatcattctcgaatccgaaattagaaattcccaagtagatatcctttttcatccgatcgttgatgaaaatacgaactttattcggtaagacaatcatttactaaggagtaaaataggaagtaatgttcgtatgtcgttatcatcgtataaattaaaggtgtgttttttaccattaagtgacattataattttaccaatattggaattataatataggtgtatttgcgcactcgcgacggttgatgcatcggtaaatatagctgtatctaatgttctagtcggtatttcatcatttcgctgtctaataatagcgttttctctatctgtttccattacagctgcctgaagtttattggtcggataatatgtaaaataataagaaatacatacgaataacaaaaataaaataagatataataaagatgccatttagagatctaattttgttcaacttgtccaaattcctacttacagaagatgaggaatcgttggagatagtgtcttccttatgtagaggatttgaaatatcttatgatgacttgataacttactttccagataggaaataccataaatatatttataaagtatttgaacatgtagatttatcggaggaattaagtatggaattccatgatacaactttgcgagatttagtttatcttagattgtacaagtattccaagtgtatacggccgtgttataaattaggagataatctaaaaggcatagttgttataaaggacaggaatatttatattagggaagcaaatgatgacttgatagaatatctcctcaaggaatacactcctcagatttatacatattctaatgagcgcgtccccataactggttcaaaattaattctttgtggattttctcaagttacatttatggcgtatacaacgtcgcatataacaacaaataaaaaggtagatgttctcgtttccaaaaaatgtatagatgaactagtcgatccaataaattatcaaatacttcaaaatttatttgataaaggaagcggaacaataaacaaaatactcaggaagatattttattcggtaaccggtggccaaactccataggtagctttttctatttcggattttagaatttccaaattcaccagcgatttatcggttttggtgaaatccaaggatttattaatgtccacaaatgccatttgttttgtctgtggattgtatttgaaaatggaaacgatgtagttagatagatgcgctgcgaagtttcctattagggttccgcgcttcacgtcacccagcatacttgaatcaccatcctttaaaaaaaatgataagatatcaacatggagtatatcatactcggattttaattcttctactgcatcactgacattttcacaaatactacaatacggtttaccgaaaataatcagtacgttcttcatttatgggtatcaaaaacttaaaatcgttactgctggaaaataaatcactgacgatattagatgataatttatacaaagtatacaatggaatatttgtggatacaatgagtatttatatagccgtcgccaattgtgtcagaaacttagaagagttaactacggtattcataaaatacgtaaacggatgggtaaaaaagggagggcatgtaaccctttttatcgatagaggaagtataaaaattaaacaagacgttagagacaagagacgtaaatattctaaattaaccaaggacagaaaaatgctagaattagaaaagtgtacatccgaaatacaaaatgttaccggatttatggaagaagaaataaaggcaaaaatgcaattaaaaatcgataaacttacatttcaaatatatttatctgattctgataacataaaaatatcattgaatgagatactaacacatttcaacaataatgagaatgttacattattttattgtgatgaacgagacgcagaattcgttatgtgtctcgaggctaaaacacatttctctaccacaggagaatggccgttgataataagtaccgatcaggatactatgctatttgcatctactgataatcatcctaagatgataaaaaacttaactcaactgtttaaatttgttccctcggcagaggataactatttagcaaaattaacggcgttagtgaatggatgtgatttctttcctggactctatggggcatctataacacccaccaacttaaacaaaatacaattgtttagtgattttacaatcgataatatagtcactagtttggcaattaaaaattattatagaaagactaactctaccgtagacgtgcgtaatattgttacgtttataaacgattacgctaatttagacgatgtctactcgtatgttcctccttgtcaatgcactgttcaagaatttatattttccgcattagatgaaaaatggaatgaatttaaatcatcttatttagagaccgttccgttaccctgtcaattaatgtacgcgttagaaccacgtaaggagattgatgtttcagaagttaaaactttatcatcttatatagatttcgaaaatactaaatcagatatcgatgttataaaatctatatcctcgatttttggatattctaacgaaaactgtaacacgatagtattcggcatctataaggataatttactactgagtataaataattcattttactttaacgatagtctgttaataaccaatactaaaagtgataatataataaatataggttactagattaaaaatggtgttccaactcgtgtgctctacatgcggtaaagatatttctcacgaacgatataaattgattatacgaaaaaaatcattaaaggatgtactcgtcagtgtaaagaacgaatgttgtaggttaaaattatctacacaaatagaacctcaacgtaacttaacagtgcaacctctattggatataaactaatatggatccggttaattttatcaagacatatgcgcctagaggttctattatttttattaattataccatgtcattaacaagtcatttgaatccatcgatagaaaaacatgtgggtatttattatggtacgttattatcggaacacttggtagttgaatctacctatagaaaaggagttcgaatagtcccattggatagtttttttgaaggatatcttagtgcaaaagtatacatgttagagaatattcaagttatgaaaatagcagctgatacgtcattaactttattgggtattccgtatggatttggtcatgatagaatgtattgttttaaattggtagctgactgttataaaaatgccggtgttgaaacatcgtctaaacgaatattaggtaaagatatttttctgagccaaaacttcacagacgataatagatggataaagatatatgattctaataatttaacattttggcaaattgattaccttaaagggtgagttaatatgcataactactcctccgttgttttttccctcgttctttttcttaacgttgtttgccatcactctcataatgtaaagatattctaaaatggtaaacttttgcatatcggacgcagaaattggtataaatgttgtaattgtattatttcccgtcaatggactagtcacagctccatcagttttatatcctttagagtatttctcactcgtgtctaacattctagagcattccatgatctgtttatcgttgatattggccggaaagatagattttttattttttattatattactattggcaattgtagatataacttctggtaaatatttttctaccttttcaatctcttctattttcaagccggctatatattctgctatattgttgctagtatcaataccttttcttgctaagaagtcatatgtggtattcactatatcagttttaactggtagttccattagcctttccacttctgcagaataatcagaaattggttctttaccagaaaatccagctactataataggctcaccgatgatcattggcaaaatcctatattgtaccagattaatgagagcatatttcatttccaataattctgctagttcttgagacattgatttatttgatgaatctagttggttctctagatactctaccatttctgccgcatacaataacttgttagataaaatcagggttatcaaagtgtttagcgtggctagaatagtgggcttgcatgtattaaagaatgcggtagtatgagtaaaccgttttaacgaattatatagtctccagaaatctgtggcgttacatacatgagccgaatgacatcgaagattgtccaatatttttaatagctgctctttgtccattatttctatatttgactcgcaacaattgtagataccattaatcactgattcctttttcgatgccggacaatagcacaattgtttagctttggactctatgtattcagaattaatagatatatctcttaatacagattgcactatacattttgaaactatgtcaaaaattgtagaacgacgctgttctgcagccatttaactttaaataatttacaaaaatttaaaatgagcatccgtataaaaatcgataaactgcgccaaattgtggcatatttttcagagttcagtgaagaagtgtctataaatgtagactcgacggatgagttaatgtatatttttgccgccttgggcggatctgtaaacatttgggccattatacctctcagtgcatcagtgttctaccgcggagccgaaaatattgtgtttaatcttccggtgtccaaggtaaaatcgtgtttgtgtagttttcacaatgatgccatcatagatatagaacctgatctggaaaataatctagtaaaactttctagttatcatgtagtaagtgtcgattgtaacaaggaactgatgcctattaggacagatactactatttgtctaagtatagatcaaaagaaatcttacgtgtttaattttcacaagtatgaagaaaaatgttgtggtagaaccgtcattcatttagaatggttgttgggctttatcaagtgtattagtcagcatcagcatttggctattatgtttaaagatgacaatattattatgaagactcctggtaatactgatgcgttttccagggaatattctatgactgaatgttctcaagaactacaaaagttttctttcaaaatagctatctcgtctctcaacaaactacgaggattcaaaaagagagtcaatgtttttgaaactagaatcgtaatggataatgacgataacattctaggaatgttgttttcggatagagttcaatcctttaagatcaacatctttatggcgtttttagattaatactttcaatgagataaatatgggtggcggagtaagtgttgagctccctaaacgggatccgcctccgggagtacccactgatgagatgttattaaacgtggataaaatgcatgacgtgatagctcccgctaagcttttagaatatgtgcatataggaccactagcaaaagataaagaggataaagtaaagaaaagatatccagagtttagattagtcaacacaggacccggtggtctttcggcattgttaagacaatcgtataatggaaccgcacccaattgctgtcgcacttttaatcgtactcattattggaagaaggatggaaagatatcagataagtatgaagagggtgcagtattagaatcgtgttggccagacgttcacgacactggaaaatgcgatgttgatttattcgactggtgtcagggggatacgttcgatagaaacatatgccatcagtggatcggttcagcctttaataggagtgatagaactgtagagggtcaacaatcgttaataaatctgtataataagatgcaaacattatgtagtaaagatgctagtgtaccaatatgtgaatcatttttgcatcatttacgcgcacacaatacagaagatagcaaagagatgatcgattatattctaagacaacagtctgcggactttaaacagaaatatatgagatgtagttatcccactagagataagttagaagagtcattaaaatatgcggaacctcgagaatgttgggatccagagtgttcgaatgccaatgttaatttcttactaacacgtaattataataatttaggactttgcaatattgtacgatgtaatactagcgtgaacaacttacagatggataaaacttcctcattaagattgtcatgtggattaagcaatagtgatagattttctactgttcccgtcaatagagcaaaagtagttcaacataatattaaacattcgttcgacctaaaattgcatttgatcagtttattatctctcttggtaatatggatactaattgtagctatttaaatgggtgccgcggcaagcatacagacgacggtgaatacactcagcgaacgtatctcgtctaaattagaacaagaagcgaacgctagtgctcaaacaaaatgtgatatagaaatcggaaatttttatatccgacaaaaccatggatgtaacctcactgttaaaaatatgtgctctgcggacgcggatgctcagttggatgctgtgttatcagccgctacagaaacatatagtggattaacaccggaacaaaaagcatacgtgccagctatgtttactgctgcgttaaacattcagacaagtgtaaacactgttgttagagattttgaaaattatgtgaaacagacttgtaattctagcgcggtcgtcgataacaaattaaagatacaaaacgtaatcatagatgaatgttacggagccccaggatctccaacaaatttggaatttattaatacaggatctagcaaaggaaattgtgccattaaagcgttgatgcaattgacgactaaggccactactcaaatagcacctagacaagttgctggtacaggagttcagttttatatgattgttatcggtgttataatattggcagcgttgtttatgtactatgccaagcgtatgctgttcacatccaccaatgataaaatcaaacttattttagccaataaggaaaacgtccattggactacttacatggacacattctttagaacttctccgatggttattgctaccacggatatacaaaactgaaaatatattgataatattttaatagattaacatggaagttatcgctgatcgtctagacgatatagtgaaacaaaatatagcggatgaaaaatttgtagattttgttatacacggtctagagcatcaatgtcctgctatacttcgaccattaattaggttgtttattgatatactattatttgttatagtaatttatatttttacggtacgtctagtaagtagaaattatcaaatgttgttggtggcgctagtcatcacattaactattttttattactttatactataatagtactagactgacttctaacaaacatctcacctgccataaataaatgcttgatattaaagtcttctatttctaacactattccatctgtggaaaataatactctgacattatcgctaattgacacatcggtgagtgatatgcctataaagtaataatcttctttgggcacatataccagtgtaccaggttctaacaacctatttactggtgctcctgtagcatactttttctttaccttgagaatatccatcgtttgcttggtcaatagcgatatgtgattttttatcaaccactcgaaaaagtaattggagtgttcatatcctctacgggctattgtctcatggccgtgtatgaaatttaagtaacacgactgtggtagatttgttctatagagccggttgccgcaaatagatagaactaccaatatgtctgtacaaatgttaaacattaattgattaacagaaaaaacaatgttcgttctgggaatagaaaccagatcaaaacaaaattcgttagaatatatgccacgtttatacattgaatataaaataactacagtttgaaaaataacagtatcatttaaacatttaacttgcggggttaatctcacaactttactgtttttaaactgttcaaaatatagcatcgatccatgagaaatacgtttagccgcctttaatagaggaaatcccaccgcctttctggatctcaccaacgacgatagttctgaccagcaactcatttcttcatcatccacctgttttaacatataataggcaggagatagatatccgtcattgcaatattccttctcgtaggcacacaatctaatattgataaaatctccattctcttctctgcatttattatcttgtttcggtggctgattaggctgtagtcttggtttaggctttggtatatcgttgttgaatctattttggtcattaaatctttcatttcttcctggtatatttttatcacctcgtttggttggatttttgtctatattatcgtttgtaacatcggtacgggtattcatttatcacaaaaaaaacttctctaaatgagtctactgctagaaaacctcatcgaagaagataccatattttttgcaggaagtatatctgagtatgatgatttacaaatggttattgccggcgcaaaatccaaatttccaagatctatgctttctatttttaatatagtacctagaacgatgtcaaaatatgagttggagttgattcataacgaaaatatcacaggagcaatgtttaccacaatgtataatataagaaacaatttgggtctaggagatgataaactaactattgaagccattgaaaactatttcttggatcctaacaatgaagttatgcctcttattattaataatacggatatgactgccgtcattcctaaaaaaagtggtaggagaaagaataagaacatggttattttccgtcaaggatcatcacctatcttgtgtattttcgaaactcgtaaaaagattaatatttataaagaaaatatggaatccgcatcgactgagtatacacctatcggagacaacaaggctttgatatctaaatatgcgggaattaatatcctaaatgtgtattctccttccacatccataagattgaatgccatttacggattcaccaataaaaataaactagagaaacttagtactaataaggaactagaatcgtatagttctagccctcttcaagaacccattaggttaaatgattttctgggactattggaatgtgttaaaaagaatattcctctaacagatattccgacaaaggattgattactataaatggagaatgttcctaatgtatactttaatcctgtgtttatagagcccacgtttaaacattctttattaagtgtttataaacacagattaatagttttatttgaagtattcgttgtattcattctaatatatgtattttttagatctgaattaaatatgttcttcatgcctaaacgaaaaatacccgatcctattgatagattacgacgtgctaatctagcgtgtgaagacgataaattaatgatctatggattaccatggatgacaactcaaacatctgcgttatcaataaatagtaaaccgatagtgtataaagattgtgcaaagcttttgcgatcaataaatggatcacaaccagtatctcttaacgatgttcttcgcagatgatgattcattttttaagtatttggctagtcaagatgatgaatcttcattatctgatatattgcaaatcactcaatatctagactttctgttattattattgatccaatcaaaaaataaattagaagccgtgggtcattgttatgaatctctttcagaggaatacagacaattgacaaaattcacagactttcaagattttaaaaaactgtttaacaaggtccctattgttacagatggaagggtcaaacttaataaaggatatttgttcgactttgtgattagtttgatgcgattcaaaaaagaatcctctctagctaccaccgcaatagatcctattagatacatagatcctcgtcgcgatatcgcattttctaacgtgatggatatattaaagtcgaataaagtgaacaataattaattctttattgtcatcatgaacggcggacatattcagttgataatcggccccatgttttcaggtaaaagtacagaattaattagacgagttagacgttatcaaatagctcaatataaatgcgtgactataaaatattctaacgataatagatacggaacgggactatggacgcatgataagaataattttgaagcattggaagcaactaaactatgtgatgtcttggaatcaattacagatttctccgtgataggtatcgatgaaggacagttctttccagacattgttgaattctgtgagcgtatggcaaacgaaggaaaaatagttatagtagccgcactcgatgggacatttcaacgtaaaccgtttaataatattttgaatcttattccattatctgaaatggtggtaaaactaactgctgtgtgtatgaaatgctttaaggaggcttccttttctaaacgattgggtgaggaaaccgagatagaaataataggaggtaatgatatgtatcaatcggtgtgtagaaagtgttacatcgactcataatattatattttttatctaaaaaactaaaaataaacattgattaaattttaatataatacttaaaaatggatgttgtgtcgttagataaaccgtttatgtattttgaggaaattgataatgagttagattacgaaccagaaagtgcaaatgaggtcgcaaaaaaactaccgtatcaaggacagttaaaactattactaggagaattattttttcttagtaagttacagcgacacggtatattagatggtgccaccgtagtgtatataggatcggctcctggtacacatatacgttatttgagagatcatttctataatttaggagtgatcatcaaatggatgctaattgacggccgccatcatgatcctattttaaatggattgcgtgatgtgactctagtgactcggttcgttgatgaggaatatctacgatccatcaaaaaacaactgcatccttctaagattattttaatttctgatgtaagatccaaacgaggaggaaatgaacctagtacggcggatttactaagtaattacgctctacaaaatgtcatgattagtattttaaaccccgtggcatctagtcttaaatggagatgcccgtttccagatcaatggatcaaggacttttatatcccacacggtaataaaatgttacaaccttttgctccttcatattcagctgaaatgagattattaagtatttataccggtgagaacatgagactgactcgagttaccaaattagacgctgtaaattatgaaaaaaagatgtactaccttaataagatcgtccgtaacaaagtagttgttaactttgattatcctaatcaggaatatgactattttcacatgtactttatgctgaggaccgtgtactgcaataaaacatttcctactactaaagcaaaggtactatttctacaacaatctatatttcgtttcttaaatattccaacaacatcaactgaaaaagttagtcatgaaccaatacaacgtaaaatatctagcaaaaattctatgtctaaaaacagaaatagcaagagatccgtacgcggtaataaatagaaacgtgctactgagatatactaccgatatagagtataatgatttagttactttaataaccgttagacataaaattgattctatgaaaactgtgtttcaggtatttaacgaatcatccataaattatactccggttgatgatgattatggagaaccaatcattataacatcgtatcttcaaaaaggtcataacaagtttcctgtaaattttctatacatagatgtggtaatatctgacttatttcctagctttgttagactagatactacagaaactaatatagttaatagtgtactacaaacaggcgatggtaaaaagactcttcgtcttcccaaaatgttagagacggaaatagttgtcaagattctctatcgccctaatataccattaaaaattgttagatttttccgcaataacatggtaactggagtagagatagccgatagatctgttatttcagtcgctgattaatcaattagtagagatgagataagaacattataataatcaataatattatcttatatctcgtttagaaaaatgctaatattaaaatagctaacgctagtaatccaatcggaagccatttgatatctataatagggtatctaatttcctgattcagatagcggacagctatattctcggtagctactcgtttggaatcacaaacattatttacatctaatttactatctgtaatggaaacgtttcccaatgaaatggtacaatccgatacattgcattttgttatatttttttttaaagaggctggtaacaacgcatcgcttcgtttacatggctcgtaccaacaataatagggtaatcttgtatctattcctatccgtactatgcttttatcaggataaatacatttacatcgtatatcgtctttgttagcatcacagaatgcataaatttgttcgtccgtcatgataaaaatttaaagtgtaaatataactattatttttatagttgtaataaaaagggaaatttgattgtatactttcggttctttaaaagaaactgacttgataaaaatggctgtaatctctaaggttacgtatagtctatatgatcaaaaagagattaatgctacagatattatcattagtcatgttaaaaatgacgacgatatcggtaccgttaaagatggtagactaggtgctatggatggggcattatgtaaaacttgtgggaaaacggaattggaatgtttcggtcactggggtaaagtaagtatttataaaactcatatagttaagcctgaatttatttcagaaattattcgtttactgaatcatatatgtattcactgcggattattgcgttcacgagaaccgtattccgacgatattaacctaaaagagttatcgggacacgctcttaggagattaaaggataaaatattatccaagaaaaagtcatgttggaacagcgaatgtatgcaaccgtatcaaaaaattactttttcaaagaaaaaggtttgtttcgtcaacaagttggatgatattaacgttcctaattctctcatctatcaaaagttaatttctattcatgaaaagttttggccattattagaaattcatcaatatccagctaacttattttatacagactactttcccatccctccgctgattattagaccggctattagtttttggatagatagtatacccaaagagaccaatgaattaacttacttattaggtatgatcgttaagaattgtaacttgaatgctgatgaacaggttatccagaaggcggtaatagaatacgatgatattaaaattatttctaataacactaccagtatcaatttatcatatattacatccggcaaaaataatatgattagaagttatatcgtcgcccgacgaaaagatcagaccgctagatctgtaattggtcccagtacatctatcaccgttaatgaggtaggaatgcccgcatatattagaaatacacttacagaaaagatatttgttaatgcctttacagtggataaagttaaacaactattagcgtcaaaccaagttaaattttactttaataaacgattaaaccaattaacaagaatacgccaaggaaagtttatcaaaaataaaatacatttattgcctggtgattgggtagaagtagctgttcaagaatatacaagtattatttttggaagacagccgtctctacatagatacaacgtcatcgcttcatctatcagagctaccgaaggagatactatcaaaatatctcccggaattgccaactctcaaaatgctgatttcgacggagatgaagaatggatgatattggagcaaaatcctaaagccgtaattgaacaaagtattcttatgtatccgacgacgttactcaaacacgatattcatggagcccccgtttatggatctattcaagatgaaatcgtagcagcgtattcattgtttaggatacaagatctttgtttagatgaagtattgaacatcttggggaaatatggaagagagttcgatcctaaaggtaaatgtaaattcagcggtaaagatatctatacttacttgataggtgaaaagattaattatccgggtctcttaaaggatggtgaaattattgcaaacgacgtagatagtaattttgttgtggctatgaggcatctgtcattggctggactcttatccgatcataagtcgaacgtggaaggtatcaactttattatcaagtcatcttatgtttttaagagatatctatctatttacggttttggggtgacattcaaagatctgagaccaaattcgacgttcactaataaattggaggccatcaacgtagaaaaaatagaacttatcaaagaagcatacgccaaatatctcaacgatgtaagagacgggaaaatagttccattatctaaagctttagaggcggactatgtggaatccatgttatccaacttgacaaatcttaatatccgagagatagaagaacatatgagacaaacgctgatagatgatccagataataacctcctgaaaatggccaaagcgggttataaagtaaatcctacagaactaatgtatattctaggtacgtatggacaacaaaggattgatggtgaaccagcagagactcgagtattgggtagagtcttaccttactatcttccagactctaaggatccagaaggaagaggttacattcttaattctttaacaaaaggattaacgggttctcaatattacttttcgatgctggttgccagatctcaatctactgatatcgtctgtgaaacatcacgtaccggaacactggctagaaaaatcattaaaaagatggaggatatggtggtcgacggatacggacaagtagttataggtaatacgctcatcaagtacgccgccaattataccaaaattctaggctcagtatgtaaacctgtagatcttatctatccagatgagtccatgacttggtatttggaaattagtgctctgtggaataaaataaaacagggattcgtttactctcagaaacagaaacttgcaaagaagacattggcgccgtttaatttcctagtattcgtcaaacccaccactgaggataatgctattaaggttaaggatctgtacgatatgattcataacgtcattgatgatgtgagagagaaatacttctttacggtatctaatatagattttatggagtatatattcttgacgcatcttaatccttctagaattagaattacaaaagaaacggctatcactatctttgaaaagttctatgaaaaactcaattatactctaggtggtggaactcctattggaattatttctgcacaggtattgtctgagaagtttacacaacaagccctgtccagttttcacactactgaaaaaagtggtgccgtcaaacaaaaacttggtttcaacgagtttaataacttgactaatttgagtaagaataagaccgaaattatcactctggtatccgatgatatctctaaacttcaatctgttaagattaatttcgaatttgtatgtttgggagaattaaatccagacatcactcttcgaaaagaaacagataaatatgtagtagatataatagttaatagattatacatcaagagagcagaaataaccgaattagttgtcgaatatatgattgaacgatttatctcctttagcgtcattgtaaaggaatggggtatggagacattcattgaggacgaggataatattagatttactgtctacctaaatttcgttgaaccggaagaattgaatcttagtaagtttatgatggttcttccgggtgccgccaacaagggcaagattagtaaattcaagattcctatctctgattatacgggttatgacgacttcaatcaaacaaaaaagctcaataagatgactgtagaactcatgaatctaaaagaattgggttctttcgatttggaaaacgtcaacgtgtatcctggagtatggaatacatacgatatcttcggtatcgaggccgctcgtgaatacttgtgcgaagccatgttaaacacctatggagaagggttcgattatctgtatcagccttgtgatcttctcgctagtttactatgtgctagttacgaaccagaatcagttaataaattcaagttcggtgcagctagtactcttaagagagctacgttcggagacaataaagcattgttaaacgcggctcttcataaaaagtcagaacctattaacgataatagtagctgccacttttttagcaaggtccctaatataggaactggatattacaaatactttatcgacttgggtcttctcatgagaatggaaaggaaactatctgataagatatcttctcaaaagatcaaggaaatggaagaaacagaagacttttaattcttatcaataacatatttttctatgatctgtcttttaaacgatggattttccacaaatgcgcctctcaagtccctcatagaatgatacacgtataaaaaatatagcataggcaatgactccttatttttagacattagatatgccaaaatcatagccccgcttctatttactcccgcagcacaatgaaccaacacgggctcgtttcgttgatcacatttagataaaaaggcggttacgtcgtcaaaatatttactaatatcggtagttgtatcatctaccaacggtatatgaataatattaatattagagttaggtaatgtatatttatccatcgtcaaatttaaaacatatttgaacttaacttcagatgatggtgcatccatagcatttttataatttcccaaatacacattattggttacccttgtcattatagtgggagatttggctttgtgcatatctccagttgaacgtagtagtaagtatttatacaaacttttcttatccatttataacgtacaaatggataaaactactttatcggtaaacgcgtgtaatttagaatacgttagagaaaaggctatagtaggcgtacaagcagccaaaacatcaacacttatattctttgttattatattggcaattagtgcgctattactctggtttcagacgtctgataatccagtctttaatgaattaacgagatatatgcgaattaaaaatacggttaacgattggaaatcattaacggatagcaaaacaaaattagaaagtgatagaggtagacttctagccgctggtaaggatgatatattcgacttcaaatgtgtggatttcggcgcctattttatagctatgcgattggataagaaaacatatctgccgcaagctattaggcgaggtactggagacgcgtggatggttaaaaaggcggcaaaggtcgatccatctgctcaacaattttgtcagtatttgataaaacacaagtctaataatgttattacttgtggtaatgagatgttaaatgaattaggttatagcggttattttatgtcaccgcattggtgttccgattttagtaatatggaatagtgttagataaatgcggtaacgaatgttcctgtaaggaaccataacagtttagatttaacgttaaagatgagcataaacataataaacaaaattacaatcaaacctataacattaatatcaaacaatccaaaaaatgaaatcagtggagtagtaaacgcgtacataactcctggataacgtttagcagctgccgttcctattctagaccaaaaattcggtttcatgttttcgaagcggtgttctgcaacaagtcggggatcgtgttctacatatttggcggcgttatccagtatctgcctattgatcttcatttcgttttcgattctggctatttcaaaataaaatcccgatgatagacctccagactttataatttcatctacgatgttcagcgccgtagtaactctaataatataggctgataagctaacatcataccctcctgtatatgtgaatatggcatgatttttgtccattacaagctcggttttaactttattgcctgtaataatttctctcatctgtaggatatctatttttttgtcatgcattgccttcaagacgggacgaagaaacgtaatatcctcaataacgttatcgttttctacaataactacatattctacctttttattttctaactcggtaaaaaaattagaatcccatagggctaaatgtctagcgatatttcttttcgtttcctctgtacacatagtgttacaaaaccctgaaaagaagtgagtatacttgtcatcatttctaatgtttcctccagtccactgtataaacgcataatccttgtaatgatctggatcatccttgactaccacaacatttcttttttctggcataacttcgttgtcctttacatcatcgaacttctgatcattaatatgctcatgaacattaggaaatgtttctgatggaggtctatcaataactggcacaacaataacaggagttttcaccgccgccatttagttattgaaattaatcatatacaactctttaatacgagttatattttcgtctatccattgtttcacatttacatatttcgacaaaaagatataaaatgcgtattccaatgcttctctgtttaatgaattactaaaatatacaaacacgtcactgtctggcaataaatgatatcttagaatattgtaacaatttattttgtattgcacatgttcgtgatctatgagttcttcttcgaatggcataggatctccgaatctgaaaacgtataaataggagttagaataataatatttgagagtattggtaatatataaactctttagcggtataattagtttttttctctcaatttctatttttagatgtgatggaaaaatgactaattttgtagcattagtatcatgaactctaatcaaaatcttaatatcttcgtcacacgttagctctttgaagtttttaagagatgcatcagttggttctacagatggagtaggtgcaacaattttttgttctacacatgtatgtactggagccattgttttaactataatggtgcttgtatcgaaaaactttaatgcagatagcggaagctcttcgccgcgactttctacatcgtaattgggttctaacgccgatctctgaatggatactagttttctaagttctaatgtgattctctgaaaatgtaaatccaattcctccggcattatagatgtgtatacatcggtaaataaaactatagtatccaacgatcccttctcgcaaattctagtcttaaccaaaaaatcgtatataaccacggagatggcgtatttaagagtggattcttctaccgttttgttcttggatgtcatataggaaactataaagtccgcactactgttaagaatgattactaacgcaactatatagttcaaattaagcattttggaaacataaaataactctgtagacgatacttgactttcgaataagtttgcagacaaacgaagaaagaacagacctctcttaatttcagaagaaaactttttttcgtattcctgacgtctagagtttatatcaataagaaagttaagaattagtcggttaatgttgtatttcattacccaagtttgagatttcataatattatcaaaagacatgataatattaaagataaagcgctgactatgaacgaaatagctatatggttcgctcaagaatatagtcttgttaaacgtggaaacgataactgtatttttaatcacgtcagcggcatctaaattaaatataggtatatttattccacacactctacaatatgccacaccatcttcataataaataaattcgttagcaaaattattaattttagtgaaatagttagcgtcaactttcatagcttccttcaatctaatttgatgctcacacggtgcgaattccactctaacatcccttttccatgcctcaggttcatcgatctctataatatctagtttcttgcgtttcacaaacacgggctcgtctctcgcgatgagatctgtatagtaactatgtaaatgataactagatagaaagatgtagctatatagatgacgatcctttaagagaggtataataactttaccccaatcagataaactattgttatggtcttcggaaaaagaatttttataaatttttccagtattttccaaatatacgtacttgacatctaaaaaatccttaatgataataggaatggataatccgtctattttataaagaaatacatatcgcacattatacttttttttggaaatgggaataccgatgtgtctacataaatatgcaaagtctaaatattttttagagaatcttagttggtccaaattcttttccaagtacggtaatagatttttcatattgaacggtatcttcttaatctctggttctagttccgcattaaatgatgaaactaagtcactatttttataactaacgattacatcacctctaacatcatcatttaccagaatactgatcttcttttgtcgtaaatacatgtctaatgtgttaaaaaaaagatcatacaagttatacgtcatttcatctgtggtattcttgtcattgaaggataaactcgtactaatctcttctttaacagcctgttcaaatttatatcctatatacgaaaaaatagcaaccagtgtttgatcatccgcgtcaatattctgttctatcgtagtgtataacaatcgtatatcttcttctgtgatagtcgatacgttataaaggttgataacgaaaatatttttatttcgtgaaataaagtcatcgtaggattttggacttatattcgcgtctagtagatatgcttttatttttggaatgatctcaattagaatagtctctttagagtccatttaaagttacaaacaactaggaaattggtttatgatgtataatttttttagtttttatagattctttattctatacttaaaaaatgaaaataaatacaaaggttcttgagggttgtgttaaattgaaagcgagaaataatcataaattatttcattatcgcgatatccgttaagtttgtatcgtaatggcgtggtcaattacaaataaagcggatactagtagcttcacaaagatggctgaaatcagagctcatctaaaaaatagcgctgaaaataaagataaaaacgaggatattttcccggaagatgtaataattccatctactaagcccaaaaccaaacgagccactactcctcgtaaaccagcggctactaaaagatcaaccaaaaaggaggaagtggaagaagaagtagttatagaggaatatcatcaaacaactgaaaaaaattctccatctcctggagtcagcgacattgtagaaagcgtggccgctgtagagctcgatgatagcgacggggatgatgaacctatggtacaagttgaagctggtaaagtaaatcatagtgctagaagcgatctttctgacctaaaggtggctaccgacaatatcgttaaagatcttaagaaaattattactagaatctctgcagtatcgacggttctagaggatgttcaagcagctggtatctctagacaatttacttctatgactaaagctattacaacactatctgatctagtcaccgagggaaaatctaaagttgttcgtaaaaaagttaaaacttgtaagaagtaaatgcgtgcacttttttataaagatggtaaactctttaccgataataattttttaaatcctgtatcagacgataatccagcgtatgaggttttgcaacatgttaaaattcctactcatttaacagatgtagtagtatatgaacaaacgtgggaggaggcgttaactagattaatttttgtgggaagcgattcaaaaggacgtagacaatacttttacggaaaaatgcatgtacagaatcgcaacgctaaaagagatcgtatttttgttagagtatataacgttatgaaacgaattaattgttttataaacaaaaatataaagaaatcgtccacagattccaattatcagttggcggtttttatgttaatggaaactatgttttttattagatttggtaaaatgaaatatcttaaggagaatgaaacagtagggttattaacactaaaaaataaacacatagaaataagtcccgatgaaatagttatcaagtttgtaggaaaggacaaagtttcacatgaatttgttgttcataagtctaatagactatataagccgctattgaaactgacggatgattctagtcccgaagaatttctgttcaacaaactaagtgaacgaaaggtatacgaatgtatcaaacagtttggtattagaatcaaggatctccgaacgtatggagtcaattatacgtttttatataatttttggacaaatgtaaagtccatatctcctcttccatcaccaaaaaagttaatagcgttaactatcaaacaaactgctgaagtggtaggtcatactccatcaatttcaaaaagagcttacatggcaacgactattttagaaatggtaaaggataaaaattttttagatgtagtatctaaaactacgttcgatgaattcctatctatagtcgtagatcacgttaaatcatctacggatggatgatatagatctttacacaaataattacaagaccgataaatggaaatggataagcgtatgaaatctctcgcaatgacagctttcttcggagagctaaacacattagatattatggcattgataatgtctatatttaaacgccatccaaacaataccattttttcagtggataaggatggtcagtttatgattgatttcgaatacgataattataaggcttctcaatatttggatctgaccctcactccgatatctggagatgaatgcaagactcacgcatcgagtatagccgaacaattggcgtgtgtggatattattaaagaggatattagcgaatatatcaaaactactccccgtcttaaacgatttataaaaaaataccgcaatagatcagatactcgtatcagtcgagatacagaaaagcttaaaatagctctagctaaaggcatagattacgaatatataaaagacgcttgttaataagtaaatgaaaaaaaactagtcgtttataataaaacacaatatggatgccaacatagtatcatcttctactattgcaacgtatatagacgctttagcaaagaatgcttcagaattagaacagaggtctaccgcatacgaaataaataatgaattggaactagtatttattaagccgccattaattactttgacaaatgtagtgaatatctctacgattcaggaatcgtttattcgatttaccgttactaataaggaaggtgtcaaaattagaactaagattccattatctaaggtacatggtctagatgtaaaaaatgtacagttagtagatgctatagataacatagtttgggaaaagaaatcattagtgacggaaaatcgtcttcacaaagaatgcttgttgagactatcgacagaggaacgtcatatatttttggattacaagaaatatggatcctctatccgactagaattagtcaatcttattcaagcaaaaacaaaaaactttacgatagactttaagctaaaatattttctaggatccggtgcccaatctaaaagttctttgttgcacgctattaatcatccaaagtcaaggcctaatacatctctggaaatagaattcacacctagagacaatgaaaaagttccatatgatgaactaataaaggaattgacgactctatcacgtcatatatttatggcttctccagagaatgtaattctttctccgcctattaacgcacctataaagacttttatgttgcctaaacaagatatagtaggtctggatctggaaaatctatatgccgtaactaagactgacggcattcctataactatcagagttacatcaaacgggttgtattgttattttacacatcttgggtatattattagatatccagttaagagaataatagattccgaagtagtagtctttggtgaggcagttaaggataagaactggaccgtatatctcattaagctaatagagcctgtgaatgcaatcaatgatagactagaagaaagtaagtatgttgaatctaaactagtggatatttgtgatcggatagtattcaagtcaaagaaatatgaaggtccgtttactacaactagtgaagtcgtcgatatgttatctacatatttaccaaagcaaccagaaggtgttattctgttctattcaaagggacctaaatctaacattgattttaaaattaaaaaggaaaatactatagaccaaactgcaaatgtagtatttaggtacatgtccagtgaaccaattatctttggagaatcgtctatctttgtagagtataagaaatttagcaacgataaaggctttcctaaagaatatggttctggtaagattgtgttatataacggcgttaattatctaaataatatctattgtttggaatatattaatacacataatgaagtgggtattaagtccgtggttgtacctattaagtttatagcagaattcttagttaatggagaaatacttaaacctagaatcgataaaaccatgaaatatattaactcagaagattattatggaaatcaacataatatcatagtcgaacatttaagagatcaaagcatcaaaataggagatatctttaacgaggataaactatcggatgtgggacatcaatacgccaataatgataaatttagattaaatccagaagttagttattttacgaataaacgaactagaggaccgttgggaattttatcaaactacgtcaagactcttcttatttctatgtattgttccaaaacatttttagacgattccaacaaacgaaaggtattggcgattgattttggaaacggtgctgacctggaaaaatacttttatggagagattgcgttattggtagcgacggatccggatgctgatgctatagctagaggaaatgaaagatacaacaaattaaactctggaattaaaaccaagtactacaaatttgactacattcaggaaactattcgatccgatacatttgtctctagtgtcagagaagtattctattttggaaagtttaatatcatcgactggcagtttgctatccattattcttttcatccgagacattatgctaccgtcatgaataacttatccgaactaactgcttctggaggcaaggtattaatcactaccatggacggagacaaattatcaaaattaacagataaaaagacttttataattcataagaatttacctagtagcgaaaactatatgtctgtagaaaaaatagctgatgatagaatagtggtatataatccatcaacaatgtctactccaatgactgaatacattatcaaaaagaacgatatagtcagagtgtttaacgaatacggatttgttcttgtagataacgttgatttcgctacaattatagaacgaagtaaaaagtttattaatggcgcatctacaatggaagatagaccgtctacaaaaaactttttcgaactaaatagaggagccattaaatgtgaaggtttagatgtcgaagacttacttagttactatgttgtttatgtcttttctaagcggtaaataataatatggtatgggttctgatatccccgttctaaatgcattaaataattccaatagagcgatttttgttcctataggaccttccaactgtggatactctgtattgttaatagatatattaatacttttgtcgggtaacagaggttctacgtcttctaaaaataaaagtttgataacatctggcctgttcataaataaaaacttggcgattctatatatactcttattatcaaatctagccattgtcttatagatgtgagctactgtaggtgtaccatttgattttctttctaatactatatatttctctcgaagaagttcttgcacatcatctgggaataaaatactactgttgagtaaatcagttattttttttatatcgatattgatggacatttttatagttaaggataataagtatcccaaagtcgataacgacgataacgaagtatttatacttttaggaaatcacaatgactttatcagatcaaaattaacaaaattaaaggagcatgtatttttttctgaatatattgtgactccagatacatatggatctttatgcgtcgaattaaatgggtctagttttcagcacggtggtagatatatagaggtggaggaatttatagatgctggaagacaagttagatggtgttctacatccaatcatatatctgaagatatacccgaagatatacacactgataaatttgtcatttatgatatatacacttttgacgctttcaagaataaacgattggtattcgtacaggtacctccgtcgttaggagatgatagctatttgactaatccgttattgtctccgtattatcgtaattcagtagccagacaaatggtcaatgatatgatttttaatcaagattcatttttaaaatatttattagaacatctgattagaagccactatagagtttctaaacatataacaatagttagatacaaggataccgaagaattaaatctaacgagaatatgttataatagagataagtttaaggcgtttgtattcgcttggtttaacggcgtttcggaaaatgaaaaggtactagatacgtataaaaaggtatctaatttgatataatgaattcagtgactgtatcacacgcgccatatactattacttatcacgatgattgggaaccagtaatgagtcaattggtagagttttataacgaagtagccagttggctgctacgagacgagacgtcgcctattcctgataagttctttatacagttgaaacaaccgcttagaaataaacgagtatgtgtgtgcggtatagatccgtatccgaaagatggaactggtgtaccgttcgaatcaccaaattttacaaaaaaatcaattaaggagatagcttcatctatatctagattaaccggagtaattgattataaaggttataaccttaatataatagacggggttataccctggaattattacttaagttgtaaattaggagaaacaaaaagtcacgcgatctactgggataagatttccaagttactgctgcagcatataactaaacacgttagtgttctttattgtttgggtaaaacagatttctcgaatatacgggcaaagttagaatccccggtaactaccatagtgggatatcatccagcggctagagaccgtcaattcgagaaagatcgatcatttgaaattatcaacgttttactggaattagacaacaaggtacctataaattgggctcaagggtttatttattaatgctttagtgaaattttaacttgtgttctaaatggatgcggctattagaggtaatgatgttatctttgttcttaagactataggtgtcccgtcagcgtgcagacaaaatgaagatccaagatttgtagaagcatttaaatgcgacgagttagaaagatatattgagaataatccagaatgtacactattcgaaagtcttagggatgaggaagcatactctatagtcagaattttcatggatgtagatttagacgcgtgtctagacgaaatagattatttaacggctattcaagattttattatcgaggtgtcaaactgtgtagctagattcgcgtttacagaatgcggcgccattcatgaaaatgtaataaaatccatgagatctaatttttcattgactaagtctacaaatagagataaaacaagttttcatattatctttttagacacgtataccactatggatacattgatagctatgaaacgaacactattagaattaagtagatcatctgaaaatccactaacaagatcgatagacactgccgtatataggagaaaaacaactcttcgggttgtaggtactaggaaaaatccaaattgcgacactattcatgtaatgcaaccacctcatgataatatagaagattacctattcacttacgtggatatgaacaacaatagttattacttttctctacaacgacgattggaggatttagttcctgataagttatgggaaccagggtttatttcattcgaagacgctataaaaagagtttcaaaaatattcattaattctataataaactttaatgatctcgatgaaaataattttacaacggtaccactggtcatagattacgtaacaccttgtgcattatgtaaaaaacgatcgcataaacatccgcatcaactatcgttggaaaatggtgctattagaatttacaaaactggtaatccacatagttgtaaagttaaaattgttccgttggatggtaataaactgtttaatattgcacaaagaattttagacactaactctgttttattaaccgaacgaggagaccatatagtttggattaataattcatggaaatttaacagcgaagaacccttgataacaaaactaattttgtcaataagacatcaactacctaaggaatattcaagcgaattactctgtccaagaaaacgaaagactgtagaagctaacatacgagacatgttagtagattcagtggagaccgatacctatccggataaacttccgtttaaaaatggtgtattggacctggtagacggaatgttttactctggagatgatgctaaaaaatatatgtgtactgtatcaaccggatttaaatttgacgatacaaagttcgtcgaagacagtccagaaatggaagagttaatgaatatcattaacgatatccaaccattaacggatgaaaataagaaaaatagagagctatatgaaaaaacattatctagttgtttatgcggtgctaccaaaggatgtttaacattcttttttggagaaactgcaactggaaagtcgacaaccaaacgtttgttaaagtctgctatcggtgacctgtttgttgagacgggtcaaacaattttaacagatgtattggataaaggacctaatccatttatcgctaacatgcatttgaaaagatctgtattctgtagcgaactacctgattttgcatgtagtgggtcaaagaaaatcagatctgataatattaaaaagttgacagaaccttgtgtcattggaagaccgtgtttctccaataaaattaataatagaaaccatgcgacaatcattatcgatactaattacaaacctgtttttgataggatagataacgcattaatgagaagaattgccgtcgtgcgattcagaacacacttttctcaaccttctggtagagaggctgctgaaaataatgacgcgtacgataaagtcaaactattagacgaggggttagatggtaaaatacaaaataatagatatagattcgcatttctatacttgttggtgaaatggtacagaaaatatcatgttcctattatgaaactatatcctacacccgaagagattcctgactttgcattctatctcaaaataggtactctgttggtatctagctctgtaaagcatattccattaatgacggacctctccaaaaagggatatatattgtacgataatgtggtcactcttccgttgactactttccaacagaaaatatccaagtattttaattctagactatttggacacgatatagagagcttcatcaatagacataagaaatttgccaatgttagtgatgaatatctgcaatatatattcatagaggatatttcatctccgtaaatatatgctcatatatttatagaagatatcacatatctaaatgaataccggaattatagatttatttgataatcatgttgatagtataccaactatattacctcatcagttagctactctagattatctagttagaactatcatagatgagaacagaagcgtgttattgttccatattatgggatcaggtaaaacaataatcgctttgttgttcgccttggtagcttccagatttaaaaaggtttacattctagtgccgaacatcaacatcttaaaaattttcaattataatatgggtgtagctatgaacttgtttaatgacgaattcatagctgagaatatctttattcattccacaacaagtttttattctcttaattataacgataacgtcattaattataacggattatctcgctacaataactctatttttatcgttgatgaggcacataatatctttgggaataatactggagaacttatgaccgtgataaaaaataaaaacaagattccttttctactattgtctggatctcccattactaacacacctaatactctgggtcatattatagatttaatgtccgaagagacgatagattttggtgaaattattagtcgtggtaagaaagtaattcagacacttcttaacgaacgcggtgtgaatgtacttaaggatttgcttaaaggaagaatatcatattacgaaatgcctgataaagatctaccaacgataagatatcacggacgtaagtttctagatactagagtagtatattgtcacatgtctaaacttcaagagagagattatatgattactagacgacagctatgttatcatgaaatgtttgataaaaatatgtataacgtgtcaatggcagtattgggacaacttaatctgatgaataatttagatactttatttcaggaacaggataaggaattgtacccaaatctgaaaataaataatggcgtgttatacggagaagaattggtaacgttaaacattagttccaaatttaaatactttattaatcggatacagacactcaacggaaaacattttatatacttttctaattctacatatggcggattggtaattaaatatatcatgctcagtaatggatattctgaatataatggttctcagggaactaatccacatatgataaacggcaaaccaaaaacatttgctatcgttactagtaaaatgaaatcgtctttagaggatctattagatgtgtataattctcctgaaaacgatgatggtagtcaattgatgtttttgttttcatcaaacattatgtccgaatcctatactctaaaagaggtaaggcatatttggtttatgactatcccagatactttttctcaatacaaccaaattcttggacgatctattagaaaattctcttacgccgatatttctgaaccagttaatgtatatcttttagccgccgtatattccgatttcaatgacgaagtgacgtcattaaacgattacacacaggatgaattaattaatgttttaccatttgacatcaaaaagctgttatatctaaaatttaagacgaaagaaacgaatagaatatactctattcttcaagagatgtctgaaacgtattctcttccaccacatccatcaattgtaaaagttttattgggagaattggtcagacaatttttttataataattctcgtattaagtataacgataccaagttacttaaaatggttacatcagttataaaaaataaagaagacgctaggaattacatagatgatattgtaaacggtcacttctttgtatcgaataaagtatttgataaatctcttttatacaaatacgaaaacgatattattacagtaccgtttagactttcctacgaaccatttgtttggggagttaactttcgtaaagaatataacgtggtatcttctccataaaactgatgagatatataaagaaataaatgtcgagctttgttaccaatggataccttccagttacattggagccacacgagctgacgttagacataaaaactaatattaggaatgccgtatataagacgtatctccatagagaaattagtggtaaaatggccaagaaaatagaaattcgtgaagacgtggaattacctctcggcgaaatagttaataattctgtagttataaacgttccgtgtgtaataacctacgcgtattatcacgttggggatatagttagaggaacattaaacatcgaagatgaatcaaatgtaactattcaatgtggagatttaatctgtaaactaagtagagattcgggtactgtatcatttagcgattcaaagtactgcttttttcgaaatggtaatgcgtatgacaatggcagcgaagtcactgccgttctaatggaggctcaacaaggtatcgaatctagttttgtttttctcgcgaatatcgtcgactcataagaaagagaatagcggtaagtataaacacgaatactatggcaataattgcgaatgttttattcccttcgatatatttttgataatatgaaaaacatgtctctctcaaatcggacaaccatctcataaaatagttatctcgcgctggcgaggtggttgccgctcgtataatctccccagaataatatacttgcgtgtcgtcgttcaatttatacggatttctatagttctctgttatataatgcggttttccatcatgattagacgacgacaatagtgttctaaatttagatagttgatcagaatgaatgtttattggcgttggaaaaattatccatgctgcgtctgcagagtggttgatagttgttcctagatatgtaaaataatccaacgtactaggtagcaaattgtctagataaaatactgaatcaaacggcgcagacgtattagcggatctaatggaatccaattgattgactatcttttgaaaatatacatttttatgatccgatacttgtaagaatatagaaataatgataagtccatcatcgtgtttttttgcctcttcataagaactatattttttcttattccaatgaacaagattaatctctccagagtatttgtacacatctatcaagtgattggatccataatcgtcttcctttccccaatatatatgtagtgatgataacacatattcattggggagaaaccctccacttatatatcctcctttaaaattaatccttactagttttccagtgttctggatagtggttggtttcgactcattataatgtatgtctaacggcttcaatcgcgcgttagaaattgcttttttagtttctatattaataggagatagttgttgcggcatagtaaaaatgaaatgataactgtttaaaaatagctcttagtatgggaattacaatggatgaggaagtgatatttgaaactcctagagaattaatatctattaaacgaataaaagatattccaagatcaaaagacacgcatgtgtttgctgcgtgtataacaagtgacggatatccgttaataggagctagaagaacttcattcgcgttccaggcgatattatctcaacaaaattcagattctatctttagagtatccactaaactattacggtttatgtactacaatgaactaagagaaatctttagacggttgagaaaaggttctatcaacaatatcgatcctcactttgaagagttaatattattgggtggtaaactagataaaaaggaatctattaaagattgtttaagaagagaattaaaagaggaaagtgatgaacgtataacagtaaaagaatttggaaatgtaattctaaaacttacaacacgggataaattatttaataaagtatatataggttattgcatggcgtgttttattaatcaatcgttggaggatttatcgcatactagtatttacaatgtagaaattagaaagattaaatcattaaatgattgtattaacgacgataaatacgaatatctgtcttatatttataatatgctagttaatagtaaatgaacttttacagatctagtataattagtcagattattaagtataatagacgactagctaagtctattatttgcaaggatgactctcaaattattacactcacggcattcgttaaccaatgcctatggtgtcataaacgagtatccgtgtccgctattttattaactactgataacaaaatattagtatgtaacagacgagatagttttctctattctgaaataattagaactagaaacatgtttagaaagaaacgattatttctgaattattccaattatttgtccaaacaggaaagaagtatactatcgtcatttttttctctatatccagctactgctgataatgatagaatagacgctatttatccgggtggcatacccaaaaggggtgagaatgttccagagtgtctatccagggaaatcaaagaagaagttaatatagacaattcttttgtattcatagacactcggttttttattcatggtatcatagaagataccattatcaacaaattttttgaggtaattttctttgtcggaagaatatctctaacgagtgatcaaattattgatacctttaaaagtaatcatgaaatcaaggatctaatatttttagatccgaattcaggtaatggactccaatacgaaattgcaaaatatgctctagatactgcaaaacttaaatgttacggccatagaggatgttattatgaatcattaaaaaaattaactgaggatgattgattagaaaatataaattaatttaccatcgtgtatttttataacgggattgtccggcatatcatgtagatagttaccgtctacatcgtatactcgaccatctacgcctttaaatcctctatttattgacattaatctattagaattggaataccaaatattagtaccctcaattagtttattggtaatattttttttagacgatagatcgatggctcttgaaaccaaggttttccaaccggactcattgtcgatcggtgagaagtctttttcattagcatgaatccattctaatgatgtatgtttaaacactctaaacaattggacaaattcttttgatttgctttgaatgatttcaaataggtcttcgtctacagtaggcataccattagataatctagccattataaagtgcacgtttacatatctacgttctggaggagtaagaacgtgactattgagacgaatggctcttcctactatctgacgaagagacgcctcgttccatgtcatatctaaaatgaagatatcattaattgagaaaaaactaataccctcgcctccactagaagagaatacgcatgttttaatgcattctccgttagtgtttgattcttggttaaactcagccaccgccttgattctagtatcttttgttctagatgagaactctatattagagataccaaagactttgaaatatagtaataagatttctattcctgactgattaacaaatggttcaaagactagacatttaccatgggatgctaatattcccaaacatacatctataaatttgacgcttttctcttttaattcagtaaatagagagatatcagccgcactagcatcccctttcaatagttctccctttttaaaggtatttaatgcggatttagaaaactctctatctcttaatgaatttttaaaatcattatatagtgttgctatctcttgcgcgtattcgccgggatcacgattttgtctttcaggaaagctatcgaacgtaaacgtagtagccatacgtctcagaattctaaatgatgatataccagtttttatttctgcgagtttagccttttgataaatctcttcttgcttttttgacatattaacgtatcgcattaatactgttttcttagcgaatgatgcagacccttctacgttatcaaaaatagaaaactcgttattaactatgtacgaacataggcctcctagtttggagactaattctttttcatcgactagacgtttattctcaaatagtgattggtgttgtaaggatcctggtcgtagtaagttaaccaacatggtgaattcttgcacactattgacgataggtgtagccgataaacaaatcatcttatggttttttaatgcgatggtcttggataaaaaattatatactgaacgagtaggacggatcttaccatcttctttgattaatgatttagaaatgaagttatgacattcatcaataatgacgcatattctactcttggaattaatagttttgatattagtaaaaaatttatttctaaaattttgatcatcgtaattaataaaaatacaatccttcgttatctctggagcgtatctgagtatagtgttcatccaaggatcttctatcaaagcctttttcaccaataagataatagcccaattcgtataaatatccttaagatgtttgagaatatatacagtagtcattgttttaccgacacccgtttcatggaacaataaaagagaatgcatactgtctaatcctaagaaaactcttgctacaaaatgttgataatccttgaggcgtactacgtccgaccccatcatttcaacgggcatattagtagttctgcgtaaggcataatcgatataggccgcgtgtgatttactcatttatgagtgataagtaataactatgttttaaaaatcacagcagtagtttaactagtcttctctgatgtttgttttcgatactttttgaatcagaagtcatactagaataaagcaacgagtgaacgtaatagagagcttcgtatactctattcgaaaactctaagaacttattaatgaattccgtatccactggattgtttaaaatactaaattgaacactgttcacatccttccaagaagaagacttagtgacggacttaacatgagacataaataaatccaaattttttttacaaacatcactagccaccataatggcgctatctttcaaccagctatcgcttacgcattttagcagtctaacatttttaaagagactacaatatattctcatagtatcgattacacctctaccgaataaagttggaagtttaataatacaatatttttcgtttacaaaatcaaataatggtcgaaacacgtcgaaggttaacatcttataatcgctaatgtatagattgttttcagtgagatgattattagatttaatagcatctcgttcacgtttgaacagtttattgcgtgcgctgaggtcggcaactacggcgtccgctttagtactcctcccataatactttacgctattaatctttaaaatttcatagactttatctagatcgctttctggtaacatgatatcatgtgtaaaaagttttaacatgtcggtcggcattctatttagatcattaactctagaaatctgaagaaagtaattagctccgtattccagactaggtaatgggcttttacctagagacagattaagttctggcaatgtttcataaaatggaagaaggacatgcgttccctcccggatattttttacaatttcatccatttacaactctatagtttgttttcattattattagttattatctcccataatcttggtaatacttaccccttgatcgtaagataccttatacaggtcattacatacaactaccaattgtttttgtacataatagattggatggttgacatccatggtggaataaactactcgaacagatagtttatctttccccctagatacattggccgtaatagttgtcggcctaaagaatatctttggtgtaaagttaaaagttagggttcttgttccattattgctttttgtcagtagttcattataaattctcgagatgggtccgttctctgaatatagaacatcatttccaaatctaacttctagtctagaaataatatcggtcttattcttaaaatctattcccttgatgaagggatcgttaatgaacaaatccttggcctttgattcggctgatctattatctccgttatagacgttacgttgactagtccaaagacttacaggaatagatgtatcgatgatgttgatactatgtgatatgtgagcaaagattgttctcttagtggcatcactatatgttccagtaatggcggaaaactttttagaaatgttatatataaaagaattttttcgtgttccaaacattagcagattagtatgaagataaacactcatattatcaggaacattatcaatttttacatacacatcagcatcttgaatagaaacgataccatcttctggaacctcaacaatctcggcagactccggataaccagtcggtggaccatcgctaacaataactagatcatccaacaatctactcacatatgcatctatataatctttttcatcttgtgagtaccctggatacgaaataaatttattatccgtatttccataataaggtttagtataaacagagagcgatgttgccgcatgaacttcagttacagtcgccgttggttggtttatttgacctattactctcctaggtttctctataaacgatggtttaatttgtacattcttaaccatatatccaataaagctcaattcaggaacataaacaaattctttgttgaacgtttcaaagtcgaacgaagagtcacgaataacgatatcggatactggattgaaggttaccgttacggtaatttttgaatcggatagtttaagactgctgaatgtatcttccacatcaaacggagttttaatataaacgtatactgtagatggttctttaatagtgtcattaggagttaggccaatagaaatatcattaagttcactagaatatccagagtgtttcaaagcaattgtattattgatacaattattatataattcttcgccctcaatttcccaaataacaccgttacacgaagagatagatacgtgattaatacatttatatccaacatatggtacgtaaccgaatcttcccatacctttaacttctggaagttccaaactcagaaccaaatgattaagcgcagtaatatactgatccctaatttcgaagctagcgatagcctgattgtctggaccatcgtttgtcataactccggatagagaaatatattgcggcatatataaagttggaatttgactatcgactgcgaagacattagaccgtttaatagagtcatccccaccgatcaaagaattaatgatagtattattcattttctatttaaaatggaaaaagcttacaataaactccgtagagaaatatctataatttgtgagttttccttaaagtaacagcttccgtaaacgccgtctttatctcttagtaagtttattgtatttataaccttttccttatcttcatagaatactaaaggcaacaaagaaatttttggttcttctctaagagctacgtgagacttaaccatagaagccaacgaatccctacatattttagaacagaaataccctacttcaccacccttgtatgtctcaatactaataggtctaaaaaccaaatcttgattacaaaaccaacacttatcaattacactatttgtcttaatagacacatctgccatagatttataatactttggtagtatacaagcgagtgcttcttctttagcgggcttaaagactgctttaggtgctgaaataaccacatctggaaggcttactcgcttagccatttaattacggaactatttttttatacttctaatgagcaagtagaaaacctctcatctacaaaaacatactcgtgtccataatcctctaccatagttacacgttttttagatctcatatgtgctaaaaagttttcccatactaattggttactattatttttcgtataatttttaacagtttgaggttttagatttttagttacagaagtgatatcgaatattttatccaaaaagaatgaataattaattgtcttagaaggagtgttttcttggcaaaagaataccaagtgcttaaatatttctactacttcattaatcttttctgtactcagattcagtttctcatcttttacttgattgattatttcaaagactaacttataatcctttttatttattctctcgttagccttaagaaaactagatacaaaatttgcatctacatcatccgtggatatttgatttttttccatgatatccaagagttccgagataatttctccagaacattgatgagacaataatctccgcaatacatttctcaaatgaataagtttattagacacgtggaagtttgactttttttgtacctttgtacatttttgaaataccgactcgcaaaaaatacaatattcatatccttgttcagatactataccgttgtgtctacaaccgctacataatcgtagattcatgttaacactctacgtatctcgtcgtccaatattttatataaaaacattttatttctagacgttgccagaaaatcctgtaatacttttagttttttgggctgtgaataaagtatcgccctaatatggttaccgtcctccgccaatatagtagttaaattatccgcacatgcaaaagaacaccgcttaggcggattcagtacaatgttatatttttcgtaccaactcatttaaatatcataatctaaaatagttctgtaatatgtctagcgctaatatattgatcataatcctgtgcataaattaagatacaacaatgtctcgaaatcatcgacatggcttcttccatagttagaagatcgtcgtcaaagttagcaacgtgattcatcaacatttgctgttttgaggcagcaaatactgaaccgtcgccattcaaccattcataaaaaccatcgtctgaatccattgataatttcttgtactggtttttgagagctcgcatcaatctagcatttctagctcccggattgaaaacagaaagaggatcgtacatccagggtccattttctgtaaatagaatcgtataatgtcccttcaagaagatatcagacgatccacaatcaaagaattggtctccgagtttgtaacaaactgcggactttaacctatacatgataccgtttagcataatttctggtgatacgtcaatcggagtatcatctattagagatctaaagccggtgtaacattctccaccaaacatattcttattctgacgtcgttctacataaaacatcattgctccattaacgataacaggggaatgaacagcactacccatcacattagttcccaatggatcaatgtgtgtaactccagaacatcttccatagcctatgttaggaggagcgaacaccactcttccactattgccatcgaatgccatagaataaatatccttggaattgatagaaatcggactgtcggatgttgtgatcatcttcataggattaacaacgatgtatggtgccgcctgaagtttcatatcgtaactgatgccgttcataggtctagccacagaaaccaacgtaggtctaaatccaactatagacaaaatagaagccaatatctgttcctcatctgtcataacttgagagcatccagtatgaataatcttcattagatggggatctaccgcatcatcatcgttacaataaaaaattcccattctaatgttcataattgcttttctaatcatggtatgcatgtttgctctctgaatctctgtggaaattagatctgatacacctgtaatcactatcggattatcctccgtaagacgattaaccaacaacatataattataagactttacttttctaaattcataaagttgctggattaggctataggtgtctccatgtacatacgcgttctcgagcgcaggaagtttaataccgaatagtgccatcagaataggatgaatatagtaattagtttctggttttctataaataaaagacaaatcttgtgaactagacatatcggtaaaatgcatggattggaatcgtgtagtcgacagaagaatatgatgattagatggagagtatattttatctaactctttgagttggtcaccgattctaggactagctcgagaatgaataagtactaaaggatgagtacatttcacagaaacactagcattgttcaatgtgctctttacatgggtaaggagttgaaatagctcgtttctatttgttctgacaatatttagtttattcataatgttaagcatatcctgaatagtaaagttagatgtgtcatacttgttagtagttagatatttagcaattgcattcccatcatttctcaatctcgtactccaatcatgcgtggatgctacttcgtcgatggaaaccatacaatcctttttgataggctgttgagattgattatttcctgcacgtttaggtttggtacgttgatttctagcccctgcggatataaagtcatcgtctacaatttgggacaatgaattgcatacactacaagacaaagatttatcagaagtgtgaatatgatcttcatctaccaaagaaagagtttgattagtataactagattttagtcctgcgttagatgttaaaaaaacatcgctattgaccacggcttccattatttatattcgtagtttttactcgaaagcgtgattttaatatccaatcttattacttttggaatcgttcaaaacctttgactagttgtagaatttgatctattgccctacgcgtatactcccttgcatcatatacgttcgtcaccagatcgtttgtttcggcctgaagttggtgcatatctttttcaacactcgacatgagatccttaagggccatatcgtctagattttgttgagatgctgctcctggatttggattttgttgtgctgttgtacatactgtaccaccagtaggtgtaggagtacatacagtggccacaataggaggttgaggaggtgtaaccgttggagtagtacaagaaatatttccatccgattgttgtgtacatgtagttgttggtaacgtctgagaaggttgggtagatggcggtgtcgtcgtcttttgatctttattaaatttagagataatatcctgaacagcattgctcggcgtcaacgctggaaggagtgaactcgccggcgcatcagtatctgcagacagccaatcaaaaagattagacatatcagatgatgtattagtttgttgtcgtggttttggtgtaggagcagtactactaggtagaagaataggagccgatgtaggtgtcggaaccggctgtggagttatatgaatagttggttgtagcggttggataggctgtctgctggcggccatcatattatctctagctagttgttctcgcaactgtctttgataatacgactcttgagactttagtcctatttcaatcgcttcatcctttttcgtatccggatccttttcttcagaataatagattgacgactttggtgtagaggattctgccagcccctgtgagaacttgttaaagaagtccatttaaggctttaaaattgaattgcgattataagattaaatggcagacacagacgatattatcgactatgaatccgatgatctcactgaatacgaggatgatgaagaagaggaagaagatggagagtcactagaaactagtgatatagatcccaaatcttcttataagattgtagaatcagcatccactcatatagaagatgcgcattccaatcttaaacatatagggaatcatatatctgctcttaaacgacgctatactagacgtataagtctatttgaaatagcgggtataatagcagaaagctataacttgcttcaacgaggaagattacctctagtttcagaattttctgacgaaacgatgaagcaaaatatgctacatgtaattatacaagagatagaggagggttcttgtcctatagtcatcgaaaagaacggagaattgttgtcggtaaacgattttgacaaagatggtctaaaattccatctagactatattatcaaaatttggaaacttcaaaaacgatattagaatttatacgaatatcgttctctaaatgtcacaatcaagtctcgcatgttcagcaatttattgtcgtactttatatcgtgttcattaacgatatcttgcaaaatagtaatgattctatcttccttcgatagatattcttcagagattattgtcttatattctttcttgttatcagatatgaatttgataagactttgaacattattgatacccgtctgtttaattttttctacagatattttagttttggcagattctatcgtatctgtcaatagacatccaacatcgacattcgacgtcaattgtctataaatcaacgtataaattttagaaataacattagcgaattgttgtgcattgatgtcgttattctgaaacagtatgattttaggtagcattttcttaacaaagagaacgtatttattgttactcagttgaacagatgatatatccagattactaacgcatctgattccgtataccaaactttcagaagaaatggtatacaattgtttgtattcattcaatgtctctttttcagaaattagtttagagtcgaatactgcaataattttcaagagatagttttcatcagataagattttatttagtgtagatatgataaaactattgttttgttggagaacttgatacgccgcgttctctgtagtcgacgctctcaaatgggaaacgatctccattatttttttggaatcggatactatatcttcggtatcttgacgcagtctagtatacatagagttaagagagattagagtttgtacattaagcaacatgtctctaaatgtggctacaaacttttccttttccacatcatctagtttattatataccgatttcacaacggcaccagatttaaggaaccagaatgaaaaactctgataactacaatatttcatcatagttacgattttatcatcttctatagttggtgtaatagcgcatacctttttctccaagactggaaccaacgtcataaaaatgtttaaatcaaaatccatatcaacatctgatgcgctaagaccagtctcgcgttcaagattatctttactaatggtgacgaactcatcgtatagaactctaagtttgtccattatttatttacagatttagttgtttaatttatttgtgctcttccagagttgggatagtatttttctaacgtcggtattatattattaggatctacgttcatatgtatcataatattaatcatccacgttttgataaatctatctttagcttctgaaataacgtatttaaacaaaggagaaaaatatttagctacggcatcagacgcaataacattttttgtaaatgtaacgtatttagacgacagatcttcgttaaaaagttttccatctatgtagaatccatcagttgttaacaccattcccgcgtcagattgaataggagtttgaatagtttgttttggaaatagatccttcaataacttatagttgggtgggaaaaaatcgattttatcactagactctttcttttttactatcattacctcatgaactatttcttgaatgagtatatgtattttctttcctatatcggacgcgttcattggaaaatataccatgtcgttaactataagaatatttttatcctcgtttacaaactgaataatatcagatgtagttcgtaaacgaactatatcatcaccagcacaacatctaactatatgatatccactagtttcctttagtcgtttattatcttgttccatattagcagtcattccatcatttaagaaggcgtcaaagataatagggagaaatgacattttggattctgttacaactttaccaaaattaaggatatacggacttactatctttttctcaacgtcaatttgatgaacacacgatgaaaatgtacttcgatgagattgatcatgtagaaaacaacaagggatacaatatttccgcatatcatgaaatatattaagaaatcccaccttattatatttccccaaaggatccatgcacgtaaacattatgccgttatcattaataaagacttctttctcatcggatctgtaaaagttgttactgatttttttcattccaggatctagataattaataatgatgggttttctattcttattctttgtattttggcatatcctagaccagtaaacagtttccactttggtaaaatcagcagacttttgaacgctattaaacatggcattaatggcaataactaaaaatgtaaaatatttttctatgttaggaatatggtttttcactttaatagatatatggtttttggccaaaatgatagatatttttttatccgaggatagtaaaatattattagtcgccgtctctataaaaatgaagctagtctcgatatccaattttattctagaattgataggagtcgccaaatgtaccttatacgttatatctcccttgatgcgttccatttgtgtatctatatcggacacaagatctgtaaatagttttacgttattaatcatcacggtatcgccgtcgctagataatgctaatgtaccatccaagtcccaaatggagagatttaactgttcatcgtttagaataaaatgattaccggtcatattaataaagtgttcatcgtatctagataacaacgacttataattaatgtccaagtcttgaactcgctgaatgatcttttttaacccagttagttttagattggtacgaaatatattgttaaactttgattctacagtaatgtccaaatctagttgtggaaatacttccatcaacattgtttcaaacttgataatattattatctacatcttcatacgatccaaattccggaatagatgtatcacatgctcttgccacccagataaccaaaaagtcacacgctccaggatatacattgtataaaaagctatcgtttttaagtagggtttttttctgcgtgtatacgaagggattaaaaatagtattatcaacgtaactatattccaaattattcttatgagaatagataataatatcgtccttaatatctaacaaatttcctaaatatccctttaattgagtcattcgaagcgtcaatagaatatgtctcttaactatttccggctgttgtatatttaaatgacttcgtaaaaaataatatatgggcgacttctcatctatgtaatcatatggagtgagatatagggctcgttctacctcctgccccttacccacctgtaataccaattgcggacttactatatatcgcatatttatatcgtggggtaaagtgaaaatctactaccgatgatgtaagtcttacaatgttcgaaccagtaccagatcttaatttggaggcctccgtagaactaggggaggtaaatatagatcaaacaacacctatgataaaggaaaatagcggttttatatcccgtagtagacgtctattcgcccatagatctaaggatgatgagagaaaactagcactacgattctttttacaaagactttattttttagatcatagagagattcattatttgttcagatgcgttgacgctgtaaaagacgtcactattaccaaaaaaaataacattatcgtggcgccttatatagcacttttaactatcgcatcaaaaggatgcaaacttacagaaacaatgattgaagcattctttccagaactatataatgaacatagtaagaaatttaaattcaactctcaagtatccatcatccaagaaaaactcggataccagtttggaaactatcacgtttatgattttgaaccgtattactctacagtagctctggctattcgagatgaacattcatctggcatttttaatatccgtcaagagagttatctggtaagttcattatctgaaataacatatagattttatctaattaatctaaaatctgatcttgttcaatggagtgctagtacgggcgctgtaattaatcaaatggtaaatactgtattgattacagtgtatgaaaagttacaactggtcatagaaaatgattcacaatttacatgttcattggctgtggaatcagaacttccaataaaattacttaaagatagaaatgaattatttacaaaattcatcaacgagttaaaaaagaccagttcattcaagataagcaaacgcgataaggatacgctactaaaatattttacttaggactggagttagaatttatagacgactcatttcgtttatcattattactaccatcattattagtattcttcttgttatcttgttcagaaatatacagcaatgctatgcctaatactaaatacattatcatgcttgcaatggctctaacaacgacgaaccaaaatgaatttggtcgtagcttttgttcacaaaaatacataaagaaatgtctacataaatctatggcgccattggctacttgaaatagcgccagtcctcctacagattttaatatagctgtataacatgacatttattcatcatcaaaagagacagagtcaccatctgtcatatttagattttttttcatgtgttcaaagtatcctctactcatttcattataatagtttatcatacttagaattttaggacggatcaatgagtaagacttgactagatcgtcagtagtaatttgtgcatcgtctattctgcatccgcttcgtcgaataatgtatagcatcgctttgagattctccatagctatcaagtctttatacaatgacatggaaatatctgtgaatactttatacttctccaacatcgatgccttaacatcatcgcctactttagcattgaaaatacgttctattgtgtagatggatgtagcaagatttttaaacaacaatgccatcttacacgatgattgcctcaagtctccaatcgtttgtttagaacgattagctacagagttcaacgcttggctgactagcatattattatctttagaaattgtattcttcaatgaagcgtttatcatatctgtgatttcgttagtcatattacagtctgactgggttgtaatgttatccaacatatcacctatggatacggtacacgtaccagcatttgtaataatcctatctaagatgttgtatggcattgcgcagaaaatatcttctcctgtaatatctccactctcgataaatctactcagattattcttaaatgccttattctctggagaaaagatatcagtgtccatcatttcattaatagtatacgcagaaaagataccacgagtatcaattctatccaagatacttatcggttccgagtcacagataatggtttcctctccttcgggagatcctgcatagaaatatctaggacaatagtttctatactgtctgtaactctgataatctctaaagtcactaactgataccatgaaattgagaagatcaaacgctgaagtaatcaatttttctgcctcgtttttactacaactagttttcatcaatgtagtgacgatgtattgtttagttactcttggtctaatactgatgatagagatattattacttcccataatggatcttctagtagtcaccttaaagcccattgatgcaaatagcagatagataaagtcttggtatgactcctttctaatatagtacggactacctttgtcacccaactttatacccacataagccataacaacctctttaatagccgtttcatgaggtttatcagccatgagcctgagtagttggaagaatctcatgaatcccgtctcagaaagtcctatatgcatgatagatttatctttcctgggaaactctcgtatagtcatagatgaaatactcttcaaagtttctgaaataagattagtaacagtcttacctccgactactctgggtaacaaacatactctaataggtgttttctctgcggagataatatcagaaaggatagagcaataagtagtattattgtgattataaagaccgaatacataacaggtagaatttataaacatcatgtcctgaaggtttttagacttgtattcctcgtaatccataccgtcccaaaacatggatttggtaactttgatagccgtagatctttgttccttcgccaacaggttaaagaaattaataaagaatttgttgtttctatttatgtccacaaattgcacgtttggaagcgtaactgttacgttcactgcagcattttgaggatcgcgagtatgaagtacgatgttattgtttactggtatatctggaaagaaatctaccagtctaggaataagagattgatatcgcatagaaatagtaaagtttataatctcatcatcgaagagcattttgttaccattgtaataaatatccactctgtcatatgtataaatgaagtactgttcaaacatgatgagatgtttatatgttggcatagtagtgagatcgacgtttggtaatggcaatgtattaagattaactccataatgtctagcagcatctgcgatgttataagtgtcgtcaaagcggggtcgatcttgtgctgttatatattgtctaacacctataagattatcaaaatcttgtctgcttaatacaccgttaacaatttttgccttgaattcttttattggtgcattaataacatccttatagaggatgttaaacaaataagtgttatcaaagttaagatctggatatttcttttctgctagaacatccattgagtcggagccatctggtttaatataaccaccgataaatctagctctgtattctgtatccgtcaatctaatattaagaaggtgttgagtgaaaggtggaagatcgtaaaagctgtgagtattaatgataggattagtttccgaactaatgttaattggggtattaataatatctatatttccagcgttaagtgtaacattaaacagttttaattcacgtgacgtggtatcaattaaataattaatgcccaatttggatatagcagcctgaagctcatcttgtttagttacggatcctaatgagttattaagcaatatatcgaacggatgaacgaaggttgttttaagttggtcacatactttgtaatctagacatagatgcggaagaacggtagaaactatacgaaataaatattcagagtcctctaattgatcaagagtaactattgacttaataggcatcatttatttagtattaaatgacgaccgtaccagtgacggatatacaaaacgatttaattacagagttttcagaagataattatccatctaacaaaaattatgaaataactcttcgtcaaatgtctattctaactcacgttaacaacgtggtagatagagaacataatgccgccgtagtgtcatctccagaggaaatatcctcacaacttaatgaagatctatttccagatgatgattcaccggccactattatcgaacgagtacaacctcatactactattattgacgatactccacctcctacttttcgtagagagttattaatatcggaacaacgtcaacaacgagaaaaaagatttaatattacagtatcgaaaaatgctgaagcaataatggaatctagatctatgataacttctatgccaacacaaacaccatccttgggagtagtttatgataaagataaaagaattcagatgttagaggatgaagtggttaatcttagaaatcaacgatctaatacaaaatcatctgataatttagataattttaccaaaatactatttggtaagactccgtataaatcaacagaagttaataagcgtatagccatcgttaattatgcaaatttgaacgggtcccccttatcagttgaggacttggatgtttgttcggaggatgaaatagatagaatctataaaacgattaaacaatatcacgaaagtagaaaacgaaaaattatcgtcactaacgtgattattattgtcataaacattatcgagcaggcattgctaaaactcggatttgaagaaatcaaaggactgagtaccgatatcacttcagaaattatcgatgtggagatcggagatgactgcgatgctgtagcatctaaactaggaatcggtaacagtccggttcttaatattgtattgtttatactcaagatattcgttaaacgaattaaaattatttaatttaatacattcccatatccagacaacaatcgtctggattaatctgttcctgtcgtctcataccggacgacatattaatctttttattagtaggcatctttttagatggtttctttttcccagcattaactgagtcgatacctagaagatcgtgattgatctctccgaccattccacgaacttctaattggccgtctctgacggtaccataaactattttaccagcattagtaacagcttggacaatctgaccatccattgcgttgaatgatgtagttgctgttgttctacgtttaggagcaccagaagtatttttggagcccttggaggctgatgtagaagaagacgaggattttgatttacatgtaatacattttgtactctttgattttgtatcacatgcgccggcagtcacatttgtttgagaattaagattattgttgcctcctttgacggctgcatctccaccgatttgcgctagtagatttttaagctgtggtgtaatcttattaactgtttcgatataatcatcgtaactgcttctaacggctaaattttttttatccgccatttagaagctaaaaatatttttatttatgcagaagatttaactagattatacaatgaactaatatgatccttttccagattatttacaaacttggtattttttggttctggaggaggcgaatttaaattcggacttggattcggattttgtgagttcttgatcttattatacatcgagtataggatggcgacggtaactgctacgcaaataccgatcaacaaaagaataccaatcatttattgacaataacttcactattgatcaagtatgcaatatatcatcttttcactaaataagtagtaataatgattcaacaatgtcgagatatatggacgataataatttagttcatggaaatatcgctatgattggtatgaatgactccgctaactctgtggggtgcgcagtgctttccccacatagaataaattagcattccgactgtgataataataccaagtataaacgccataatactcaatactttccatgtacgagtgggactggtagacttactaaagtcaataaaggcgaagatacacgaaagaatcaaaagaatgattccagcgattagcacgccggaaaaataatttccaatcataagcatcatgtccatttaactaataaaaattttaaatcgccgaatgaacaaagtggaatataaaccatataaaaacaatagtttgtactgcaaaaataatatctatttttgttttcgaagatatggtaaaattaaatagtagtacacagcatgttataactaacagcagcaacggctcgtaattacttatcatttactagacgaaaaggtggtgggatattttcttgctcaaataatacgaatatatcacccatccattttatgcgatgtttatatactctaatctttaatagatctatagacgacgggtttaccaacaatatagattttatcgattcatctaatttaaacccttccttaaacgtgaatgatctattatctggcataacgatgactctacctgatgaatcggacaatgtactgggccatgtagaataaattatcaacgaattatcgtctacgaacatttatatcatttgttttaattttaggacgcgaataaatggatataaaatagaaaataacagatattacaaccaatgttatggccgcgcccaaccaggtaggcagttttattttatcttttactacaggttctcctggatgtacgtcaccaacggcggacgtagttctagtacaattagacgtaagttctgcttgggaattttttaacgctaaagagttaacgttaatcgtgcacccaacgtatttacatctagttctttgaacatcttgattataatataaccattttctatctctagattcgtcggtgcactcatgtaaccaacataccctaggtcctaaatatttatctccggaattagattttggataattcgcgcaccaacaatttctatttcctttatgatcgttacaaaagacgtataatgccgtatccccaaaagtaaaataatcaggacgaataattctaataaactcagaacaatatctcgcatccatatgtttggagcaaatatcggaataagtagacatagccggtttccgttttgcacgtaaccattctaaacaattggggtttccaggatcgtttctacaaaatccagtcatgaaatcatcacaatgttctgtcttgtaattattattaaatatttttggacagtgtttggtatttgtcttagaacaacattttgccacgctatcactatcgcccaggagataatccttttttataaaatgacatcgttgcccggatgctatataatcagtggcgtgttttaaatccttaatatattcaggagttacctcgttctgataatagattaatgatccaggacgaaatttgaaagaactacatggttctccatgaattaatacatattgtttagcaaattcaggaactataaaactactacaatgatctatcgacataccatctatcaaacaaaacttgggtttaatttctcccggagatgtttcataatagtacgtataactttcttctgcaaacttaacagctctattatattcaggataattaaaacctaattccatatatttgtctcgtatatctgctattcctggtgctattttaattctattaagagtaacggctgcccccattcttaataatcgtcagtatttaaactgttaaatgttggtatatcaacatctaccttatttcccgcagtataaggtttgttgcaggtatactgttcaggaatggttacatttatacttcttctatagtcctgtctttcgatgttcatcacatatgcaaagaacagaataaacaaaataatgtaagaaataatattaaatatctgtgaattcgtaaatacattgattgccataataattacagcagctacaatacatacaatagacattcccacagtgttgccattacctccacgatacatttgagttactaagcaataggtaataactaagctagtaagaggcaatagaaaagatgagataaatatcatcaatatagagattagaggagggctatatagagccaagacgaacaaaatcaaaccgagtaacgttctaacatcattatttttgaagattcccaaataatcattcattcctccataatcgttttgcattatacctccatctttaggcataaacgattgctgctgttcctctgtaaataaatctttatcaagcactccagcacccgcagagaagtcgtcaagcatattgtaatatcttaaataactcatttatatattaaaaaatgtcactattaaagatggagtataatctttatgccgaactaaaaaaaatgacttgtggtcaacccctaagtctttttaacgaagacggggatttcgtagaagttgaaccgggatcatcctttaagtttctgatacctaagggattttacgcctctccttccgtaaagacgagtctagtattcgagacattaacaacgaccgataataaaatcactagtatcaatccaacaaatgcgccaaagttatatcctcttcaacgcaaagtcgtatctgaagtagtttctaatatgaggaaaatgatcgaatcaaaacgtcctctatacattactcttcacttggcgtgtggatttggtaagactattaccacgtgttatcttatggctacacacggtagaaaaaccgtcatttgcgtacccaataaaatgttaatacatcaatggaagacacaggtagaggcagtcggattggaacataagatatctatagatggagtaagtagtctattaaaggaactaaagactcaaagtccggatgtattaatagtagtcagtagacatctgacaaacgatgccttttgtaaatatatcaataagcattatgatttgttcatcttggatgaatcacatacgtataatctgatgaacaatacagcagttacaagatttttagcgtattatcctccgatgatgtgttattttttaactgctacacctagaccagctaaccgaatttattgtaacagtattattaatattgccaagttatccgatctaaaaaaaactatctatgcggtagatagtttttttgagccatattccacagacaatattagacatatggtaaaacgactagatggaccatctaataaatatcatatatatactgagaagttattatctgtagacgagcctagaaatcaacttattcttgataccctggtagaagaattcaagtcaggaactattaatcgaattttagttattactaaactacgtgaacatatggtattcttctacaaacgattattagattttttcggatcagaggttgtatttataggagacgcccaaaatagacgtactccagatatggtcaaatcaatcaaggaactaaatagatttatattcgtatccaccttattttattccggtactggtttagatattcctagtttggattcgttgttcatttgctcggcagtaatcaacaatatgcaaatagagcaattactagggagggtatgtcgagaaacagaactattagataggacggtatatgtatttcctaacacatccatcaaagaaataaagtacatgataggaaatttcatgcaacgaattattagtctgtctgtagataaactaggatttaaacaaaaaagttatcggaaacatcaagaatccgatcccacttctgtatgtacaacatcctccagagaagaacgtgtattaaatagaatatttaactcgcaaaatcgttaagaagtttaagcgacgatccgcatgctgcgcaggccagtgtattacccctcatagtattaatataatccaatgatacttttgtgatgtcggaaatcttaaccaatttagactgacaggcagaacacgtcatgcaatcatcatcgtcatcgataactgtagtcttgggcttctttttgcggctcttcattccggaacgcacattggtgctatccatttaggtagtaaaaaataagtcagaatatgccctatagcacgatcgtgcaaaacctggtatatcgtctctatctttatcacaatatagtgtatcgacatttttattattattgacctcgtttatcttggaacatggaatgggaacatttttgttatcaacggccatctttgccttaattccagatgttgtaaaattataactaaacagtctatcatcgacacaaatgaaattcttgtttagacgtttgtagtttacgtatgcggctcgttcgcgtctcattttttcagatattgcaggtactataatattaaaaataagaatgaaataacataggattaaaaataaagttatcatgacttctagcgctgatttaactaacttaaaagaattacttagtctgtacaaaagtttgaaattttcagattctgcggctatagaaaagtataattctttggtagaatggggaacatctacttactggaaaataggcgtgcaaaaggtagctaatgtcgagacgtcaatatctgattattatgatgaggtaaaaaataaaccgtttaatattgatccgggatattacattttcttaccggtatattttggaagcgtctttatttattcgaagggtaaaaatatggtagaacttggatctggaaactcttttcaaataccagatgatatgcgaagtgcgtgtaacaaagtattagacagcgataacggaatagactttctgagatttgttttgttaaacaatagatggataatggaagatgctatatcaaaatatcagtctccagttaatatatttaaactagctagtgagtacggattaaacatacccaaatatttagaaattgaaatagaggaagacacattatttgacgacgagttatactctattatagaacgctctttcgatgataaatttccaaaaatatccatatcgtatattaagttgggagaacttagacggcaagttgtagactttttcaaattctcgttcatgtatattgagtccatcaaggtagatcgtataggagataatatttttattcctagcgttataacaaaatcaggaaaaaagatattagtaaaagatgtagaccatttaatacgatccaaggttagagaacatacatttgtaaaagtaaaaaagaaaaacacattttccattttatacgactatgatggaaacggaacagaaactagaggagaagtaataaaacgaattatagacactataggacgagactattatgttaacggaaagtatttctctaaggttggtagtgcaggcttaaagcaattgactaataaattagatattaatgagtgcgcaactgtcgatgagttagttgatgagattaataaatccggaactgtaaaacgaaaaataaaaaaccaatcagcatttgatttaagcagagaatgtttgggatatccagaagcggattttataacgttagttaataacatgcggttcaaaatagaaaattgtaaggttgtaaatttcaatattgaaaatactaattgtttaaataacccgagtattgaaactatatatggaaactttaaccagttcgtctcaatctttaatatcgtcaccgatgtcaaaaaaagattattcgagtgaaataatatgcgcctttgatataggtgcaaaaaatcctgccagaactgttttagaagtcaaggataactccgttagggtattggatatatcaaaattagactggagttctgattgggaaaggcgcatagctaaagatttgtcacaatatgaatacactacagttcttctagaacgtcagcctagaaggtcgccgtacgtcaaatttatctattttattaaaggctttttatatcatacatcggctgccaaagttatttgcgtctcgcctgtcatgtctggtaattcatatagagatcgaaaaaagagatcggtcgaagcatttcttgattggatggacacattcggattgcgagactccgttccggatagacgcaaattagacgatgtagcggatagtttcaatttggctatgagatacgtattagataaatggaatactaattatacaccttataataggtgtaaatctagaaattacataaaaaaaatgtaataacgttagtaacgccattatggataatctatttacctttctacatgaaatagaagatagatatgccagaactatttttaactttcatctaataagttgcgatgaaataggagatatatatggtcttatgaaagaacgcatttcctcagaggatatgtttgataatatagtgtataataaagatatacatcatgccattaagaaactagtgtattgcgacatccaacttactaaacacattattaatcagaatacgtatccggtatttaacgattcttcacaagtgaaatgttgtcattatttcgacataaactcagataatagcaatattagctctcgtacagtagagatatttgagagggaaaagtcatctcttgtatcatatattaaaactaccaataagaagagaaaggtcaattacggcgaaataaagaaaactgttcatggaggcactaatgcaaattacttttccggtaaaaagtctgacgagtatctgagtactacagttagatccaacattaatcaaccttggatcaaaaccatctctaagaggatgagagttgatatcattaatcactctatagtaacgcgtggaaaaagctctatattacaaactatagaaattatttttactaatagaacatgtgtgaaaatattcaaggattctactatgcacattattctatccaaggacaaggatgaaaaggggtgtatacacatgattgacaaattattctatgtctattataatttatttctgttgttcgaggatatcatccaaaacgagtactttaaagaagtagctaatgttgtaaaccacgtacttacggctacggcattagatgagaaattattcctaattaagaaaatggctgaacacgatgtttatggagttagcaatttcaaaatagggatgtttaacctgacatttattaagtcgttggatcataccgttttcccctctctgttagatgaggatagcaaaataaagttttttaaggggaaaaagctcaatattgtagcattacgatctctggaggattgtataaattacgtgactaaatccgagaatatgatagaaatgatgaaggaaagatcgactattttaaatagcatagatatagaaacggaatcggtagatcgtctaaaagaattgcttctaaaatgaaaaaaaacactgattcagaaatggatcaacgactcggatataagtttttggtgcctgatcctaaagccggagttttttatagaccgttacatttccaatatgtatcgtattctaattttatattgcatcgattgcatgaaatcttgaccgtcaagcggccactcttatcgtttaagaataatacagaacgaattatgatagaaattagcaatgttaaagtgactcctccagattactcacctataatcgcgagtattaaaggtaagagttatgacgcattagccacgttcactgtaaatatctttaaagaggtaatgaccaaagagggtatatccatcactaaaataagtagttatgagggaaaagattctcatttgataaaaattccgctactaataggatacgggaataaaaatccacttgatacagccaagtatcttgttcctaatgtcataggtggagtctttatcaataaacaatctgtcgaaaaagtaggaattaatctagtagaaaagattacaacatggccaaaatttagggttgttaagccaaactcattcactttctcgttttcctccgtatcccctcctaatgtattaccgacaagatatcgccattacaagatatctctggatatatcacaattggaagcgtcgaatatatcatcgacaaagacatttataacggtcaatattgttttgctgtctcaatatttatctagagtgagtctagaattcattagacgtagcttatcatacgatatgcctccagaagttgtctatctagtaaacgcgataatagatagtgctaaacgaattactgaatctattactgactttaatattgatacatacattaatgacctggtggaagctgaacacattaaacaaaaatctcagttaacgatcaacgagttcaaatatgaaatgctgcataactttttacctcatatgaactatacacccgatcaactaaagggattttatatgatatctttactaagaaagtttctctactgtatctaccacacttctagatatccagatagagattcgatggtttgtcatcgtatactaacatacggcaaatattttgagacgttggcacatgatgaattagagaattacataggcaacatccgaaacgatatcatgaacaatcacaagaacagaggcacttacgcggtaaacattcatgtactaacaactcctggacttaatcatgcattttctagtctattgagtggaaagttcaaaaagtcagacggtagttatcgaacacatcctcactattcatggatgcagaatatttctattcctaggagtgttggattttatccggatcaagtaaagatttcaaagatgttttctgtcagaaaataccatccaagtcaatatctttacttttgttcatcagacgttccggaaagaggtcctcaggtaggtttagtatctcaattgtctgtcttgagttccattacaaatatactaacgtctgagtatttggatttggaaaagaaaatttgtgagtatatcagatcatattataaagatgatataagttactttgaaacaggatttccaatcactatagaaaatgctctagtcgcatctcttaatccaaatatgatatgtgattttgtaactgactttagacgtagaaaacggatgggattcttcggtaacttggaggtaggtattactttagttagggatcacatgaatgaaattcgcattaatattggagcgggaagattagtcagaccattcttggttgtggataacggagagctcatgatggatgtgtgtccggagttagaaagcagattagacgacatgacattctctgacattcagaaagagtttccgcatgtcatcgaaatggtagatatagaacaatttacttttagtaacgtatgtgaatcggttcaaaaatttagaatgatgtcaaaggatgaaagaaagcaatacgatttatgtgactttcctgccgaatttagagatggatatgtggcatcttcattagtgggaatcaatcacaattctggacccagagctattcttggatgtgctcaagctaaacaagctatctcttgtctgagctcggatatacgaaataaaatagacaatggaattcatttgatgtatccagagaggccaatcgtgattagtaaggctttagaaacttcaaagattgcggctaattgcttcggccaacatgttactatagcattaatgtcgtacaaaggtatcaatcaagaggatggaattatcatcaaaaaacaatttattcagagaggcggtctcgatattgttacagccaagaaacatcaagtagaaattccattggaaaactttaataacaaagaaagagataggtctaacgcctattcaaaattagaaagtaatggattagttagactgaatgctttcttggaatccggagacgctatggcacgaaatatctcatcaagaactcttgaagatgattttgctagagataatcagattagcttcgatgtttccgagaaatataccgatatgtacaaatctcgcgttgaacgagtacaagtagaacttactgacaaagttaaggtacgagtattaaccatgaaagaaagaagacccattctaggagacaaatttaccactagaacgagtcaaaagggaacagtcgcgtatgtcgcggatgaaacggaacttccatacgacgaaaatggtatcacaccagatgtcattattaattctacatccatcttctctagaaaaactatatctatgttgatagaggttattttaacagccgcatattctgctaagccgtacaacaataagggagaaaaccgacctgtctgttttcctagtagtaacgaaacatccatcgatacatatatgcaattcgctaaacaatgttatgagcattcaaatccgaaattgtctgatgaagaattatcggataaaatcttttgtgaaaagattctctatgatcctgaaacggataagccttatgcatccaaagtattttttggaccaatttattacttgcgtctgagacatttaactcaggacaaggcaaccgttagatgtagaggtaaaaagacgaagctcattagacaggcgaatgagggacgaaaacgtggaggaggtatcaagttcggagaaatggagagagactgtttaatagcgcatggtgcagccaatactattacagaagttttgaaagattcggaagaagattatcaagatgtgtatgtttgtgaaaattgtggagacatagcagcacaaatcaagggtattaatacatgtcttagatgttcaaaacttaatctctctcctctcttaacaaaaattgataccacacacgtatctaaagtatttcttactcaaatgaacgccagaggcgtaaaagtcaaattagatttcgaacgaagacctccttcgttttataaaccattagataaagttgatctcaaaccgtcttttctggtctaatattgtttagtagatacttatcaacatcatcaagattatcaagattatcaagattatcaagataagctaattcactaaacacattatcgatttcggtatcgttactcgcagaataaagttcgttatgatcctgatattcggaaatctgtggagtttcaggttttggtggatgtgtaacagctacttgagataccgaagtctgatattcagaaagctgtggatgttctggttcggcatccaccgatggtgttacaccactactaattggttcagtaacgtctgtggacgatggaggcaccacttctacaggttctggttctttatcctcagtcatcaacggagctacttcaatgcgaggaaatgtataatttggtaatggtttctcatgtggatctgaagaagaggtaagatatctactagaaagataccgatcacgttctagttctcttttgtagaacttaactttttctttctcagcatctagttgatattccaacctcttcacgttactacgttcagatttcaattcacgttcgcatgggttacctccgcagtttttacgagcgatttcacgttcagccttcatgcgtctctccctctctctatcgagtttatcagagcagtctttctgaaggcgatcgaactccataaatttctccaacgctttgattgtttccatagatttccgaagttcagcttttaggactgtgattctttttctttcgaattcacagctggatgtacaaccgtttccattaccgccatctctaagtttcttttctagatcggcaacatttcatccccatgccttttacattcctcgagtctactgtcgtcgaaatatcgttccagctccttttcgacatcaataactttagcacgttgtctctcaagctctcttttgtagttatctgattccctggcacgtttaagatcttcatgcaattgagtcagctcttaacacaatctcttgcttcttcgtcatagtacgcgcaatcactgtgagatccattgttaccacgtctacactcggcgagctcgcgtttaagagattcaatttcccgtttgtattggtccatgtttccattgctaccaccattagatttacaggctgctagttgtcgttcgagatcagaaatacgggttttcttggaattgatttcgtcgatgtacttggcatcgaaacacttattaagttctttttccaattctacgattttatttctttcgcgagtcaattccctcctgtagtaactatctgttttgtcagattcacgctctctacgtagactttcttgcaagttactaatttgttccctagcacgtccgagtttagttttatatgctgaatagagttctgattcatcctttgagcagatctctagcgatcgtttaagattcctgattctagtctttagcctatttacctcctcagaagatgttccgttaccgttgcgtttacactcgttaagctgtctatcaagatccatgattctatctctaagacgttgcatctctctttccatatcagcattgctttcattattacgtctgcagtcactcaactgtctttcaatatctgagattctatctctaagacgtcgcatctctctctgtttcggcattggtttcattattacgtctacagtcgttcaactgtctttcaagatctgatattctagattggagtctgctaatctctgtagcattttcacggcattcactcagttgtctttcaagatctgaaattttagattggagtctgctaatctctgtaagatttcctcctccgctctcgatgcagtcggtcaacttattctctagttctctaatacgcgaacgcagtgcatcaacttcttgcgtgtcttcctggttgcgtgtacattcatcgagtctagattcgagatctctaacgcgtcgtcgttcttcctcaagttctctgcgtactacagaaagcgtgtccctatcttgttgatatttagcaatttctgattctagagtactgattttgcttacgtagttactaatatttgtcttggccttatcaagatcctccttgtatttgtcgcattccttgatatccctacgaagtctggacagttcccattcgacattacgacgtttatcgatttcagctcggagatcgtcatcgcgttgttttagccacatacgactgagttcaagttctcgttgacaagatccatctacttttccattcctaatagtatccagttccttttctagttctgaacgcatttctcgttccctatcaagcgattctctcaattctcggatagtcttcttatcaatttctaataaatctgaaccatcatctgtcccattttgaatatccctgtgttctttgatctcttttgtaagtcggtcgattctttcggttttataaacagaatccctttccaaagtcctaatcttactgagtttatcactaagttctgcattcaattcggtgagttttctcttggcttcttccaactctgttttaaactctccactatttccgcattcttcctcgcatttatctaaccattcaattagtttattaataactagttggtaatcagcgattcctatagccgttcttgtaattgtgggaacataattaggatcttctaatggattgtatggcttgatagcatcatctttatcattattagggggatggacaaccttaattggttggtcctcatctcctccagtagcgtgtggttcttcaatagccgtgttagtaataggcttaggcaaatgcttgtcgtacgcgggcacttcctcatccatcaagtatttataatcgggttctacgtctgaatattcttttctaagagacgcaacttctggagttagtagaagaactctgtttctatatctatcaacgctggaatcaatactcaagttaaggatagcgaatacctcatcgtcatcatccgtatcctctgaaacgccatcatatgacatttcatgaagtctaacgtattgataaacagaatcagatttagtattaaacagatccttaacctttttagtaaatgcatatgtatattttagatctccagatttcataatatggtcgcatgccttaaatgtcagtgcttccataatatagtctggaacactaattggtgatgaaaaagataccggaccatatgctacgttgataaataactctgagccactaactagataatgattaatgttaaggaagaggaaatattcagtgtataggtatgtcttggcgtcatatcttgtactaaacacgctaaacagtttgttaatgtgatcaatttccaatagattaattagagcagcaggaataccaacaaacatattaccacatccgtattttctatgaatatcacatatcatgttaaaaaatcttgatagaagagcgaatatctcgtctgacttaatgagtcgtagttcagcagcaacataagtcataactgtaaatagaacatactttcctgtagtgttgattctagactccacatcaacaccattattaaaaatagttttatatacatctttaatctgctctccgttaatcgtcgaacgttctagtatacggaaacactttgatttcttatctgtagttaatgacttagtgatatcacgaagaatattacgaattacatttcttgtttttcttgagagacctgattcagaactcaactcatcgttccatagtttttttacctcagtggcgaaatctttggagtgcttggtacatttttcaataaggttcgtgacctccatttattataaaaaaattttattcaaaacttaactacaatcgggtaattataaaatcgtagatctcccatgtggtggaatactaccatctatcgcatgtggatggacagtaggtaatggccatgggaacagtaatgtttgcatatttatctttcttgccagtattactgcatattgtcccaatgtttcgatgtgatgttctaacctatcaactgccgctgtatcacaacaatagtgtccgatgaaattaagattatgatccaatgtgtttaatatatgattatcaagtcttatacgatccgcgtcttttttgacaggatcaggttcttctacaggaagaagtttcggcctcttatgatattcatgtctgggaaacggtggtctagggtgaggctccggtatcggagtgggttttggattataatcatcatcgtctatgacatcatcttcgacttcgatatttattttgctatcttgatgatgtcctgtatcagttgcattttcagcactcgactgaatattagcgcattcattgtttattattaccatatttctaaacccaaaatgtatatgttgaacatcagtactatcgttgatgagtcttatagcatgaattcgcttatcgttatcgggtttagcttctgtcaccttagcaattccttttttattaaactctacataatcatatccatttctattgtttgttctaatataaacgagtatagcatcattgctaaatttttcaatagtatcgaaaacagaatatcctaaaccatataatatatattcaggaacactcaaactaaatgtccaggattctcctaaatacgtaaactttaatagtgcgaaatcattcaaaaatctaccacttatagatagatagtacataaatgcgtatagtagtctacctatctctttattatgaaaaccggcattacgatcatatatgtcgtgatatacctgtgatccgtttacgttaaaccataaatacatgggtgatcctataaacatgaatttatttctaattctcagagctatagttaattgaccgtgtaatatttgcttacatgcatacttgatacgctcattaataagatttttatcattgctcgttatctcagaatcgtatatataaggagtaccatcgtgattcttaccagatattatacaaaatactatatataaaatatattgaccaacgttagtaatcatataaatgtttaacgttttaaattttgtattcaatgatccattatcatacgctagcatggtcttatgatattcattctttaaaatataatattgtgttagccattgcattggggctcctaatggagattttttattctcatccattttaggataggctttcataaagtccctaataacttcgtgaataatgtttctatgttttctactgatgcatgtatttgcttcgatttttttatcccatgtttcatctatcatagatttaaacgcagtaatgctcgcaacattaacatcttgaaccgttggtacaattccgttccataaatttataatgttcgccatttatataactcattttttgaatatacttttaattaacaaaagagttaagttactcatatggacgccgtccagtctgaacatcaatctttttagccagagatatcatagccgctcttagagtttcagcgtgattttccaacctaaatagaacttcatcgttgcgtttacaacacttttctatttgttcaaactttgttgttacattagtaatctttttttccaaattagttagccgttgtttgagagtttcctcattgtcgtcttcatcggctttaacaattgcttcgcgtttagcctctggctttttagcagcctttgtagaaaaaaattcagttgctggaattgcaagatcgtcatctccggggaaaagagttccgtccatttaaagtacagattttagaaactgacactctgcgttatttatatttggtacaacacatggattataaatattgatgttaataacatcagaaaatgtaaagtctatacattgttgcatcgtgttaaattttctaatggatctagtattattgggtccaacttctgcctgaaatccaaatatggaagcggatacaaaaccgtttcctggataaaccacacatctccacttttgctttacatcagaaattgtgtcattgacatcttgaactctcctatctaatgccggtgttccacctatagattttgaatattcgaatgctgcatgagtagcattaaattccttaatattgccataattttcatatattgagtaaccctggataaaaagtaaacacaccgcagccgtcgctaccacaataaaaaaaattgatagagagttcatttataatctattagaagctgacaaaatttttttacacgcatcagacaatgctttaataaatagttcaacatctacttttgtcatatcgaaccgatggtatgattctaacctagaattacatccgaaaaagttgactatgttcatagtcattaagtcattaacaaacaacattccagactctggattataagacgatactgtttcgtcacaattacctaccttaatcatgtgattatgaatattggctattagagcaccttctaagaaatctataatatctttgaaacacgatttaaaatcaaaccacgaatatacttctacgaagaaagttagtttacccataggagaaataactataaatggagatctaaatacaaaatccggatctatgatagttttaacattattatattctctattaaatacctccacatctaaaaatgttaattttgaaactatgtcttcgtttattaccgtacctgaactaaacgctataagctctattgtttgagaactctttaaacgatattcttgaaatacatgtaacaaagtttcctttaactcggtcggtttatctaccatagttacagaatttgtatccttatctataatataataatcaaaatcgtataaagttatataattatcgcgttcagattgtgatcttttcaaatagactaaaaaccccatttctctagtaagtatcttatgtatatgtttgtaaaatatcttcatggtgggaatatgctctaccgcagttagccattcctcattgacagcggtagatgtattagacaaaactattccaatgtttaacaagggccattttacgagattattaaatccttgtttgataaatgtagccaatgagggttcgagttcaacgacgattgaattctcttcccgcggatgctgcatgatgaacgacgggatgttgttcgattgatttggaattctttttcgactttttgtttatattaaatattttaaaatttatagctgatagcaattcatgtactacggataatgtagacgcgtattgcgcatcgatatctttattattagataaatttatcaataaatgtgagaagtttgcctcgttaaggtcttccatttaaatattatataaacatttgtgtttgtatcttattcgtcttttatggaatagttttttactagtaaagctgcaattacacactttgtccgtaaaacataaatataaacaccagcttttatcaatcgttccaaaaagtcgacggcggacatttttaacatggcatctattttaaatacacttaggtttttggaaaaaacatcattttataattgtaacgattcaataactaaagaaaagattaagattaaacataagggaatgtcatttgtattttataagccaaagcattctaccgttgttaaatacttgtctggaggaggtatatatcatgatgatttggttgtattggggaaggtaacaattaatgatctaaagatgatgctattttacatggatttatcatatcatggagtgacaagtagtggagcaatttacaaattgggatcgtctatcgatagactttctctaaataggactattgttacaaaagttaataattatgatgatacattttttgacgacgatgattgatcgctattgcacaattttgtttttttactttctaatatagcgtttagattctttttcatgtgcgaatattgatttactaaaatatcgatgtttaacttttgttctatgacgtccttatcagcggtatcggtacatatacgtaattcaccttcacaaaatacggagtcttcgataataatagccaatcgattattggatctagcggtctgtatcatattcaacatgtttaatatatcctttcgtttcccctttacaggcatcgatcgtagcatattttccgcgtctgagatggaaatgttaaaactacaaaaatgcgtaatgttagcccgtcctaatattggtacgtgtctataagtttggcatagtagaataatagacgtgtttaaatgccttccaaagtttaagaattctattagagtattgcattttgatagtttatcgcctacatcatcaaaaataagtaaaaagtgtgctgattttttatgattttgtgcgacagcaatacatttttctatgttacttttagttcgtatcagattatattctagagattcctgactactaacgaaattaatatgatttggccaaatgtatccatcataatctggattataaacgggtgtaaacaagaatatatgtttatattttttaactagtgtagaaaacagagatagtaaatagatagtttttccagatccagatcctcccgttaaaaccattctaaacggcatttttaataaattttctcttgaaaattgtttttcttggaaacaattcataattatatttacagttactaaattaatttgataataaatcaaaatatggaaaactaaggtcgttagtagggaggagaacaaagaaggcatatcgtgatataaataacatttattatcatgatgacaccagaaaacgacgaagagcagacatctgtgttctccgctactgtttacggagacaaaattcagggaaagaataaacgcaaacgcgtgattggtctatgtattagaatatctatggttatttcactactatctatgattaccatgtccgcgtttctcatagtgcgcctaaatcaatgcatgtctgctaacgaggctgctattactgacgccgctgttgccgttgctgctgcatcatctactcatagaaaggttgcgtctagcactacgcaatatgatcacaaagaaagctgtaatggtttatattaccagggttcttgttatatattacattcagactaccagttattctcggatgctaaagcaaattgcactgcggaatcatcaacactacccaataaatccgatgtcttgattacctggctcattgattatgttgaggatacatggggatctgatggtaatccaattacaaaaactacatccgattatcaagattctgatatatcacaagaagttagaaagtatttttgtgttaaaacaatgaactaatatttatttttgtacattaataaatgaaatcgcttaatagacaaactgtaagtaggtttaagaagttgtcggtgccggccgctataatgatgatactctcaaccattattagtggcataggaacatttctgcattacaaagaagaactgatgcctagtgcttgcgccaatggatggatacaatacgataaacattgttatctagataccaacattaaaatgtctacagataatgcggtttatcagtgtcgtaaattacgagctagattgcctagacctgatactagacatctgagagtattgtttagtattttttataaagattattgggtaagtttaaaaaagaccaataataaatggttagatattaataatgataaagatatagatattagtaaattaacaaattttaaacaactaaacagtacgacggatgctgaagcgtgttatatatacaagtctggaaaactggttgaaacagtatgtaaaagtactcaatctgtactatgtgttaaaaaattctacaagtgacaacaaaaaatgaattaataataagtcgttaacgtacgccgccatggacgccgcgtttgttattactccaatgggtgttgactataacagatacattgtatgatgatctcgatatctcaatcatggactttataggaccatacattataggtaacataaaaactgtccaaatagatgtacgggatataaaatattccgacatgcaaaaatgctactttagctataagggtaaaatagttcctcaggattctaatgatttggctagattcaacatttatagcatttgtgccgcatacagatcaaaaaataccatcatcatagcatgcgactatgatatcatgttagatatagaagataaacatcagccattttatctattcccatctattgatgtttttaacgctacaatcatagaagcgtataacctgtatacagctggagattatcatctaatcatcaatccttcagataatctgaaaatgaaattgtcgtttaattcttcattctgcatatcagacggcaatggatggatcataattgatgggaaatgcaatagtaattttttatcataaaagttgtaaagtaaataataaaacaataaatattgaactagtagtacgtatattgagcaatcagaaatgatgctggtacctcttatcacggtgaccgtagttgcgggaacaatattagtatgttatatattatatatttgtaggaaaaagatacgtactgtctataatgacaataaaattatcatgacaaaattaaaaaagataaagagttctaattccagcaaatctagtaaatcaactgatagcgaatcagactgggaggatcactgtagtgctatggaacaaaacaatgacgtagataatatttctaggaatgagatattggacgatgatagcttcgctggtagtttaatatgggataacgaatccaatgttatggcgcctagcacagaacacatttacgatagtgttgctggaagcacgctgctaataaataatgatcgtaatgaacagactatttatcagaacactacagtagtaattaatgaaacggagactgttaaagtacttaatgaagataccaaacagaatcctaactattcatccaatcctttcgtaaattataataaaaccagtatttgtagcaagtcaaatccgtttattacagaacttaacaataaatttagtgagaataatccgtttagacgagcacatagcgatgattatcttaataagcaagaacaagatcatgaacacgatgatatagaatcatcggtcgtatcattggtgtgattagtttcctttttataaaattgaagtaatatttagtattattgctgccgtcacgttgtacaaatggagatattccctgtattcggcatttctaaaattagcaattttattgctaataatgactgtagatattatatagatacagaacatcaaaaaattatatctgatgagatcaatagacagatggatgaaacggtacttcttaccaacatcttaagcgtagaagttgtaaatgacaatgagatgtaccatcttattcctcatagattatcgacgattatactctgtattagttctgtcggaggatgtgttatctctatagataatgacgtcaatggcaaaaatattctaacctttcccattgatcatgctgtaatcatatccccactgagtaaatgtgtcgtagttagcaagggccctacaaccatactggttgctaaagcggatatacccagcaaacgattggtaacatcgtttacaaacgacatactgtatgtaaacaatctatcactgattaattatttgccgttgtctgtattcattattagacgagtcaccgactatttggatagacacatatgcgatcagatatttgctaataataagtggtattcccttataaccatcgacgataagcaatatcctattccatcaaattgtataggtatgtcttctgccaagtacataaattctagcatcgagcaagatactttaatacatgtttgtaacctcgagcatccattcgacttagtatacaaaaaaatgcagtcgtacaattctgtacctatcaaggaacaaatattgtacggtagaattgataatataaatatgagcattagtatttctgtggattaatagatttctagtatggggatcattaatcatctctaatctctaaatacctcataaaacgaaaaaaaagctattatcaaatactgtacggaatagattcattctcttctctttttatgaaactctgttgtatatctactgataaaactggaagcaaaaaatctgataaaaagaataagatcaagatcaaggattatatggaacacgattattataaaataacaatagttcctggttcctcttccacgtctactagctcgtggtattatacacatgcctagtaatagtctctttgcgttgatggaaagcagactagaaataacaggctaaaatgttcagacaccataatagttcccaacccagataataacagagtaccatcaacacattcctttaaactcaatcccaaacccaaaaccgttaaaatgtatccggccaattgatagtagataatgaggtgtacagcgcatgataatttacacagtaaccaaaatgaaaatactttagtaattataagaaatatagatggtaacgtcatcatcaacaatccaataatatgccggagagtaaacattgacggataaaacaaaaatgctccgcataactctatcatggcaataacacaaccaaatacttgtaagattcctaaattagtagaaaatacaacggatatcgatgtataagtgatctcgagaaataataagaataaagtaatgcccgtaaagataaacatcaacattgtttggtaatcattaaaccaattagtatgacgttgaactaatttcacagtaaattttattccagtattatccccgcatgtataagtacctggtaagatatctttatattccataatcaatgagacatcactatctgataacgaatgaagtctagcactagtatgccatttacttaatattgtcgtcttggaagttttattataagttaaaatatcatggttatccaatttccatctaatatactttgtcggattatctatagtacacggaataatgatggtatcattacatgctgtatactctatggtctttgtagttgttataacaaccaacgtatagaggtatatcaacgatattctaactcttgacattttttatttatttaaaatgatacctttgttatttattttattctattttgctaacggtattgaatggcataagtttgaaacgagtgaagaaataatttctacttacttattagacgacgtattatacacgggtgttaatggggcggtatacacattttcaaataataaactaaacaaaactggtttaactaataataattatataacaacatctataaaagtagaggatgcggataaggatacattagtatgcggaaccaataacggaaatcccaaatgttggaaaatagacggttcagacgacccaaaacatagaggtagaggatacgctccttatcaaaatagcaaagtaacgataatcagtcacaacggatgtgtactatctgacataaacatatcaaaagaaggaattaaacgatggagaagatttgacggaccatgtggttatgatttattcacggcggataacgtaattccaaaagatggtttacgaggagcattcgtcgataaagacggtacttatgacaaagtttacattcttttcactgatactatcggctcaaagagaattgttaaaattccgtatatagcacaaatgtgcctaaacgacgaaggtggtccatcatcgttgtctagtcatagatggtcgacgtttctcaaagtcgaattagaatgtgatatcgacggaagaagttatagataaattattcattctaaaactataaaaacagataatgatacgatactatatgtattcttcgatagtccgcattatgtacctattctatgaataccattaaacaatctttttctacgtcaaaattggaaggatatacaaagcaattgccgtctccagctcctggtatatgtctaccagctggaaaagttgttccacataccacgtttgaagtcatagaaaaatataatgtactagatgatattataaagcctttatctaaccaacctatcttcgaaggaccgtctggtgttaaatggttcgatataaaggagaaggaaaatgaacatcgggaatatagaatatacttcataaaagaaaattctatatattcgttcgatacaaaatctaaacaaactcgtagctcgcaagtcgatgcgcgactattttcagtaatggtaacttcgaaaccgttatttatagcagatatagggataggagtaggaatgccacaaatgaaaaaaatacttaaaatgtaatcttaatcgagtacaccacacgacaatgaacaaacataagacagattatgctggttatgcttgctgcgtaatatgcggtctaattgttggaattatttttacagcgacactattaaaagttgtagaacgtaaattagttcatacaccatcaatagataaaacgataaaagatgcatatattagagaagattgtcctactgactggataagctataataataaatgtatccatttatctactgatcgaaaaaacctgggaggaaggacgtaatgcatgcaaagctctaaatccaaattcggatctaattaagatagagactccaaacgagttaagttttttaagaagccttagacgaggctattgggtaggagaatccgaaatattaaaccagacaaccccatataattttatagctaaaaatgccacgaagaatggaactaaaaaacggaaatatatttgtagtacaacgaatactcccaaactgcattcgtgttacactatataacaattacactacatttttatcataacactacttcggttagatgttttagaaaaaaataaatatcgccgtaccgttcttgtttttataaaaataacaattaacaattatcaaattttttctttaatattttacgtggttgaccattcttggtggtaaaataatctcttagtgttggaatggaatgctgtttaatgtttccgcactcatcgtatattttgacgtatgcagtcacatcgtttacgcaatagtcagactgtagttctatcatgcttcctacatcagaaggaggaacagttttaaagtctcttggttttaatctattgccattagttttcatgaaatcctttgttttatccacttcacattttaaataaatgtccactatacattcttctgttaattttactagatcgtcatgggtcatagaatttataggttccgtagtccatggatccaaactagcaaacttcgcgtatacggtatcgcgattagtgtatacaccaactgtatgaaaattaagaaaacagtttaataaatcaacagaaatatttaatcctccgtttgatacagatgcgccatatttatggatttcggattcacacgttgtttgtctgaggtgttcgtctagtgttgcttctacgtaaacttcgattcccatatattctttattgtcagaatcgcataccgatttatcatcatacactgtttgaaaactaaatggtatacacatcaaaataataaataataacgagtacattctgcaatattgttatcgtaattggaaaattagtgttcgagtgagtcggattatgtgagtactggattgtatattttattttatattttgtaataagaataaaatgctaatgtcaagtttattccaatagatgtcttattaaaaaacatatataataaataacaatggctgaatggcataaaattatcgaggatatctcaaaaaataataagttcgaggatgccgccatcgttgattacaagactacaaagaatgttctagctgctattcctaacagaacatttgccaagattaatccgggtgaaattattcctctcatcactaatcgtaatattctaaaacctcttattggtcagaaatattgtattgtatatactaactctctaatggatgagaacacgtatgctatggagttgcttactgggtacgcccctgtatctccgatcgttatagcgagaactcataccgcacttatatttttgatgggtaagccaacaacatccagacgtgatgtgtatagaacgtgtagagatcacgctacccgtgtacgcgcaactggtaattaaaataaaaagtaatattcatatgtagtgtcaattttaaatgatgatgatgaaatggataatatccatattgacgatgtcaataatgccggtattggcatacagctcatcgatttttagatttcattcagaggatgtggaattatgttatgggcatttgtattttgataggatctataatgtagtaaatataaaatataatccgcatattccatatagatataattttattaatcgcacgttaaccgtagatgaactagacgataatgtcttttttacacatggttattttttaaaacacaaatatggttcacttaatcctagtttgattgtctcattatcaggaaacttaaaatataatgatatacaatgctcagtaaatgtatcgtgtctcattaaaaatttggcaacgagtacatctactatattaacatctaaacataagacttattctctacatcggtccacgtgtattactataataggatacgattctattatatggtataaagatataaatgacaagtataatgacatctatgattttactgcaatatgtatgctaatagcgtctacattgatagtgaccatatacgtgtttaaaaaaataaaaatgaactcttaattatgctatgctattagaaatggataaaatcaaaattacggttgattcaaaaattggtaatgttgttaccatatcgtataacttggaaaagataactattgatgttacacctaaaaagaaaaaagaaaaggatgtattattagcgcaatcagttgctgtcgaagaggcaaaagatgtcaaggtagaagaaaaaaatattatcgatattgaagatgacgatgatatggatgtagaaagcgcataatacgatctataaaaataagtatataataaatactttttatttacggtactcttgtagtggtgataccctactcaattatttttttaaaaaaatacttattctgattcttctagccatttccgtgttcgttcgaatgccacatcgacgttaaagataggggagtagttgaaatctagttctgcattgttggtacgcacctcaaatgtagtgttggatatcttcaacgtatagttgttgagtagtgatggttttctaaatagaattctcttcatatcattcttgcacgcgtacatttttagcatccatcttggaattctagatccttgttctattcccaatggtttcatcaatagaagattaaacatatcgtacgaacacgatggagagtaatcgtagcaaaagtaagcatttcctttaatcttagatcccggatactggatatattttgcagccaacacgtgcatccatgcagcatttcctacatatacccggctatgcaccgcgtcatcatcgactgtacgatacataatgttaccgtgttgcttacattgctcgtaaaagactttcgtcaatttgtctccttctccgtaaattccagtgggtcttaggcaacaagtatacaattttgctccattcatgattacggaattattggctttcataaccagttgctcggccatacgtttactttttgcgtatacatgtcctggtgatatatcataaagggtatgctcatggccgatgaatggatcaccgtgtttattgggtcctattgcttccatgctactagtatagatcaaatacttgattcctaggtccacacaagctgccaatatagtctgtgttccataatagtttactttcatgatttcattatcggtgtattttccaaatacatccactagagcagccgtatgaataatcagatttaccccatctagcgcttctctcaccttatcaaagtcgtttatatcacattgtatatagtttataaccttaactttcgaggttattggttgtggatcttctacaatatctatgactctgatttcttgaacatcatctgcactaattaacagttttactatatacctgcctagaaatccggcaccaccagtaaccgcgtacacggccattgctgccactcataatatcagactacttattctattttactaaataatggctgtttgtataatagaccacgataatatcagaggagttatttactttgaaccagtccatggaaaagataaagttttaggatcagttattggattaaaatccggaacgtatagtttgataattcatcgttacggagatattagtcaaggatgtgattccataggcagtccagaaatatttatcggtaacatctttgtaaacagatatggtgtagcatatgtttatttagatacagatgtaaatatatttacaattattggaaaggcgttatctatttcaaaaaatgatcagagattagcgtgtggagttattggtatttcttacataaatgaaaagataatacattttcttacaattaacgagaatggcgtttgatatatcagttaatgcgtctaaaacaataaatgcattagtttacttttctactcagcaaaataaattagtcatacgtaatgaagttaatgatacacactacactgtcgaatttgatagggacaaagtagttgacacgtttatttcatataatagacataatgacaccatagagataagaggggtgcttccagaggaaactaatattggttgcgcggttaatacgccggttagtatgacttacttgtataataagtatagttttaaactgattttagcagaatatataagacacagaaatactatatccggcaatatttattcggcattgatgacactagatgatttggctattaaacagtatggagacattgatctattatttaatgagaaacttaaagtagactccgattcgggactatttgactttgtcaactttgtaaaggatatgatatgttgtgattctagaatagtagtagctctatctagtctagtatctaaacattgggaattgacaaataaaaagtataggtgtatggcattagccgaacatatatctgatagtattccaatatctgagctatctagactacgatacaatctatgtaagtatctacgcggacacactgagagcatagaggatgaatttgattattttgaagacgatgattcgtctacatgttctgccgtaaccgacagggaaacggatgtataattttttttatagcgtgaaggatatgataaaaaatataattgttgtatttatcccattccaatcaccttatatgattctgtaaaaaaattatactgtaacacaataaaggagtcttatagatgtatagaggtcagatactggtttgataaactgtttattccacataagtatgtttgactttatggttagacccgcatactttaacaaatcactgaaaattggagttaggtattgacctctcagaatcagttgccgttctggaacattaaatgtattttttatgatatactccaacgcatttatgtgggcatacaacaagtcattactaatggagtattccaagagttttagttgtctagtatttaacaagagaagagatttcaacagactgtttatgaactcgaacgccgcctcattgtcgcttatattgatgatgtcgaattctcccaatatcatcactgatgagtagctcatcttgttatcgggatccaagttttctaaagatgtcattaaaccctcgatcatgaatggatttatcatcatcgtttttatgttggacatgagcttagtccgtttgtccacatctatagacgacgatttctgaattatttcatatatccctctctttaactccaggaacttgtcaggatggtctactttaatatgttctcgtctaagagatgaaaatctttggatggttgcacgcgacttttctttaaaggatgacgttgcccaagatcctctcttaaatgaatccatcttatccttggacaagatggacagtctattttccttagatggtttaatatttttgttacccatgatctataaaggtagacctaatcgtctcggatgaccatatatttattttcagttttattatacgcataaattgtaaaaaatatgttaggtttacaaaaatgtctcgtggggcattaatcgtttttgaaggattggacaaatctggaaaaacaacacaatgtatgaacatcatggaatctataccggcaaacacgataaaatatcttaactttcctcagagatccactgtcactggaaagatgatagatgactatctaactcgtaaaaaaacctataatgatcatatagttaatctattattttgtgcaaatagatgggagtttgcatcttttatacaagaacaactagaacagggaattactttaatagttgatagatacgcattttctggagtagcgtatgccgccgctaaaggcgcgtcaatgactctcagtaagagttatgaatctggattgcctaaacccgacttagttatattcttggaatctggtagcaaagaaattaatagaaacgtcggcgaggaaatttatgaagatgttacattccaacaaaaggtattacaagaatataaaaaaatgattgaagaaggagatattcattggcaaattatttcttctgaattcgaggaagatgtaaagaaggagttgattaagaatatagttatagaggctatacacacggttactggaccagtggggcaactgtggatgtaatagtgaaattacattttttataaatagatgttagtacagtgttataaatggatgaagcatattactctggcaacttggaatcagtactcggatacgtgtccgatatgcataccgaactcgcatcaatatctcaattagttattgccaagatagaaactatagataatgatatattaaacaaggacattgtaaattttatcatgtgtagatcaaacttggataatccatttatctctttcctagatactgtatatactattatagatcaagagatctatcagaccgaattgattaattcattagacgacaatgaaattatcgattgtatagttaacaagtttatgagcttttataaggataacctagaaaatatagtagatgctatcattactctaaaatatataatgaataatccagattttaaaactacgtatgccgaagtactcggttccagaatagccgatatagatattaaacaagtgatacgtaagaatatactacaattgtctaatgatatccgcgaacgatatttgtgaaaaatattaaaaaaaaatactttttttattaaatgacgtcgcttcgcgaatttagaaaattatgctgtgatatatatcacgcatcaggatataaagaaaaatctaaattaattagagactttataacagatagggatgataaatatttgatcattaagctattgcttcccggattagacgatagaatttataacatgaacgataaacaaattataaaattatatagtataatatttaaacaatctcaggaagatatgctacaagatttaggatacggatatataggagacactattaggactttcttcaaagagaacacagaaatccgtccacgagataaaagcattttaactttagaagaagtggatagttttttaactacgttatcatccgtaactaaagaatcgcatcaaataaaattattgactgatgtagcatctgtttgtacatgtaatgatttaaaatgtgtagtcatgcttattgataaagatctaaaaattaaagcgggccctcggtacgtacttaacgctattagtcctcatgcctatgatgtgtttagaaaatctaataacttgaaagagataatagaaaatgcatctaaacaaaatctagactctatatctatttctgttatgactccaattaatcccatgttagcggaatcgtgtgattctgtcaataaggcgtttaaaaaatttccatcaggaatgtttgcggaagtcaaatacgatggtgaaagagtacaagttcataaaaataataacgagtttgccttctttagtagaaacatgaaaccagtactctctcataaagtggattatctcaaagaatacataccgaaagcatttaaaaaagctacgtctatcgtattggattctgaaattgttcttgtagacgaacataatgtaccgctaccgtttggaagtttaggaatacacaaaaagaaagaatataaaaactctaacatgtgtttgttcgtgtttgactgtttgtactttgatggattcgatatgacggacattccattgtacgaacgaagatcttttctcaaagatgttatggttgaaatacccaatagaatagtattctcagagttgacgaatattagtaacgagtctcagttaactgacgtattggatgatgcactaacgagaaaattagaaggattggtcttaaaagatattaatggagtatacgaaccgggaaagagaagatggttaaaaataaagcgagactatttgaacgagggttccatggcagattctgccgatttagtagtactaggtgcctactatggtaaaggagcaaagggtggtatcatggcagtctttctaatgggttgttacgacgatgaatccggtaaatggaagacggttaccaagtgttcaggacacgatgataatacgttaagggagttgcaagaccaattaaagatgattaaaattaacaaggatcccaaaaaaattccagagtggttagtagttaataaaatctatattcccgattttgtagtagaggatccgaaacaatctcagatatgggaaatttcaggagcagagtttacatcttccaagtcccataccgcaaatggaatatccattagatttcctagatttactaggataagagaggataaaacgtggaaagaatctactcatctaaacgatttagtaaacttgactaaatcttaatagttacatacaaactgaaaattaaaataacaccatttagttggtggtcgccatggatggtgttattgtatactgtctaaacgcgttagtaaaacatggcgaggaaataaatcatataaaaaatgatttcatgattaaaccatgttgtgaaagagtttgtgaaaaagtcaagaacgttcacattggcggacaatctaaaaacaatacagtgattgcagatttgccatatatggataatgcggtatccgatgtatgcaattcactgtataaaaagaatgtatcaagaatatccagatttgctaatttgataaagatagatgacgatgacaagactcctactggtgtatataattattttaaacctaaagatgttattcctgttatcatatctataggaaaggataaagatgtctgtgaactattaatctcatcagacatatcgtgtgcatgcgtggagttaaattcatatcacgtagccattcttcccatgaatgtttccttttttaccaaaggaaatgcctcgttgattattctcctgtttgatttctctatcgatgcagcacctctcttaagaagtgtaaccgataataatgttattatatctagacaccagcgtctacatgacgagcttccgagttccaattggttcaagttttacataagtataaagtccgactattgttctatattatatatggttgttgatggatctgtgatgcatgcgatagctgataatagaactcacgcaattattagcaaaaatatattagacaatactacaattaacgatgagtgtagatgctgttattttgaaccacagattaggattcttgatagagatgagatgctcaatggatcatcgtgtgatatgaacagacattgtattatgatgaatttacctgatgtaggcgaatttggatctagtatgttggggaaatatgaacctgacatgattaagattgctctttcggtggctggtaatttaataagaaatcgagactacattcccgggagacgaggctatagctactacgtttacggtatagcctctagataatttttttaagcacgaaataaaaaacataattttaaaccaatctatttcatactattttgtgtgatcaccatggacataaagatagatattagtatttctggtgataaatttacggtgactactaggagggaaaatgaagaaagaaaaaaatatctacctctccaaaaagaaaaaactactgatgttatcaaacctgattatcttgagtacgatgacttgttagatagagatgagatgtttactattctagaggaatattttatgtacagaggtctattaggcctcagaataaaatatggacgactctttaacgaaattaaaaaattcgacaatgatgcggaagaacaattcggtactatagaagaactcaagcagaaacttagattaaattctgaagagggagcagataactttatagattatataaaggtacaaaaacaggatatcgtcaaacttactgtatacgattgcatatctatgataggattgtgtgcatgcgtggtagatgtttggagaaatgagaaactgttttctagatggaaatattgtttacgagcgattaaactgtttattaatgatcacatgcttgataagataaaatctatactgcagaatagactagtatatgtggaaatgtcatagaaagttaatgagagcaaaaatatataaggttgtattccatatttgttattttttctgtaatagttaaaaaaatacattcgatggtctatctatcagattattatgtgttataaggtactttttctcataataaactagagtatgagtaagatagtgtttttcaaaacatataaatctaaaattgatggatgagatatacagctattaatttcgaaaatatataaatctaaaattgatggataagatatacagctattaatttcgaaaatatattttaatctgataactttaaacatggatttttgatggtggtttaacgttttaaaaaaagattttgttattgtagtatatgataatattaaaagatggatataaagaatttgctgactgcatgtactattttttacattactacattggctacggcagatatacctactccgccaccaacgggtcatgtgacaagggagaatatcttgataagaggcataatcaatgttgtaatcggtgtccacctggagaatttgccaaggttagatgtaatggtaacgataacacaaaatgtgaacgctgcccacctcatacatataccacaatccccaattattctaatggatgtcatcaatgtagaaaatgcccaaccggatcatttgataaggtaaagtgtaccggaacacagaacagtaaatgttcgtgtcttcctggttggtattgcgctactgattcttcacagactgaagattgttgaaattgtgtaccaaaaaggagatgtccatgcggatactttggtggaatagatgaacaaggaaatcctatttgtaaatcgtgctgtattggtgaatattgcaactacctacgtaattatagacttgatccattttctccatgcaaactatctaaatgtaattaattatgattttgatgataatgttaccatacattatatcgctacttggttagtgtattattcagtatgaagacctattaataattacttatcttttgacgatcttgttataattataatataaaaacttatggcatagtaactcataattgctgacgcgataaattcgtaataatctgttttgttcaaatttttataaggaatctacaggcataaaaataaaaatataatttataatatactcttacagcgcgccatcatgaatagcagcagtaaattaattgctgttattaatggatttagaaatagtggacgattttgtgatattaatatagttattaatgatgaaaggataaacgctcacagactcatcctatctggagcctccgaatatttttccattctgttttccaataattttatcgattctaatgaatacgaagttaatctaagtcatttagattatcaaagtgttaacgatttgatcgattacatttatgggatacctttgagcctaactaacgataacgtgaaatatattctttcaaccgctgattttttacaaattggatctgccattactgagtgcgaaaaatacatacttaaaaatctttgttctagaaactgtatcgatttctacatatacgctgataaatataataacaagaaaatagaatcagcgtcgtttaacacaatattacgaaatattttgagactcatcaacgatgaaaactttaaatacttaacagaggaatcaatgataaaaattttaagcgatgatatgttaaatataaaaaatgaggattttgcaccactaattctcattaaatggttagagagtactcaacaatcatgcaccgtcgagttacttagatgcctcagaatatcattgctttccccacaagttataaaatcactttatagtcatcaactggttagttcaatctacgaatgtataacattcttaaacaatatagcattcttggatgaatcatttcctagataccatagcatcgagttgatatctatcggtataagtaattcgcatgataagatttccataaactgctacaatcataaaaaaaatacatgggaaatgatatcttcacgtagatataggtgtagtttcgcagtggccgtcctggataatattatctatatgatgggtggatatgatcagtccccgtatagaagttcaaaggttatagcgtacaatacatgtacaaattcttggatatatgatataccagagctaaaatatcctcgttctaattgtgggggactggctgatgacgaatacatttattgtataggcggcatacgcgatcaggattcatcgttgacatctagtattgatagatggaagccatcaaaaccatattggcagaagtatgctaaaatgcgcgaaccaaaatgtgatatgggggttgcgatgttaaacggattaatatatgtcatgggtggaatcgttaaaggtgacacgtgtaccgacgcactagagagtttatcagaagatggatggatgaagcatcaacgtcttccaataaaaatgtccaatatgtcgacgattgttcatgatggcaagatttatatatctggaggttacaacaatagtagtgtagttaatgtaatatcgaatctagtccttagctataatccgatatatgatgaatggaccaaattatcatcattaaacattcctagaattaatcccgctctatggtcagcgcataataaattatatgtaggaggaggaatatctgatgatgttcgaactaatacatctgaaacatacgataaagaaaaagattgttggacattggataatggtcacgtgttaccacgcaattatataatgtataaatgcgaaccgattaaacataaatatccattggaaaaaacacagtacacgaatgattttctaaagtatttggaaagttttataggtagttgatagaacaaaatacataattttgtaaaaataaatcactttttatactaatatgacacgattaccaatacttttgttactaatatcattagtatacgctacaccttttcctcagacatctaaaaaaataggtgatgatgcaactctatcatgtaatcgaaataatacaaatgactacgttgttatgagtgcttggtataaggagcccaattccattattcttttagctgctaaaagcgacgtcttgtattttgataattataccaaggataaaatatcttacgactctccatacgatgatctagttacaactatcacaattaaatcattgactgctagagatgccggtacttatgtatgtgcattctttatgacatcaactacaaatgacactgataaagtagattatgaagaatactccacagagttgattgtaaatacagatagtgaatcgactatagacataatactatctggatctacacattcaccagaaactagttctgagaaaccagaggatatagataattttaattgctcgtcggtattcgaaatcgcgactccggaaccaattactgataatgtagaagatcatacagacaccgtcacatacactagtgatagcattaatacagtaagtgcatcatctggagaatccacaacagacgagactccggaaccaattactgataaagaagaagatcatacagtcacagacactgtctcatacactacagtaagtacatcatctggaattgtcactactaaatcaaccaccgatgatgcggatctttatgatacgtacaatgataatgatacagtaccaccaactactgtaggcggtagtacaacctctattagcaattataaaaccaaggactttgtagaaatatttggtattaccgcattaattatattgtcggccgtggcaatattctgtattacatattatatatataataaacgttcacgtaaatacaaaacagagaacaaagtctagatttttgacttacataaatgtctgggatagtaaaatctatcatattgagcggaccatctggttcaggaaagacagccatagccaaaagactatgggaatatatttggatttgtggtgtcccataccactagatttcctcgtcctatggaacgagaaggtgtcgattaccattacgttaacagagaggccatctggaagggaatagccgccggaaactttctagaacatactgagtttttaggaaatatttacggaacttctaaaactgctgtgaatacagcggctattaataatcgtatttgtgtgatggatctaaacatcgatggcgttagaagtcttaaaaatacgtacctaatgccttactcggtgtatataagacctacctctcttaaaatggttgagaccaagcttcgttgtagaaacactgaagcggatgatgagattcatcgtcgtgtgatgttggcaaaaactgacatggatgaggcaggtgaagccggtctattcgacactattatcattgaagatgatgtgaatttagcatatagtaagttaattcagatactacaggaccgtattagaatgtattttaacactaattagagacttaagacttaaaacttgataattaataatataactcgtttttatatgtggctatttcaacgtctaatgtattagttaaatattaaaacttaccacgtaaaacttaaaatttaaaatgatatttcattgacagatagatcacacattatgaactttcaaggacttgtgttaactgacaattgcaaaaatcaatgggtcgttggaccattaataggaaaaggtggattcggtagtatttatactactaatgacaataattatgtagtaaaaatagagcccaaagctaacggatcattatttaccgaacaggcattttatactagagtacttaaaccatccgttatcgaagaatggaaaaaatctcacaatataaagcacgtaggtcttatcacgtgcaaggcatttggtctatacaaatccattaatgtggaatatcgattcttggtaattaatagattaggtgcagatctagatgcggtgatcagagccaataataatagattaccaaaaaggtcggtgatgttgatcggaatcgaaatcttaaataccatacaatttatgcacgagcaaggatattctcacggagatattaaagcgagtaatatagtcttggatcaaatagataagaataaattatatctagtggattacggattggtttctaaattcatgtctaatggcgaacatgttccatttataagaaatccaaataaaatggataacggtactctagaatttacacctatagattcgcataaaggatacgttgtatctagacgtggagatctagaaacacttggatattgtatgattagatggttgggaggtatcttgccatggactaagatatctgaaacaaagaattgtgcattagtaagtgccacaaaacagaaatatgttaacaatactgcgactttgttaatgaccagtttgcaatatgcacctagagaattgctgcaatatattaccatggtaaactctttgacatattttgaggaacccaattacgacgagtttcggcacatattaatgcagggtgtatattattaagtgtggtgtttggtcgatgtaaaatttttgtcgataaaaattaaaaaataacttaatttattattgatctcgtgtgtacaaccgaaatcatggcgatgttttacgcacacgctctcggtgggtacgacgagaatcttcatgcctttcctggaatatcatcgactgttgccaatgatgtcaggaaatattctgttgtgtcagtttataataacaagtatgacattgtaaaagacaaatatatgtggtgttacagtcaggtgaacaagagatatattggagcactgctgcctatgtttgagtgcaatgaatatctacaaattggagatccgatccatgatcaagaaggaaatcaaatctctatcatcacatatcgccacaaaaactactatgctctaagcggaatcgggtacgagagtctagacttgtgtttggaaggagtagggattcatcatcacgtacttgaaacaggaaacgctgtatatggaaaagttcaacatgattattctactatcaaagagaaggccaaagaaatgaatgcactcagttcaggacctatcatcgattaccacgtctggataggagattgtatctgtcaagttactgctgtggacgtacatggaaaggaaattatgagaatgagattcaaaaagggtgcggtgctacagatcccaaatctggtaaaagttaaacttggggagaatgatacagaaaatctttcttctactatatcggcggcaccatcgaggtaaccacctctcaagaagaccgcgtgaataatgtactcatgaaacgtttggaaactatacgccatatgtggtctgttgtatatgatcattttgatattgtgaatggtaaagaatgctgttatgtgcatacgcattcatctaatcaaaatcctataccgagtactgtaaaaacaaatttgtacatgaagactatgggatcatgcattcaaatggattccatggaagctctagagtatcttagcgaactgaaggaatcaggtggatggagtcccagaccagaaatgcaggaatttgaatatccagatggagtggaagacactgaatcaattgagagattggtagaggagttcttcaatagatcagaacttcaggctggtaaattagtcaaatttggtaattctattaattgttaaacatacatctgtttcagctaagcaactaagaacacgtatacggcagcagcttccttttatactctcatcttttaccaacacaaagggtggatatttgttcattggagttgataataatacacacaaagtatttggattcacggtgggttacgactacctcagactgatagagaatgatatagaaaagcatatcaaaagactttgtgttgtgcatttctgtgagaagaaagaggacatcaagtacacgtgtcgattcatcaaggtatataaacctggggatgaggctacctcgacatacgtgtgcgctatcaaagtggaaagatgctgttgtgctgtgtttgcagattggccagaatcatggtatatggatactaatggtatcaagaagtattctccagatgaatgggtgtcacatataaaattttaattaatgtaactatagagaacaaataataggttgtaatatcatatagacaataactaacaattaattagtaactgttatctcttttttaactaaccaactaactatatacctattaatacatcgtaattatagttcttaacatctattaatcattgattcgcttctttaattttttataaactaacattgttaattgaaaagggataacatgttacagaatataaattatatatggatttttttaaaaaggaaatacttgactggagtgtatatttatctcttcattatatagcacgcgtgtgttccaattcttccacatcccatataatacaggattataatctcgttcgaacatacgagaaagtggataaaacaatagttgattttttatctaggttgccaaatttattccatattttagaatatggggaaaatattctacatatttattctatggatgatgctaatacgaatattataattttttttctagatagagtattaaatattaataagaacgggtcatttatacacaatctcaggttatcatcatccattaatataaaagaatatgtatatcaattagttaataatgatcatccagataataggataagactaatgcttgaaaatggacgtagaacaagacattttttgtcctatatatcagatacagttaatatctatatatgtattttaataaatcatggattttatatagatgcagaagacagttacggttgtacattattacatagatgtatatatcactataagaaatcagaatcagaatcatacaatgaattaattaagatattgttaaataatggatccgatgtagataaaaaagatacgtacggaaacacaccttttatcctattatgtaaacacgatatcaacaacgtggaattgtttgagatatgtttagagaatgctaatatagactctgtagactttaatagatatacacctcttcattatgtctcatgtcgtaataaatatgattttgtaaagttattaatttctaaaggagcaaatgttaatgcgcgtaataaattcggaactactccattttattgtggaattatacacggtatctcgcttataaaactatatttggaatcagacacagagttagaaatagataatgaacatatagttcgtcatttaataatttttgatgctgttgaatctttagattatctattatccagaggagttattgatattaactatcgtactatatacaacgaaacatctatttacgacgctgtcagttataatgcgtataatacgttggtctatctattaaacagaaatggtgattttgagacgattactactagtggatgtacatgtatttcggaagcagtcgcaaacaacaacaaaataataatggaagtactattgtctaaacgaccatctttgaaaattatgatacagtctatgatagcaattactaaaaataaacaacataatgcagatttattgaaaatgtgtataaaatatactgcgtgtatgaccgattatgatactcttatagatgtacagtcgctacagcaatataaatggtatattttaaaatgtttcgatgaaatagatatcatgaagagatgttatataaaaaataaaactgtattccaattagttttttgtatcaaagacattaatactttaatgagatatggtaaacatccttctttcgtgaagtgcactagtctcgacgtatacggaagtcgtgtacgtaatatcatagcatctattagatatcgtcagagattaattagtctattatccaagaagctggatgcgggagataaatggtcgtgttttcctaacgaaataaaatataaaatattggaaaactttaacgataacgaactatccacatatctaaaaatcttataaacactattaaaatataaaatctaagtaggataaaatcacactacatcattgtttccttttagtgctcgacagtgtatactatttttaacactcataaataaaaatgaaaacgatttccgttgttacgttgttatgcgtactacctgctgttgtttattcaacatgtactgtacccactatgaataacgctaaattaacgtctaccgaaacatcgtttaatgataaacagaaagttacatttacatgtgatcagggatatcattctttggatccaaatgctgtctgcgaaacagataaatggaaatacgaaaatccatgcaagaaaatgtgcacagtttctgattatgtctctgaattatatgataagccattatacgaagtgaattccaccatgacactaagttgcaacggcgaaacaaaatattttcgttgcgaagaaaaaaatggaaatacttcttggaatgatactgttacgtgtcctaatgcggaatgtcaacctcttcaattagaacacggatcgtgtcaaccagttaaagaaaaatactcatttggggaatatatgactatcaactgtgatgttggatatgaggttattggtgcttcgtacataagttgtacagctaattcttggaatgttattccatcatgtcaacaaaaatgtgatataccgtctctatctaatggattaatttccggatctacattttctatcggtggcgttatacatcttagttgtaaaagtggttttatactaacgggatctccatcatccacatgtatcgacggtaaatggaatcccatactcccaacatgtgtacgatctaacgaaaaatttgatccagtggatgatggtcccgacgatgagacagatttgagcaaactctcgaaagacgttgtacaatatgaacaagaaatagaatcgttagaagcaacttatcatataatcatagtggcgttaacaattatgggcgtcatatttttaatctccgttatagtattagtttgttcctgtgacaaaaataatgaccaatataagttccataaattgctaccgtaaatataaatccgttaaaataattaataatttaataacaaacaagtatcaaaagattaaagacttatagctagaatcaattgagatgtcttcttcagtggatgttgatatctacgatgccgttagagcatttttactcaggcactattataacaagagatttattgtgtatggaagaagtaacgccatattacataatatatacaggctatttacaagatgcgccgttataccgttcgatgatatagtacgtactatgccaaatgaatcacgtgttaaacaatgggtgatggatacacttaatggtataatgatgaatgaacgcgatgtttctgtaagcgttggcaccggaatactattcatggaaatgtttttcgattacaataaaaatagtatcaacaatcaactaatgtatgatataattaatagcgtatctataattctagctaatgagagatatagaagcgcttttaacgacgatggtatatacatccgtagaaatatgattaacaagttgtacggatacgcatctctaactactattggcacgatcgctggaggtgtttgttattatctgttgatgcatctagttagtttgtataaataattatttcaatatactagttaaaattttaagattttaaatgtataaaaaactaataacgtttttatttgtaataggtgcattagcatcctattcgaataatgagtacactccgtttaataaactgagtgtaaaactctatatagatggagtagataatatagaaaattcatatactgatgataataatgaattggtgttaaattttaaagagtacacaatttctattattacagagtcatgcgacgtcggatttgattccatagatatagatgttataaacgactataaaattattgatatgtataccattgactcgtctactattcaacgcagaggtcacacgtgtagaatatctaccaaattatcatgccattatgataagtacccttatattcacaaatatgatggtgatgagcaacaatattctattactgcagagggaaaatgctataaaggaataaaatatgaaataagtatgatcaacgatgatactctattgagaaaacatactcttaaaattggatctacttatatatttgatcgtcatggacatagtaatacatattattcaaaatatgatttttaaaaatttaaaatatattatcacttcagtgacagtagtcaaataacaaacaacaccatgagatatattataattctcgcagttttgttcattaatagtatacacgctaaaataactagttataagtttgaatccgtcaattttgattccaaaattgaatggactggggatggtctatacaatatatcccttaaaaattatggcatcaagacgtggcaaacaatgtatacaaatgtaccagaaggaacatacgacatatccgcatttccaaagaatgatttcgtatctttctgggttaaatttgaacaaggcgattataaagtggaagagtattgtacgggactatgcgtcgaagtaaaaattggaccaccgactgtaacattgactgaatacgacgaccatatcaatttgtacatcgagcatccgtatgctactagaggtagcaaaaagattcctatttacaaacgcggtgacatgtgtgatatctacttgttgtatacggctaacttcacattcggagattctaaagaaccagtaccatatgatatcgatgactacgattgcacgtctacaggttgcagcatagactttgtcacaacagaaaaagtgtgcgtgacagcacagggagccacagaagggtttctcgaaaaaattactccatggagttcgaaagtatgtctgacacctaaaaagagtgtatatacatgcgcaattagatccaaagaagatgttcccaatttcaaggacaaaatggccagagttatcaagagaaaatttaataaacagtctcaatcttatttaactaaatttctcggtagcacatcaaatgatgttaccacttttcttagcatgcttaacttgactaaatattcataactaatttttattaatgatacaaaaacgaaataaaactgcatattatacactggttaacgcccttataggctctaaccattttcaagatgaggtccctgattatagtccttctgttcccctctatcatctactccatgtctattagacgatgtgagaagactgaagaggaaacatggggattgaaaatagggttgtgtataattgccaaagatttctatcccgaaagaactgattgcagtgttcatctcccaactgcaagtgaaggattgataactgaaggcaatggattcagggatatacgaaacaccgataaattataaaaaaagcaatgtgtccgctgtttccgttaataatactattttcgtaactggcggattattcataaataactctaatagcacgatcgtggttaacaatatggaaaaacttgacatttataaagacaaacaatggtcgattatagaaatgcctatggctagggtatatcacggcatcgactcgacatttggaatgttatattttgccggaggtctatccgttaccgaacaatatggtaatttagagaaaaacaacgagatatcttgttacaatcctagaacgaataagtggtttgatatttcatatactatttataagatatccatatcatcattgtgtaaactaaataacgtcttctatgtatttagtaaggacattggatatgtggaaaagtatgatggtgcatggaagttagtacatgatcgtctccccgctataaaggcattatcaacttctccttattgattgaaaatgaaaatataaatagtttttatgtatagcagtattaccctatagttttattgcttactactaacatggatacagatgttacaaatgtagaagatatcataaatgaaatagatagagagaaagaagaaatactaaaaaatgtagaaattgaaaataataaaaacattaacaagaatcatccaagtggatatattagagaagcactcgttattaatacaagtagtaatagtgattccattgataaagaagttatagaatgtatcagtcacgatgtaggaatatagatcatatctactaatttttataatcgatacaaaacataaaaaacaactcgttattacatagcaggcatggaatccttcaagtattgttttgataacgatggcaagaaatggattatcggaaatactttatattctggtaattcaatactatataaggtcagaaaaaatttcactagttcgttctacaattacgtaatgaaaatagatcacaaatcacacaagccattgttgtctgaaatacgattctatatatctgtattggatcctttgactatcgacaactggacacgggaacgtggtataaagtatttggctattccagatctgtatggaattggagaaaccgatgattatatgttcttcgttataaagaattcgggaagagtattcgccccaaaggatactgaatcagtcttcgaagcatgcgtcactatgataaacacgttagagtttatacactctcgaggatttacccatggaaaaatagaaccgaggaatatactgattagaaataaacgtctttcactaattgactattctagaactaacaaactatacaagagtggaaactcacatatagattacaacgaggacatgataacttcaggaaatatcaattatatgtgtgtagacaatcatcttggagcaacagtttcaaaacgaggagatttagaaatgttgggatattgcatgatagaatggttcggtggcaaacttccatggaaaaacgaaagtagtataaaagtaataaaacaaaaaaaagaatataaaaaatttatagctactttctttgaggactgttttcctgaaggaaatgaacctctggaattagttagatatatagaattagtatacacgttagattattctcaaactcctaattatgacagactacgtaaactgtttatacaagattgaaattatattctttttttatagagtgtggtagtgttacggatatctaatattaatattagactatctctatcgcgctacacgaccaatatcgattactatggatatcttcagggaaatcgcatcttctatgaaaggagagaatgtattcatttctccagcgtcaatctcgtcagtattgacaatactgtattatggagctaatggatccactgctgaacagctatcaaaatatgtagaaacggaggagaacacggataaggttagcgctcagaatatctcattcaaatccatgaataaagtatatgggcgatattctgccgtgtttaaagattcctttttgagaaaaattggcgataagtttcaaactgttgacttcactgattgtcgcactatagatgcaatcaacaagtgtgtagatatctttactgaggggaaaatcaatccactattggatgaaccattgtctcctgatacctgtctcctagcaattagtgccgtatactttaaagcaaaatggttgatgccattcgaaaaggaatttaccagtgattatcccttttacgtatctccgacggaaatggtagatgtaagtatgatgtctatgtacggcaaggcatttaatcacgcatctgtaaaggaatcattcggcaacttttcaatcatagaactgccatatgttggagatactagtatgatggtcattcttccagacaagattgatggattagaatccatagaacaaaatctaacagatacaaattttaagaaatggtgtaactctctggaagctacgtttatcgatgttcacattcccaagtttaaggtaacaggttcgtataatcttgtggatactctagtaaagtcaggactgacagaggtgttcggttcaactggagattatagcaatatgtgtaattcagatgtgagtgtcgacgctatgattcacaaaacgtatatagatgtcaatgaagagtatacagaagcagctgcagcaacttgtgcactggtgtcagactgtgcatcaacaattacaaatgagttctgtgtagatcatccgttcatctatgtgattaggcatgttgatggaaaaattcttttcgttggtagatattgctctccgacaactaattgttaaccattttttttaaaaaaatagaaaaaacatgtggtattagtgcaggtcgttgttcttccaattgcaattggtaagatgacggccaactttagtacccacgtcttttcaccacagcactgtggatgtgacagactgaccagtattgatgacgtcagacaatgtttgactgaatatatttattggtcgtcctatgcataccgcaacaggcaatgcgctggacagttgtattccacactcctctcttttagagatgatgcggaatcagtgttcatcgacattcgcgagctggtaaaaaatatgccgtgggatgatgtcaaagattgtacagaaatcatccgttgttatataccggatgagcaaaaaaccatcagagagatttcggccatcatcggactttgtgcatatgctgctacttactggggaggtgaagaccatcccactagtaacagtctgaacgcattgtttgtgatgcttgagatgctcaattacgtggattataacatcatattccggcgtatgaattgatgagttgtacatcttgacattttctttcttctcttctccctttcttctcttctcccttcctccctcttctccctttcccagaaacaaacttttttacccactataaaataaaatgagtatactacctattatatttcttcctatatttttttattcttcattcgttcagacttttaacgcgcctgaatgtatcgacaaagggcaatattttgcatcattcatggagttagaaaacgagccagtaatcttaccatgtcctcaaataaatacgctatcatccggatataatatattagatattttatgggaaaaacgaggagcggataatgatagaattataccgatagataatggtagcaatatgctaattctgaacccgacacaatcagactctggtatttatatatgcattaccacgaacgaaacctactgtgacatgatgtcgttaaatttgacaatcgtgtctgtctcagaatcaaatatagatcttatctcgtatccacaaatagtaaatgagagatctactggcgaaatggtatgtcccaatattaatgcatttattgctagtaacgtaaacgcagatattatatggagcggacatcgacgccttagaaataagagacttaaacaacggacacctggaattattaccatagaagatgttagaaaaaatgatgctggttattatacatgtgttttagaatatatatacagaggtaaaacatataacgtaaccagaattgtaaaattagaggtacgggataaaataataccttctactatgcaattaccagatggcattgtaacttcaataggtagtaatttgactattgcgtgtagagtatcgttgagacctcccacaacggatgcagacgtcttttggataagtaatggtatgtattacgaagaagatgatggggacggagacggtagaataagtgtagcaaataaaatctatatgaccgataagagacgtgttattacatcccggttaaacattaatcctgtcaaggaagaagatgctacaacgtttacgtgtatggcgtttactattcctagcatcagcaaaacagttactgttagtataacgtgaatgtatgttgttacatttccatgtcaattgagtttataagaatttttatacattatcttccaacaaacaattgacgaacgtattgctatgattaactcccacgatactatgcatattattaatcattaacttgcagactatacctagtgctattttgacatactcatgttcttgtgtaattgcggtatctatattattaaagtacgtaaatctagctatagttttattatttaattttagataatataccgtctccttatttttaaaaattgccacatcctttattaaatcatgaatgggaatttctatgtcatcgttagtatattgtgaacaacaagagcagatatctataggaaagggtggaatgcgatacattgatctatgtagttttaaaacacacgcgaactttgaagaatttatataaatcattccatcgatacatccttctatgttgacatgtatatatccaggaattcttttattaatgtcaggaaatgtataaactaaaacattgcccgaaagcggtgcctctatctgcgttatatccgttcttaacttacaaaatgtaaccaatacctttgcatgacttgttttgttcggcaacgttagtttaaacttgacgaatggattaattacaatagcatgatccgcgcatctattaagtttttttactttaacgcccttgtatgtttttacagagactttatctaaatttctagtacttgtatgtgttataaatataacgggatatagaactgaatcacctaccttagatacccaattacattttatcagatccagataataaacaaattttgtcgccctaactaattctatattgttatatattttacaattggttatgatatcatgtaataacttggagtctaacgcgcatcgtcgtacgtttatacaattgtgatttagtgtagtatatctacacatgtatttttccgcactatagtattctggactagtgataaaactatcgttatatctgtcttcaatgaactcatcgagatattgctctctgtcatattcatacacctgcataaactttctagacatcttacaatccgtgttattttaggatcatatttacatatttacgggtatatcaaagatgttagattagttaatgggaatcgtctataataatgaatattaaacaattatatgaggacttttaccacaaagcatcataaaaatgagtcgtcgtctgatttatgttttaaatatcaaccgcaaatcaactcataaaatacaagagaatgaaatatatacatattttagtcattgcaatatagaccatacttctacagaacttgattttgtagttaaaaactatgatctaaacagacgacaacatgtaactgggtatactgcactacactgctatttgtataataattactttacaaacgatgtactgaagatattattaaatcatgacgtaaatgtaacgatgaaaaccagtagcggacgtatgcctgtttatatattgcttactagatgttgcaatatttcacatgatgtagtgatagatatgatagacaaagataaaaaccacttattacatagagactattccaacctattactagagtatataaaatctcgttacatgttattaaaggaagaggatatcgatgagaacatagtatccactttattagataagggaatcgatcctaactttaaacaagacggatatacagcgttacattattattatttgtgtctcgcacacgtttataaaccaggtgagtgtagaaaaccgataacgataaaaaaggccaagcgaattatttctttgtttatacaacatggagctaatctaaacgcgttagataattgtggtaatacaccattccatttgtatcttagtattgaaatgtgtaataatattcatatgactaaaatgctgttgacttttaatccgaatttcaaaatatgtaataatcatggattaacgcctatactatgttatataacttccgactacatacaacacgatattcttgttatgttaatacatcactatgaaacaaatgttggagaaatgccgatagatgagcgtcgtatgatcgtattcgagtttatcaaaacatattctacacgtccggcagattcgataacttatttgatgaataggtttaaaaatataaatatttatacccgctatgaaggaaagacattattacacgtagcatgtgaatataataatacacacgtaatagattatcttatacgtatcaacggagatataaatgcgttaaccgacaataacaaacacgctacacaactcattatagataacaaagaaaattccccgtataccatcgattgtttactgtatatacttagatatattgtagataagaatgtgataagatcgttggtggatcaacttccatctctacctatcttcgatataaaatcatttgagaaattcatatcctactgtatacttttagatgacacattttacgataggcacgttaagaatcgcgattctaaaacgtatcgatacgcattttcaaaatacatgtcgtttgataaatacgatggtataataactaaatgtcacgacgaaacaatgttactcaaactgtccactgttctagacactacactatatgcagttttaagatgccataattcgaaaaagttaagaagatacctcaacgagttaaaaaaatataataacgataagtcctttaaaatatattctaatattatgaatgagagataccttaatgtatattataaagatatgtacgtgtcaaaggtatatgataaactatttcctgttttcacagataaaaattgtctactaacattactaccttcagaaattatatacgaaatattatacatgctgacaattaacgatctttataatatatcgtatccacctaccaaagtatagttgtatttttctcatgcgatgtgtgtaaaaaaactgatattatataaatattttagtgccgtataataaagatgacgatgaaaatgatggtacatatatatttcgtatcattattgttattgctattccacagttacgccatagacatcgaaaatgaaatcacagaattcttcaataaaatgagagatactctaccagctaaagactctaaatggttgaatccagcatgtatgttcggaggcacaatgaatgatatagccgctctaggagagccattcagcgcaaagtgtcctcctattgaagacagtcttttatcgcacagatataaagactatgtggttaaatgggagaggctagaaaagaatagacggcgacaggtttctaataaacgtgttaaacatggtgatttatggatagccaactatacatctaaattcagtaaccgtaggtatttgtgtaccgtaactacaaagaatggtgactgtgttcagggtatagttagatctcatattaaaaaacctccttcatgcattccaaaaacatatgaactaggtactcatgataagtatggcatagacttatactgtggaattctttacgcaaaacattataataatataacttggtataaagataataaggaaattaatatcgacgacattaagtattcacaaacgggaaagaaattaattattcataatccagagttagaagatagtggaagatacaactgttacgttcattacgacgacgttagaatcaagaatgatatcgtagtatcaagatgtaaaatacttacggttataccgtcgcaagaccacaggtttaaactaatactagatccaaaaatcaacgtaacgataggagaacctgccaatataacatgcactgctgtgtcaacgtcattattgattgacgatgtactgattgaatgggaaaatccatccggatggcttataggattcgattttgatgtatactctgttttaactagtagaggcggtattaccgaggcgaccttgtactttgaaaatgttactgaagaatatataggtaatacatataaatgtcgtggacacaactattattttgaaaaaacccttacaactacagtagtattggagtaaatacacaatgcatttttatatacattactgaataattattattattatttatatcgtatttgtgctataacgcgactatctaggtatttgtatctcactgatagagaacatataaatatagactctattaaacagttgtgtaaaatatcaaatcctaatagatgtggatgtacggctttacatgagtacttttataattatagatcagtcaacggaaaatacaagtatagatacaacggttactatcaatattatttatctagcgattatgaaaattataatgaatattattatgatgattatgatagaactggtatgaacagtgagagtgataatatatcaatcaaaacagaatatgaattctatgatgaaacacaagatcaaagtacacaactagtaggttacgacattaaactcaaaaccaatgaggatgattttatggctatgatagatcagtgggtgtccatgattatatagatgaatcaattaataaagtagtatatggaagagagtctcacgtaagatggcgggatatatggcaagaacataatgatggcgtatacagtataggaaaggagtgcatagataatatatacgaagacaaccataccgtagacgaattctacaagatagacagcgtatcagatgtagatgacgcggaacacatatctccgataactaatgatgtatctacacaaacatgggaaaagaaatcagagttagatagatacatggaaatgtatcctcgtcatagatatagtaagcattctgtctttaagggattttctgacaaagttagaaaaaatgatttagacatgaatgtggtaaaagaattactttctaacggtgcatctctaacaattaaggatagcagtaataaggatccaataaccgtttattttcgaagaacgataatgaatttagaaatgattgatattattaacaaacatacaactattgatgaacgaaagtatatagtacactcctatctaaaaaattataaaaatttcgattatccatttttcaggaagttagttttgactaataaacattgtctcaacaattattataatataagcgacagcaaatatggaacaccgctacatatattggcgtctaataaaaaattaataactcctaattacatgaagttattagtgtataacggaaatgatataaacgcacgaggtgaagatacacaaatgcgaactccattacacaaatatttgtgtaaatttgtatatcataatattgaatatggtatccgatactataatgaaaagattatagacgcatttatagagttaggagccgatctaactattccaaataacgatggaatgataccagtagtttactgtatacactcaaatgcagaatatggttataacaatattactaacataaagataatacgtaaactacttaatcttagtagacgtgcgtcacataatctatttagagatcgagtcatgcacgattatataagtaatacatatattgatcttgagtgtttagatattattagatcgttggatggattcgatatcaatggttactttgaaggacgtacaccacttcattgcgctatacaacataacttcactcagattgctaagtacttattagatcgaggagctgatatagtcgtacccaacacattgattatacatcagtacatacagtaaatagcatagatatggaggaggatacaaatatttcaaataaagttataaggtacaacactgtcaataatatatggaagacattacctaacttctggactggaactataaatccaggcgtggtctcgcataaagatgatatatatgttgtatgcgacatcaaagatgaaaaaaatgttaagacttgtatatttagatataacacgaatacgtataacggatgggaattggttacgacgacagaaagcagattatcagctctgcatactattcttcatgacaataccataatgatgttacattgttatgaatcgtatatgttacaagatacatttaatgtgtacactcgcgaatggaatcatatgtgtcatcaacattcgaatagttatatcatgtacaatatactacccatctactaaatataatagaataaaataaatgagtatgatcattttagataacgattgattttatcattaccgcttcattcttatattctttgcttacggaacctatatttagaaacatctactaacgattttttatgcttgcattattaatggtatgtaatatgattgattgtgtacgcaataccaatttgttaagtatgaatacggggtacaaacataaactgaaatttaacattatttatttatgatatatatcgttatcgttattgtttggtctataccatggatatctttaaagaactaatcttaaaacaccctgatgaaaatgttttgatttctccagtttctattttatctactttatctattctaaatcatggagcagctggttctacagctgaacaactatcaaaatatatagagaatatgaatgagaatacacccgatgataagaaggatgacaataatgacatggacgtagatattccgtattgtgcgacactagctaccgcaaataaaatatacggtagcgatagtatcgagttccacgcctccttcctacaaaaaataaaagacgattttcaaactgtaaactttaataatgctaaccaaacaaaggaactaatcaacgaatgggttaagacgatgacaaatggtaaaattaattccttattgactagtccgctatccattaatactcgtatgacagttgttagcgccgtccattttaaagcaatgtggaaatatccattttctaaacatcttacatatacagacaagttttatatttctaagaatatagttaccagtgttgatatgatggtgggtaccgagaataacttgcaatatgtacatattaatgaattattcggaggattctctattatcgatattccatacgagggaaactctagtatggtaattatactaccggacgacatagaaggtatatataacatagaaaaaaatataacagatgaaaaatttaaaaaatggtgtggtatgttatctactaaaagtatagacttgtatatgccaaagtttaaagtggaaatgacagaaccgtataatctggtaccgattttagaaaatttaggacttactaatatattcggatattatgcagattttagcaagatgtgtaatgaaactatcactgtagaaaaatttctacatacgacgtttatagatgttaatgaggagtatacagaagcatcggccgttacaggagtatttatgactaacttttcgatggtatatcgtacgaaggtctacataaaccatccattcatgtacatgattaaagacaacacaggacgtatactttttatagggaaatactgctatccgcaataaatataaacaaatagacttttatcacgtttatctatgtctaaatattacaaatagtaatagtataaactaaagctgataatacttaaaaaaataataatatcatttacaattaatagtataaactaaaaattaaacaaatcgttattataagtaatatcaaaatgatgatatacggattaatagcgtgtcttatattcgtgacttcatccatcgctagtccactttatattcccgttattccacccattacggaagataaatcgttcaatagtgtagaggtattagtttccttgtttagagatgaccaaaaagactatacggtaacttctcagttcaataactacactatcgataccaaagactggactatcggcgtactatccacacctgatggtttggatataccattgactaatataacttattggtcacggtttactataggtcgtgcattgttcaaatcagagtctgaggatattttccaaaagaaaatgagtattctaggtgtttctatagaatgtaagaagtcgtcgacattacttacttttttgaccgtgcgtaaaatgactcgagtatttaataaatttccagatatggcttattatcgaggagactgtttaaaagccgtttatgtaacaatgacttataaaaatactaaaactggagagactgattacacgtacctctctaatggggggttgcctgcatactatcgtaatggggtcgatggttgattattgattagtatattccttattcacacaaaaagaacatttttataaacatgaaaccactgtctaaatgtaattatgatcttgatttatagatgaagatcagcctttagaggattttaaccagtatgtttaatatgaaaaaaataaacataacatattttgagattaagcgctattgtgcttaattattttgctctataaactgaatatatagccacaattattgacgggcttgtttatgaccggcaatcatgaatttacagaaattatctctggctatatatcttactgcgacatgttcgtggtgttatgaaacatgcataagaaaaactgcgttgtatcatgacattcaattggagcatgtagaagacaataaagatagtgtagcgtcgctaccgtacaagtagtcaatcaaagagaacgtagtagattgttggctacatttaattggacagatatagctgagggtgttagaaatgagttcattaaaatatgtgatatcaacggaacatatttatataattatactattgctgttagtataattattgattccacggaagaactaccaacagttactccaattacaacaacatatgaaccttctacatataattatactatcgatgatagcactgttattactactgaagaactacaagtgactcctcatatggatctccatcgatgatacatgtattaaaatactttccgaataagtcttttaaatattgtattaattatgaaaaactatgctatgcgagtatgatgcaaagatgtttaatgatacgatactagattttatctctagcgagagatgtcgttagaatcatttatcataactacgtttaataataattcatcaacgaatatcgataacatgtgtcatttatacgttaaagtctgtccgtcttctctattgtttagactgtttgtagaatgctgtgatataaacaaactagtagaaggtacgactccgttacactgttatctaatgaatgaaggatttgaatcatctgttttaaaaaacctattaaaggagtatgtcatgaatacgtttaatgttcatgacatccattacacaaatatttaactcatgatgaagttgagaatgatatgctttctgatagtatagatagctttagctaatataaaaatatattaatccactatatattctagacttgatttaaaaccgataaactactactacgtactgtataagttgttaaaaaaaggagcagaccctaattatgtagatgatagaggtaatacttttcttcattacttctgcatctatatgtccacttatgagaaaacgtcatttaataagatgcatcgtgaaaagaaatttattaaagagttggtaaaatatgaaaccgaaagtaaataatataggaaatacacctctacataactacgtatctcaatatgatatcactctcattcctcatccacaacccattaaaaaaatggaaattaaagccctctattagcataaacggctacaggtctacctttacaatggcctctccttgtgcccagttcagaccctgtcattgccacgctactaaggactccctgaataccgtggccgacgtcagacattgtctgactgaatacatcctgtgggtttctcatagatggacccatagagaaagcgcagggtctctctacaggcttctcatctctttcagaactgatgcaacggagctctttggtggtgagttgaaggattcacttccgtgggacaatatcgacaattgcgtggagatcattaaatgtttcatcagaaatgactccatgaaaaccgccgaagaacttcgtgcaatcattggactttgtactcaatcagctatcgtctctggaagagtcttcaacgataagtatatcgacatactacttatgctgcgaaagattctgaacgagaacgactatctcaccctcttggatcatatccgcactgctaaatactaaatctccttcatgctctctcactacactttttatcatcttatgaggaatgattgccttcatcatttttcgtgaaataggaataattagcaccagaatagctatggattgcacatgtattctatgtcgtctactggatgaagatgtgacgtacaaaaaaataaaactagaaattgaaacgtgtcacaacttatcaaaacatatagatagacgaggaaacaatgcgctacattgttacgtcttcaataaatgcgatacagacattaagattgttcgactgttactctctcgcggagtcgagagactttgtagaaacaacgaaggattaactccgctaggagcatacagtaagcatagatacgtaaaatctcaaattgtgcatctactgatatccagctattcgaattcctctaacgaactcaagtcgaatataaatgatttcgatctgtattcgtatatgtcttcggataatatcgacttacgtctgctaaaatacctaattgtggataaacggatacgtccgtccaagaatacgaattatgcaatcaatggtctcggattggtggatatatacgtaacgacgcctaatccgagaccagaagtattgctatggcttcttaaatcagaatgttacagcaccggttacgtatttcgtacctgtatgtacgacagtgatatgtgtaagaactctcttcattactatatatcgtctcatagagaatctcaatctctatccaaggatgtaattaaatgtttgatcaataacaatgtttccatccatggcagagacgaaggaggatctttacccatccaatactactggtcttgctcaaccatagatatagagattgttaaattattaataaaggatgtggacacgtgtagagtatacgacgtcagccctatattagaggcggattatctaaacaagcgatttagagtaaccccatataatgtagacatggaaatcgttaatcttcttattgagagacgtcatactcttgtcgacgtaatgcgtagtattacttcttacgattccagagactataaccactacatcatcgataacattctaaagagatttagacaacaggatgaatccatcgtacaagccatgttgataaactacttacattacggcgatatggtcgttcgatgcatgttagataacggacaacaactatcctctgcacgactactttgttaataataatctcgtcgatgtaaacgtcgtaaggtttatcgtggaaaataatggacacatggctgtaaatcacgtatcgaacaatggccgtctatgtatgtacggtctgatattatcgagatttaataattgcgggtatcactgttatgaaaccatactaatagatgtatttgatatactaagcaagtacatggataatatagatatgatcgataatgagaataaaactctactatattacgcggtcgatgtcaataatatacaatttgcaaagcggttattggaatatggagcgagtgttacaacatcacgctcgataatcaatacggccatccagaaaagtagttacagaagagaaaacaaaacgaggatagttgatttattacttagctaccatcccactctagagactatgattgacgcatttaatagagatatacgctatctatatcctgaaccattattcgcctgtatcagatacgccttaatcctagatgatgattttccttctaaagtaagtatgatatctccggtcgtcataaggaactaaagcgctatagagtagacattaatagaatgaagaatgcctacatatcaggcgtctccatgtttgatatattatttaaacgaagcaaacgccacagattgagatacgcaaagaatccgacatcaaatggtacaaaaaagaactaacgtccatcattacagaaactgtaaagaacaatgagaggatcgactccatagtggacaacattaatacagacgataacttgatttcgaaattacccatggagatactttattactccattaaataatttatcatggagcgataatgtcctgtttcatttgtttccatgacatattacaaaatcgattccgtccaagatgataaaaacatttaccggcatcataaacacggagtttattttatatgtctcgcataaacattactaaaaaaatatattgttcggttttctttcacatctttaattatgaaaaagtaaatcattatgagatggacgagattgtacgcatcgttcgcgacagtatgtggtacatacctaacgtatttatggacgacggtaagaatgaaggtcacgtttctgtcaacaatgtttgtcatatgtattttacgttctttgatgtggatacatcgtctcatctgtttaagctagttattaaacactgcgatctgaataaacgaggtaactctccattacattgctatacgatgaatacacgatttaatccatctgtattaaagatattgttacaccacggcatgcgtaactttgatagcaaggatgaaaaaggacatattcctctacaccactatctgattcattcactatcaatcgataacaagatctttgatatactaacggacaccattgatgactttagtaaatcatccgatctattgctgtgttatcttagatataaattcaatgggagcttaaactattacgttctgtacaaaggatccgaccctaattgcgtcgacgaggatggactcacttctcttcattactactgtaaacacatatccacgttctacaaaagcaattattacaagttaagtcacactaagatgcgagccgagaagcgattcatctacgcgataatagattatggagcaaacattaacgcggttacacacttaccttcaacagtataccaaacatagtcctcgtgtggtgtatgctcttttatctcgaggagccgatacgaggatacgtaataatcttgattgtacacccatcatggaacgattgtgcaacaggtcatattctcataatgttactcaattggcacgaacaaaaggaagaaggacaacatctactttatctattcataaaacataatcaaggatacactctcaatatactacggtatctactagataggttcgacattcagaaagacgaatactataataccgcctttcaaaattgtaacaacaatgttgcctcatacatcggatacgacatcaaccttccgactaaagacggtattcgacttggtgtttgaaaacagaaacatcatatacaaggcggatgttgtgaatgacatcatccaccacagactgaaagtatctctacctatgattaaatcgttgttctacaagatgtcagaattctctccctacgacgattactacgtaaaaaagatactagcctactgcctattaagggacgagtcattcgcggaactacatagtaaattctgtttaaacgaggactataaaagtgtatttatgaaaaatatatcattcgataagatagattccatcatcgtgacataagtcgccttaaagagattcgaatctccgacaccgacctgtatacggtatcacagctatcttaaagccatacattcggacagacacatttcatttcccatgtacgacgatctcatagaacagtgccatctatcgatggagcataaaagtaaactcgtcgacaaagcactcaataaattagagtctaccatcggtcaatctagactatcgtatttgcctccggaaattatgcgcaatatcatctaaacagtatgttgtacggaaagaaccattacaaatattatccatgatagaaagaaaatatctatatgattggagaagtaggaaacaggaacaagacgacgattactacattattaaatcatgaagtccgtattatactcgtatatattgtttctctcatgtataataataaacggaagagatatagcaccgcatgcaccatccgatggaaagtgtaaagacaacgaatacaaacgccataatttgtgtccgggaacatacgcttccagattatgcgatagcaagactaacacacgatgtacaccctgtggttcgggtaccttcacatctcgcaataatcatttacccgcttgtctaagttgtaacggaagacgcgatcgtgtaacacgactcacaatagaatctgtgaatgctctcccggatattattgtcttctcaaaggatcatccggatgcaaggcatgtgtttcccaaacaaaatgtggaataggatacggagtatccggagacgtcatctgttctccgtgtggtctcggaacatattctcacaccgtctcttccgcagataaatgcgaacccgtacccagtaatacctttaactatatcgatgtggaaattaatctgtatcccgtcaacgacacgtcgtgtactcggacgaccactaccggtctcagtgaatccatctcaacgtcggaactaactattactatgaatcataaagactgtaatcccgtatttcgtgaggaatacttctctgtccttaataaggtagcaacttcaggtttctttacaggagaaaggtgtgcactctgaatttcgagattaaatgcaataacaaagattcttcctccaaacagttaacgaaagcaaagaatgatgacggtatcatgccgcattcggagacagtaactctagtgggcgactgtatatctagcgtcgacatctatatactatatagtaataccaatactcaagactacgaaactgatacaatctcttatcatgtgggtaatgttctcgatgtcgatagccatatgcccggtagttgcgatatacataaactgatcactaattccaaacccacccgctttttatagtaagtttttcacccataaataataaatacaataattaatttctcgtaaaagtagaaaatatattctaatttattgcatggtaaggaagtagaatcataaagaacagtactcaatcaatagcaattatgaaacaatatatcgtcctggcatgcatgtgcctgccagtcttcagcaatcatcctcatcctcatcctcgtgtacggaagaagaaaacaaacatcatatgggaatcgatgttattatcaaagtcacaaagcaagaccaaacaccgaccaatgataagatttgccaatccgtaacggaaattacagagtccgagtcagatccaaatcccgaggtggaatcagaagatgattccacatcagtcgaggatgtagatcctcctaccacttattactccatcatcggtggaggtctgagaatgaactttggattcaccaaatgtcctcagattaaatccatctcagaatccgctgatggaaacacagtgaatgctagattgtccagcgtgtccccaggacaaggtaaggactctcccgcgatcactcatgaagaagctcttgctatgatcaaagactgtgaggtgtctatcgacatcagatgtagcgaagaagagaaagacagcgacatcaagacccatccagtactcgggtctaacatctctcataagaaagtgagttacgaagatatcatcggttcaacgatcgtcgatacaaaatgtgtcaagaatctagagtttagcgttcgtatcggagacatgtgcaaggaatcatctgaacttgaggtcaaggatggattcaagtatgtcgacggatcggcatctgaaggtgcaaccgatgatacttcactcatcgattcaacaaaactcaaagcgtgtgtctgaatcgataactctattcatctgaaattggatgagtagggttaatcgaacgattcaggcacaccacgaattaaaaaagtgtaccggacactatattccggtttgcaaaacaaaaatgttcttaactacattcacaaaaagttacctctcgcgacttcttctttttctgtctcaatagtgtgatacgattatgacactattcctattcctattcctatttcctttcagggtatcacaaaaatattaaacctctttctgatggtctcataaaaaaagttttacaaaaatatttttattctctttctctctttgatggtctcataaaaaaagttttacaaaaatatttttattctctttctctctttgat

SEQ ID NO: 7 - DNA, 196442 bp, Vaccinia virus
  source 1..196442: mol_type = other DNA
  misc_feature 1..196442: note = VIR40
atcaaagagagaaagagaataaaaatatttttgtaaaactttttttatgagaccatcaaagagagaaagagaataaaaatatttttgtaaaactttttttatgagaccatcagaaagaggtttaatatttttgtgataccctgaaaggaaataggaataggaataggaatagtgtcataatcgtatcacactattgagacagaaaaagaagaagtcgcgagaggtaactttttgtgaatgtagttaagaacatttttgttttgcaaaccggaatatagtgtccggtacacttttttaattcgtggtgtgcctgaatcgttcgattaaccctactcatccaatttcagatgaatagagttatcgattcagacacacgctttgagttttgttgaatcgatgagtgaagtatcatcggttgcaccttcagatgccgatccgtcgacatacttgaatccatccttgacctcaagttcagatgattccttgcacatgtctccgatacgaacgctaaactctagattcttgacacattttgtatcgacgatcgttgaaccgatgatatcttcgtaactcactttcttatgagagatgttagacccgagtactggatgggtcttgatgtcgctgtctttctcttcttcgctacatctgatgtcgatagacacctcacagtctttgatcatagcaagagcttcttcatgagtgatcgcgggagagtccttaccttgtcctggggacacgctggacaatctagcattcactgtgtttccatcagcggattctgagatggatttaatctgaggacatttggtgaatccaaagttcattctcagacctccaccgatgatggagtaataagtggtaggaggatctacatcctcgactgatgtggaatcatcttctgattccacctcgggatttggatctgactcggactctgtaatttccgttacggattggcaaatcttatcattggtcggtgtttggtcttgctttgtgactttgataataacatcgattcccatatgatgtttgttttcttcttccgtacacgaggatgaggatgaggatgattgctgaagactggcaggcacatgcatgccaggacgatatattgtttcataattgctattgattgagtactgttctttatgattctacttccttaccatgcaataaattagaatatattttctacttttacgagaaattaattattgtatttattatttatgggtgaaaaacttactataaaaagcgggtgggtttggaattagtgatcagtttatgtatatcgcaactaccgggcatatggctatcgacatcgagaacattacccacatgataagagattgtatcagtttcgtagtcttgagtattggtattactatatagtatatagatgtcgacgctagatatacagtcgcccactagagttactgtctccgaatgcggcatgataccgtcatcattctttgctttcgttaactgtttggaggaagaatctttgttattgcatttaatctcgaaattcagagtgcacacctttctcctgtaaagaaacctgaagttgctaccttattaaggacagagaagtattcctcacgaaatacgggattacagtctttatgattcatagtaatagttagttccgacgttgagatggattcactgagaccggtagtggtcgtccgagtacacgacgtgtcgttgacgggatacagattaatttccacatcgatatagttaaaggtattactgggtacgggttcgcatttatctgcggaagagacggtgtgagaatatgttccgagaccacacggagaacagatgacgtctccggatactccgtatcctattccacattttgtttgggaaacacatgccttgcatccggatgatcctttgagaagacaataatatccgggagagcattcacagattctattgtgagtcgtgttacacgatcgcgtcttccgttacaacttagacaagcgggtaaatgattattgcgagatgtgaaggtacccgaaccacagggtgtacatcgtgtgttagtcttgctatcgcataatctggaagcgtatgttcccggacacaaattatggcgtttgtattcgttgtctttacactttccatcggatggtgcatgcggtgctatatctcttccgtttattattatacatgagagaaacaatatatacgagtataatacggacttcatgatttaataatgtagtaatcgtcgtcttgttcctgtttcctacttctccaatcatatagatattttctttctatcatggataatatttgtaatggttctttccgtacaacatactgtttagatgatattgcgcataatttccggaggcaaatacgatagtctagattgaccgatggtagactctaatttattgagtgctttgtcgacgagtttacttttatgctccatcgatagatggcactgttctatgagatcgtcgtacatgggaaatgaaatgtgtctgtccgaatgtatggctttaagatagctgtgataccgtatacaggtcggtgtcggagattcgaatctctttaaggcgacttatgtcacgatgatggaatctatcttatcgaatgatatatttttcataaatacacttttatagtcctcgtttaaacagaatttactatgtagttccgcgaatgactcgtcccttaataggcagtaggctagtatcttttttacgtagtaatcgtcgtagggagagaattctgacatcttgtagaacaacgatttaatcataggtagagatactttcagtctgtggtggatgatgtcattcacaacatccgccttgtatatgatgtttctgttttcaaacaccaagtcgaataccgtctttagtcggaaggttgatgtcgtatccgatgtatgaggcaacattgttgttacaattttgaaaggcggtattatagtattcgtctttctgaatgtcgaacctatctagtagataccgtagtatattgagagtgtatccttgattatgttttatgaatagataaagtagatgttgtccttcttccttttgttcgtgccaattgagtaacattatgagaatatgacctgttgcacaatcgttccatgatgggtgtacaatcaagattattacgtatcctcgtatcggctcctcgagataaaagagcatacaccacacgaggactatgtttggtatactgttgaaggtaagtgtgtaaccgcgttaatgtttgctccataatctattatcgcgtagatgaatcgcttctcggctcgcatcttagtgtgacttaacttgtaataattgcttttgtagaacgtggatatgtgtttacagtagtaatgaagagaagtgagtccatcctcgtcgacgcaattagggtcggatcctttgtacagaacgtaatagtttaagctcccattgaatttatatctaagataacacagcaatagatcggatgatttactaaagtcatcaatggtgtccgttagtatatcaaagatcttgttatcgattgatagtgaatgaatcagatagtggtgtagaggaatatgtcctttttcatccttgctatcaaagttacgcatgccgtggtgtaacaatatctttaatacagatggattaaatcgtgtattcatcgtatagcaatgtaatggagagttacctcgtttattcagatcgcagtgtttaataactagcttaaacagatgagacgatgtatccacatcaaagaacgtaaaatacatatgacaaacattgttgacagaaacgtgaccttcattcttaccgtcgtccataaatacgttaggtatgtaccacatactgtcgcgaacgatgcgtacaatctcgtccatctcataatgatttactttttcataattaaagatgtgaaagaaaaccgaacaatatatttttttagtaatgtttatgcgagacatataaaataaactccgtgtttatgatgccggtaaatgtttttatcatcttggacggaatcgattttgtaatatgtcatggaaacaaatgaaacaggacattatcgctccatgataaattatttaatggagtaataaagtatctccatgggtaatttcgaaatcaagttatcgtctgtattaatgttgtccactatggagtcgatcctctcattgttctttacagtttctgtaatgatggacgttagttcttttttgtaccatttgatgtcggattctttgcgtatctcaatctgtggcgtttgcttcgtttaaataatatatcaaacatggagacgcctgatatgtaggcattcttcattctattaatgtctactctatagcgctttagttccttatgacgaccggagatatcatacttactttagaaggaaaatcatcatctaggattaaggcgtatctgatacaggcgaataatggttcaggatatagatagcgtatatctctattaaatgcgtcaatcatagtctctagagtgggatggtagctaagtaataaatcaactatcctcgttttgttttctcttctgtaactacttttctggatggccgtattgattatcgagcgtgatgttgtaacactcgctccatattccaataaccgctttgcaaattgtatattattgacatcgaccgcgtaatatagtagagttttattctcattatcgatcatatctatattatccatgtacttgcttagtatatcaaatacatctattagtatggtttcataacagtgatacccgcaattattaaatctcgataatatcagaccgtacatacatagacggccattgttcgatacgtgatttacagccatgtgtccattattttccacgataaaccttacgacgtttacatcgacgagattattattaacaaagtagtcgtgcagaggatagttgttgtccgttatctaacatgcatcgaacgaccatatcgccgtaatgtaagtagtttatcaacatggcttgtacgatggattcatcctgttgtctaaatctctttagaatgttatcgatgatgtagtggttatagtctctggaatcgtaagaagtaatactacgcattacgtcgacaagagtatgacgtctctcaataagaagattaacgatttccatgtctacattatatggggttactctaaatcgcttgtttagataatccgcctctaatatagggctgacgtcgtatactctacacgtgtccacatcctttattaataatttaacaatctctatatctatggttgagcaagaccagtagtattggatgggtaaagatcctccttcgtctctgccatggatggaaacattgttattgatcaaacatttaattacatccttggatagagattgagattctctatgagacgatatatagtaatgaagagagttcttacacatatcactgtcgtacatacaggtacgaaatacgtaaccggtgctgtaacattctgatttaagaagccatagcaatacttctggtctcggattaggcgtcgttacgtatatatccaccaatccgagaccattgattgcataattcgtattcttggacggacgtatccgtttatccacaattaggtattttagcagacgtaagtcgatattatccgaagacatatacgaatacagatcgaaatcatttatattcgacttgagttcgttagaggaattcgaatagctggatatcagtagatgcacaatttgagattttacgtatctatgcttactgtatgctcctagcggagttaatccttcgttgtttctacaaagtctctcgactccgcgagagagtaacagtcgaacaatcttaatgtctgtatcgcatttattgaagacgtaacaatgtagcgcattgtttcctcgtctatctatatgttttgataagttgtgacacgtttcaatttctagttttatttttttgtacgtcacatcttcatccagtagacgacatagaatacatgtgcaatccatagctattctggtgctaattattcctatttcacgaaaaatgatgaaggcaatcattcctcataagatgataaaaagtgtagtgagagagcatgaaggagatttagtatttagcagtgcggatatgatccaagagggtgagatagtcgttctcgttcagaatctttcgcagcataagtagtatgtcgatatacttatcgttgaagactcttccagagacgatagctgattgagtacaaagtccaatgattgcacgaagttcttcggcggttttcatggagtcatttctgatgaaacatttaatgatctccacgcaattgtcgatattgtcccacggaagtgaatccttcaactcaccaccaaagagctccgttgcatcagttctgaaagagatgagaagcctgtagagagaccctgcgctttctctatgggtccatctatgagaaacccacaggatgtattcagtcagacaatgtctgacgtcggccacggtattcagggagtccttagtagcgtggcaatgacagggtctgaactgggcacaaggagaggccattgtaaaggtagacctgtagccgtttatgctaatagagggctttaatttccatttttttaatgggttgtggatgaggaatgagagtgatatcatattgagatacgtagttatgtagaggtgtatttcctatattatttactttcggtttcatattttaccaactctttaataaatttcttttcacgatgcatcttattaaatgacgttttctcataagtggacatatagatgcagaagtaatgaagaaaagtattacctctatcatctacataattagggtctgctcctttttttaacaacttatacagtacgtagtagtagtttatcggttttaaatcaagtctagaatatatagtggattaatatatttttatattagctaaagctatctatactatcagaaagcatatcattctcaacttcatcatgagttaaatatttgtgtaatggatgtcatgaacattaaacgtattcatgacatactcctttaataggttttttaaaacagatgattcaaatccttcattcattagataacagtgtaacggagtcgtaccttctactagtttgtttatatcacagcattctacaaacagtctaaacaatagagaagacggacagactttaacgtataaatgacacatgttatcgatattcgttgatgaattattattaaacgtagttatgataaatgattctaacgacatctctcgctagagataaaatctagtatcgtatcattaaacatctttgcatcatactcgcatagcatagtttttcataattaatacaatatttaaaagacttattcggaaagtattttaatacatgtatcatcgatggagatccatatgaggagtcacttgtagttcttcagtagtaataacagtgctatcatcgatagtataattatatgtagaaggttcatatgttgttgtaattggagtaactgttggtagttcttccgtggaatcaataattatactaacagcaatagtataattatataaatatgttccgttgatatcacatattttaatgaactcatttctaacaccctcagctatatctgtccaattaaatgtagccaacaatctactacgttctctttgattgactacttgtacggtagcgacgctacactatctttattgtcttctacatgctccaattgaatgtcatgatacaacgcagtttttcttatgcatgtttcataacaccacgaacatgtcgcagtaagatatatagccagagataatttctgtaaattcatgattgccggtcataaacaagcccgtcaataattgtggctatatattcagtttatagagcaaaataattaagcacaatagcgcttaatctcaaaatatgttatgtttatttttttcatattaaacatactggttaaaatcctctaaaggctgatcttcatctataaatcaagatcataattacatttagacagtggtttcatgtttataaaaatgttctttttgtgtgaataaggaatatactaatcaataatcaaccatcgaccccattacgatagtatgcaggcaaccccccattagagaggtacgtgtaatcagtctctccagttttagtatttttataagtcattgttacataaacggcttttaaacagtctcctcgataataagccatatctggaaatttattaaatactcgagtcattttacgcacggtcaaaaaagtaagtaatgtcgacgacttcttacattctatagaaacacctagaatactcattttcttttggaaaatatcctcagactctgatttgaacaatgcacgacctatagtaaaccgtgaccaataagttatattagtcaatggtatatccaaaccatcaggtgtggatagtacgccgatagtccagtctttggtatcgatagtgtagttattgaactgagaagttaccgtatagtctttttggtcatctctaaacaaggaaactaatacctctacactattgaacgatttatcttccgtaatgggtggaataacgggaatataaagtggactagcgatggatgaagtcacgaatataagacacgctattaatccgtatatcatcattttgatattacttataataacgatttgtttaatttttagtttatactattaattgtaaatgatattattatttttttaagtattatcagctttagtttatactattactatttgtaatatttagacatagataaacgtgataaaagtctatttgtttatatttattgcggatagcagtatttccctataaaaagtatacgtcctgtgttgtctttaatcatgtacatgaatggatggtttatgtagaccttcgtacgatataccatcgaaaagttagtcataaatactcctgtaacggccgatgcttctgtatactcctcattaacatctataaacgtcgtatgtagaaatttttctacagtgatagtttcattacacatcttgctaaaatctgcataatatccgaatatattagtaagtcctaaattttctaaaatcggtaccagattatacggttctgtcatttccactttaaactttggcatatacaagtctatacttttagtagataacataccacaccattttttaaatttttcatctgttatatttttttctatgttatatataccttctatgtcgtccggtagtataattaccatactagagtttccctcgtatggaatatcgataatagagaatcctccgaataattcattaatatgtacatattgcaagttattctcggtacccaccatcatatcaacactggtaactatattcttagaaatataaaacttgtctgtatatgtaagatgtttagaaaatggatatttccacattgctttaaaatggacggcgctaacaactgtcatacgagtattaatggatagcggactagtcaataaggaattaattttaccatttgtcatcgtcttaacccattcgttgattagttcctttgtttggttagcattattaaagtttacagtttgaaaatcgtcttttattttttgtaggaaggaggcgtggaactcgatactatcgctaccgtatattttatttgcggtagctagtgtcgcacaatacggaatatctacgtccatgtcattattgtcatccttcttatcatcgggtgtattctcattcatattctctatatattttgatagttgttcagctgtagaaccagctgctccatgatttagaatagataaagtagataaaatagaaactggagaaatcaaaacattttcatcagggtgttttaagattagttctttaaagatatccatggtatagaccaaacaataacgataacgatatatatcataaataaataatgttaaatttcagtttatgtttgtaccccgtattcatacttaacaaattggtattgcgtacacaatcaatcatattacataccattaataatgcaagcataaaaaatcgttagtagatgtttctaaatataggttccgtaagcaaagaatataagaatgaagcggtaatgataaaatcaatcgttatctaaaatgatcatactcatttattttattctattatattaacacatacatttttaacagcaacacattcaatattgtattgttatttttatattatttacacaattaacaatatattattagtttatattactgaattaataatataaaattcccaatcttgtcataaacacacactgagaaacagcataaacacaaaatccatcaaaaatgtcgatgaaatatctgatgttgttgttcgctgctatgataatcagatcattcgccgatagtggtaacgctatcgaaacgacattgccagaaattacaaacgctacaacagatattccagctatcagattatgcggtccagagggagatggatattgtttacacggtgactgtatccacgctagagatatcgacggtatgtattgtagatgctctcatggttatacaggcattagatgtcagcatgtagtattagtagactatcaacgttcagaaaaaccaaacactacaacgtcatatatcccatctcccggtattgtgcttgtattagtaggcattattattatgtgttgtctattatctgtttataggttcactcgaagaactaataaactacctctacaagatatggttgtgccataatttttataaatttttttatgagtatttttacaaaaaaaatgtataaagtgtatgtcttatgtatatttataaaaatgctaagtatgcgatgtatctatgttatttgtatttatctaaacaatacctctacctctagatattatacaaaaattttttatttcggcatattaaagtaaaatctagttaccttgaaaatgaatacagtgggtggttccgtatcaccagtaagaacataatagtcgaatacagtatccgattgagattttgcatacaatactagtctagaaagaaatttgtaatcattttctgtgacgggagtccatatatctgtatcatcgtctagtttatcagtgtcccatgctatatttctgttatcatcattagttaatgaaaataactctcgtgcttcagaaaagtcaaatattgtatccatacatacatctccaaaactatcgcttatacgtttatctttaacgatacctatacctagatggttatttactaacagacattttccagatctattgactataactcctatagtttccacatcaaccaagtaatgatcatctattgttatataacaataacataactcttttccatttttatcagtatgtatatctatatcaacgtcgtcgttgtagtgaatagtagtcattgatctattatatgaaacggatatgtctagaacggcaattgtcttacgtccagttaacactttcgttgatttaaagtctagagtctttgcaaacataatatccttatccgactttatatttcctgtagggtggtataattttattttgcctccacatatcggtgtttccaaatatattactagacaatattccatatagttattagttaagggtacccaattagaacacgtacgcttattatcatcatttggatcgtatttcataaaagttattgtactatcgatgtcaacacattctacattttttaatcgtctatatagtatttttctgatattttctataatatcagaattgtcttccatcggaagttgtatactatcggaatcagttacatgtttaaataattctctgatgtcattccttatacaatcaaattcattattaaacagtttaatagtctgtagacctttatcgtcgtaaatatccattgtcttattagttacgcttatttttatgtgttttacgttgctttattatattttataagaatgattgtttgacgaatcacgagaactattaagacacattattaggtatatattataaaaaagtttttgattacgatgttataagaggaaagaggacacattaacatcatacatcaattaactacattcttataacatcgtaatcaaaagaattgcaattttgatgtataacaactgtcaatgggttatggaattgtatattacatattatacggtatgttggtaacgacaaataccgatcggtaatcgtttgccggtgtaatagaattatatatatctatctattacaccggctgagtatacataataataagttgtggtagtatgatctccatatttataatttaggactttgtattcagtatttttggaatcataaaaaataaaaaaaagttttactaatttaaaatttaaaaagtatttacatttttttcactgtttagtcgcggatatggaattcgatcctgccaaaatcaatacatcatctatagatcatgtaacaatattacaatacatagatgaaccaaatgatataagactaacagtatgcattatccgaaatattaataacattacatattatatcaatatcacaaaaataaatacacatttggctaatcaatttcgggcttggaaaaaacgtatcgccggaagggactatatgactaacttatctagagatacaggaatacaacaatcaaaacttactgaaactatacgtaactgtcaaaaaaatagaaacatatatggtctatatatacactacaatttagttattaatgtggttattgattggataaccgatgtgattgttcaatcaatattaagagggttggtaaattggtacatagctaataatacctatactccaaatacacccaataatacaacaaccatttctgagttggatatcatcaaaatactaaataaatacgaggacgtgtatagagtaagtaaagaaaaagaatgtggaatttgctatgaagttgtttactcaaaacgattagaaaacgatagatactttggtttattggattcgtgtactcatatattttgcataacatgcatcaatatatggcataaaacacgaagagaaaccggtgcgtcggataattgtcctatatgtcgtacccgttttagaaacataacaatgagcaagttctataagctagttaactaataaataaaaagtttaatttgttgacgacgtatgtcgttattttttctcgtataaaagattaatttgattctaatataatctttagtattggataaatatcaattcaaattaattccattagattatatcataaataaaaatagtagcacgcactacttcagccaaatattcttttttgaaacgccatctatcgtagtgaggacacaagtgaacctataatgagcaaatttattagtatcggttacatgaaggactttacgtagagtggtgattccactatctgtggtacgaacggtttcatcttctttgatgccatcacccagatgttctataaacttggtatcctcgtccgatttcatatcctttgccaaccaatacatatagctaaactcaggcatatgttccacacatcctgaacaatgaaattctccagaagatgttacaatgtctagatttggacatttggtttcaaccgcgttaacatatgagtgaacacacccatacatgaaagcgatgagaaataggattttcatcttgccaaaatatcactagaaaaaatttatttatcaattttaaaggtataaaaaatacttattgttgctcgaatattttgtatttgatggtatacggaagattagaaatgtaggtattatcatcaactgattctatggttttatgtattctatcatgtttcactattgcgttggaaataatatcatatgcttccacatatattttattttgttttaactcataatactcacgtaattctggattattggcatatctgtgaataattttagctccatgatcagtaaatattaatgagaacatagtattaccacctaccattatttttttcatttcgttcaattcttgattgcaaagatctatataatcattatagcgttgacttatggactctggaatcttagacgatgtacagtcatctataatcatggcatatttaatacattgttttatagcatagtagttatctacgatgttagatatttctctcaatgaatcaatcacacaatctaatgtaggtttatgacataatagcattttcagcagttcaatgtttctagattcgttgatggcaatggctatacatgtatatccgttatttgatctaatgttgacatctgaaccggattctagcagtaaagatactagagattgtttattatatctaacagccttgtgaagaagtgtttctcctcgtttgtcaatcatgttaatgtctttaagataaggtaggcaaatgtttatagtactaagaattgggcaagcataagacatgtcacaaagaccctttttgtatgtataagtgtagaaattataacatccatagttggatttacataggtgtccaatcgggatctctccatcatcgagatgattgacggcatctcccccttccttttttagtagatatttcatcgtgtaagaatcaatattaatatttctaaagtatccgtgtatagcctctttatttaccacagctccatattccaacatgcattccactaaagggatatcgatatcgccgaatgtcatatactcaattagtatatgttggaggacatccgagttcattgttttcaatatcaaagagatggtttccttatcatttctccatagtggtacaatactacacattattccgtgaggctttccattctccaaaaacaatttgaccaaatctacatctttattgtatctataatcactatttagataatcagccataattcctcgagtgcaacatgttagatcgtctatatatgaataagccgtgttatctattcctttcattaacaatttaacgatgtctatatctatatgagatgacttaatataatattgaagagctgtacaatagtttttatctatagaagacggcttgattccgtgattaattagacatttaacaacttccggacgcacatatgctctcgtatccgactctgaatacagatgagagatgatatacagatgcaatacggtaccgcaatttcgtagttgataatcatcatacgcgtatccgtactcgtcctcataaagaacactgcagccattttctatgaacaaatcaataattttaggaacaggatcattgtcattacataattttctataactgaacgatggttttcacatttaacactcaagtcaaatccatgttctaccaacacctttatcaagtcaacgtctacatttttggatttcatatagctgaatatattaaagtcatttatgttgctaaatccagtggcttctagtagagccatcgctatatcctttaactttaacatgtctactatttgtgtattcttctaatggggtagctgtctccaatttttgcgtaatggattagtgccactgtctagtagtagtttgacgacctcgacattattacaatgctcattaaaaaggtatgcgtgtaaagcattattcttgaattggttcctggtatcattaggatctctgtctctcaacatctgtttaagttcatcgagagccacctcctcattttccaaatagtcaaacattttgactgaatagaagtgaatgagctactgtgaactctatacacccacacaactaatgtcattaaatattatttttttgaatgtatttataccatgtcaaaaacttgtacaattattaataaaaataatttagtgtttaaattttaccagttccagattttacacctccgttaaccccactttttacaccactggacgaccctcctccccacattccaccgccaccagatgtataagttttagatcctttattactaccatcatgtccatggataaagacactccacatgccgccactaccccctttagaagacatattaataagacttaagagttaaggacaagtttaacaataaaattaatcacgagtaccctactaccaacctacactattatatgattatagtttctatttttacagtaccttaactaaagtttctagtcacaagagcaatactaccaacctacactattatatgattatagtttctatttttataggaacgcgtacgagaaaatcaaatgtctaatttctaacggtagtgttgataaacgattatcgtcaatggatacctcctctatcatgtcgtctattttcttactttgttctattaacttattagcattatatattatttgattataaaacttatattgcttattagcccaatctgtaaatatcggattattaacatatcgtttctttgtaggtttatttaacttgtacatcactgtaagcatgtccgtaccatttattttaatttgacgcatatccgcaatttctttttcgcagtcggttataaattctatatatgatggatacatgctacatgtgtacttataatcgactaatatgaagtacttgatacatattttcagtaacgatttattattaccacctatgaataagtacctgtgatcgtctaggtaatcaactgttttcttaatacattcgatggttggtaatttactcagaataatttccaatatcttaatatataattctgctatttctggaatatatttatctgccagtataacacaaatagtaatacatgtaaacccatattttgttattatattaatgtctgcgccattatctattaaccattctactaggctgacactatgcgacttaatacaatgataaagtatactacatccatgtttatctattttgtttatatcatcaatatacggcttacaaagttttagtatcgataacacatccaactcacgcatagagaaggtagggaataatggcataatatttattaggttatcatcattgtcattatctacaactaagtttccattttttaaaatatactcgacaactttaggatctctattgccaaatttttgaaaatatttatttatatgcttaaatctatataatgtagctccttcatcaatcatacatttaataacattgatgtatactgtatgataagatacatattctaacaatagatcttgtatagaatctgtatatcttttaagaattgtggatattaggatattattacgtaaactattacacaattctaaaatataaaacgtatcacggtcgaataatagttgatcaactatataattatcgattttgtgatttttcttcctaaactgtttacgtaaatagttagatagaatattcattagttcatgaccactatagttactatcgaataacgcgtcaaatatttcccgtttaatatcgcatttgtcaagataataatagagtgtggtatgttcacgataagtataataacgcatctctttttcgtgtgaaattaaatagtttatcacgtccaaagatgtagcataaccatcttgtgacctagtaataatataataatagagaactgttttacccattctatcatcataatcagtggtgtagtcgtaatcgtaatcgtctaattcatcatcccaattataatattcaccagcacgtctaatctgttctattttgatcttgtatccatactgtatgttgctacatgtaggtattcctttatccaataatagtttaaacacatctacattgggatttgatgttgtagcgtatttctctacaatattaataccatttttgatactatttatttctatacctttcgaaattagtaatttcaataagtctatatcgatgttatcagaacatagatattcgaatatatcaaaatcattgatatttttatagtcgactgacgacaataacaaaatcacaacatcgtttttgatattattatttttcttggtaacgtatgcctttaatggagtttcaccatcatactcatataatggatttgcaccactttctatcaatgattgtgcactgctggcatcgatgttaaatgttttacaactatcatagagtatcttatcgttaaccatgattggttgttgatgctatcgcattttttggtttctttcatttcagttatgtatggatttagcacgtttgggaagcataagctcatatgatttcagtactgtagtgtcagtactattagtttcgatcagatcaatgtctagatctatagaatcaaaacacgataggtcagaagataatgaatatctgtaggcttcttgttgtactgtaacttctcgttttgttagatggttgcatcgtgctttaacatcaatggtacaaattttatcctcgctttgtgtatcatattcgtccctactataaaattgtatattcagattatcatgagatgtgtatacgctaacggtatcaataaacggagcacaccatttagtcataaccgtaatccaaaaatttttaaagtatatcttaacgaaagaagttgtgtcattgtctacggtgtatggtactagatcctcataagtgtatatatctagagtaatgtttaatttatcaaatggttgataatatggatcctcatggcaatttcctaagacgaaaataagacataaacacgcaataaatctaattgcggacatggttactccttaaaaaaatactaataatcaccttggctatttagtaagtgtcatttaacactatactcatattaatccatggactcataatctctatacgggattaacggatgttctatatacggggatgagtagttctcttctttaactttatactttttactaatcatatttagactgatgtatgggtaatagtgtttgaagagctcgttctcatcatcagaataaatcaatatctctgtttttttgttatacagatgtattacagcctcatatattacgtaatagaacgtgtcatctaccttattaactttcaccgcatagttgtttgcaaatacggttaatcctttgacctcgtcgatttccgaccaatctgggcgtataatgaatctaaactttaatttcttgtaatcattcgaaataatttttagtttgcatccgtagttatcccctttatgtaactgtaaatttctcaacgcgatatctccattaataatgatgtcgaattcgtgctgtatacccatactgaatggatgaacgaataccgacggcgttaatagtaatttactttttcatctttacatattgggtactagttttactatcataagtttataaattccacaagctactatggaataagccaaccatcttagtataacacacatgtcttaaagtttattaattaattacatgttgttttatatatcgctacgaatttaaacagagaaatcagtttaggaaaaaaaattatctatctacatcatcacgtctctgtattctacgatagagtgctactttaagatgagacatatccgtgtcatcaaaaatatactccattaaaatgattattccggcagcgaacttgatattggatatatcacaacctttgttaatatctacgacaatagacagcagtcccatggttccataaacagtgagtttatctttctttgaagagatattttgtagagatcttataaaactgtcgaatgacatcgcatttatatctttagctaaatcgtatatgttaccatcgtaatatctaaccgcgtctatcttaaacgtttccatcgctttaaagacgtttccgatagatggtctcatttcatcagtcatactgagccaacaaatataatcgtgtataacatctttgatagaatcagactctaaagaaaacgaatcggctttattatacgcattcatgataaacttaatgaaaaatgtttttcgttgtttaagttggatgaatagtatgtcttaataattgttattatttcattaattaatatttagtaacgagtacactctataaaaacgagaatgacataactaatcataactagttatcaaagtgtctaggacgcgtaattttcatatggtatagatcctgtaagcattgtctgtattctggagctattttctctatcgcattagtgagttcagaatatgttataaatttaaatcgaataacgaacataactttagtaaagtcgtctatattaactcttttattttctagccatcgtaataccatgtttaagatagtatattctctagttactacgatctcatcgttgtctagaatatcacatactgaatctacatccaattttagaaattggtctgtgttacatatctcttctatattattgttgatgtattgtcgtagaaaactattacgtagaccattttctttataaaacgaatatatagtactccaattatctttaccgatatatttgcacacataatccattctctcaatcactacatctttaagattttcgttgttaagatatttggctaaactatataattctattagatcatcaacagaatcagtatatatttttctagatccaaagacgaactctttggcgtcctctataatattcccagaaaagatattttcgtgttttagtttatcgagatctgatctgttcatatacgccatgattgtacggtacgttatgataaccgcataaaataaaaatccattttcatttttaaccaatactattcataattgagattgatgtaatactttgttactttgaacgtaaagacagtacacggatccgtatctccaacaagcacgtagtaatcaaatttggtgttgttaaacttcgcaatatttatcaatttagatagaaacttatactcatcatctgttttaggaatccatgtattattaccactttccaacttatcattatcccaggctatgtttcgtccatcatcgttgcgcagagtgaataattcttttgtattcggtagttcaaatatataatccatgcatagatcggtaaagctattgtagatgtgatttttcctaaatctaatataaaactcgtttactagcaaacactttcctgatttatcgaccaagacacatatggtttctaaatctatcaagtggtggggatccatagttatgacgcagtaacatagattattaccttcttaactgtcgctaatatctatatatttattgttatcgtattggattctgcatatagatggcttgtatgtcaaagatatagaacacataaccaatttatagtcgcgctttacattctcgaatctaaagttaagagatttagaaaacattatatcctcggatgatgttatcactgtttctggagtaggatatattaaagtctttacagatttcgtccgattcaaataaatcactaaataatatcccacattatcatctgttagagtagtatcattaaatctattatattttatgaaagatatatcactgctcacctctatatttcgtacatttttaaactgtttgtataatatctctctgatacaatcagatatatctattgtgtcggtagacgataccgttacatttgaattaatggtgttccattttacaacttttaacaagttgaccaattcatttctaatagtatcaaacgctccatgattaaatattttaatagtatccattttatatcactacggacacaaagtagctgacataaaccattgtataatttttatgttttatgtttattagcgtacacattttggaagttccggcttccatgtatttcctggagagcaagtagatgatgaggaaccagataggttatatccgtacttgcacttaaagtttacattgtcgttgtatgagtatgatcttttaaacccgctagacaagtatccgtttgatattgtaggatgtggacatttaacaatctgacacgtgggtggatcggaccattctcctcctgaacacaggacaccagagttaccaatcaacgaatatccactattgcaactataagttacaacgcttccatcggtataaaaatcctcgtatccgttatgtcttccgttggatatagatggaggggattggcatttaacagattcacaaataggtgcctcgggattccataccatagatccagtagatcctaattcacaatacgatttagattcaccgatcaaatgatatccgctattacaagagtacgttatactagagccaaagtctactccgccaatatcaagttggccattatcgatatctcgaggcgatgggcatctccgtttaatacattgattaaagagtgtccatccagtacctgtacatttagcatatataggtcccattttttgctttctgtatccaggtagacatagatattctatagtgtctcctatgttgtaattagcattagcatcagtctccacactattcttaaatttcatattaatgggtcgtgacggaatagtacagcatgatagaacgcatcctattcccaacaatgtcaggaacgtcacgctctccaccttcatatttatttatccgtaaaaatgttatcctggacatcgtacaaataataaaaagcccatatatgttcgctattgtagaaattgtttttcacagttgctcaaaaacgatggcagtgacttatgagttacgttacactttggagtctcatctttagtaaacatatcataatattcgatattacgagttgacatatcgaacaaattccaagtatttgattttggataatattcgtattttgcatctgctataattaagatataatcaccgcaagaacacacgaacatctttcctacatggttaaagtacatgtacaattctatccatttgtcttccttaactatatatttgtatagataattacgagtctcgtgagtaattccagtaattacatagatgtcgccgtcgtactctacagcataaactatactatgatgtctaggcatgggagacttttttatccaacgatttttagtgaaacattccacatcgtttaatactacatatttttcatacgtggtataaactccacccattacatatatatcatcgtttacgaataccgacgcgcctgaatatctaggagtaattaagtttggaagtcttatccatttcgaagtgccgtgtttcaaatattctgccacacccgttgaaatagaaaattctaatcctcctattacatataactttccattgttaacacaagtactaacttctgattttaacgacgacatattagtaaccgttttccattttttcgtttcaagatctacccgcgatacggaataaacatgtctattgttaatcatgccgccaataatgtatagacaattatgtaaaacatttgcattatagaattgtctatctgtattaccgactatcgtccaatattctgttctaggagagtaatgggttattgtggatatataatcagagtttttaatgactactatattatgttttataccatttcgtgtcactggctttgtagatttggatatagttaatcccaacaatgatatagcattgcgcatagtattagtcataaacttgggatgtaaaatgttgatgatatctacatcgtttggatttttatgtatccactttaataatatcatagctgtaacatcctcatgatttacgttaacgtcttcgtgggataagatagttgtcagttcatcctttgataattttccaaattctggatcggatgtcaccgcagtaatattgttgattatttctgacatcgacgcattatatagttttttaattccatatcttttagaaaagttaaacatccttatacaatttgtggaattaatattatgaatcatagtttttacacatagatctactacaggcggaacatcaattattatggcagcaactagtatcatttctacattgtttatggtgatgtttatcttcttccagcgcatatagtctaatagcgattcaaacgcgtgatagtttataccattcaatataatcgcttcatcctttagatggtgatcctgaatgcgtttaaaaaaattatacggagatgccgtaataatttccttattcacttgtataatttccccattgatagaaaatatcacgctttccattcttgaagtactataagtaattatagtataatgtaaaggtttatatattcaatattttttataaaaaaatcatttcgacattaattcctttttaaatttccgtctatcatctatagaaacatattctatgaatttataaaatgcttttacgtgtcctatcgtaggcgatagaaccgctaaaaagcctattgaatttctacaaaagaatctattatatggtatagggagagtataaaacattaaatgcccgtacttattaaagtattcagtagccaatcctaactctttcgaatacttattaatggctcttgttctgtacgaatctatttttttgaacaacggacctagtggtatatcttgttctatgtatctaaaataatgtctgactagatccgttagtttaatatcctcagtcatcttgtctagaatggcaaatctaactgcgggtttaggctttagtttagtttttatatctacatctatgtctttatctaacaccaaaaatataatagctaatattttattacaatcatccggatattcttctacgatctcactaactaatgtttctttggttatactagtatagtcactatcggacaaataaagaaaatcagatgatcgatgaataatacatttaaattcatcatctgtaagatttttgagatgtctcattaaaatattattagggtcagtactcattatcattaggcagctattacttattttattatttttcaccatatagatcaatcattagatcatcaaaatatgtttcaatcatcctaaagagtatggtgaatgactcttcccatctaatttctgaacgttcaccaatgtctctagccactttggcactaatagcgatcattcgcttagcgtcttctatattattaactggttgattcaatctatctagcaatggaccgtcggacagcgtcattctcatgttcttaatcaatgtacatacatcgccgtcatctaccaattcatccaacaacataagctttttaaaatcatcattataataggtttgatcgttgtcatttctccaaagaatatatctaataagtagagtcctcatgcttagtaatttaactattttagttaacaactattttttatgttaaatcaattagtacaccgctatgtttaatacttattcatattttagtttttaggattgagaatcaatacaaaaattaatgcatcattaattttagaaatacttagtttccacgtagttaatgaaacatttgaactcatcgtacaagacgttctcgtacaggacgtaactataaaccggtttatatttgttcaagatagatacaaatccgataactttttttacgaattctacgggatccactttaaaagtgtcataccgggttctttttatttttttaaacagatcaatggtgtgatgttgattaggtcttttacgaatttgatatagaatagcgtttacatattctccataatggtcaatcgccatttgttcgtatgtcataaattctttaattatatgacactgtgtattgtttagttcatccttgttcattgttaggaatctatccaaaatggcaattatactagaactataggtgcgttgtatacacatattgatgtgtctgtttatacaatccatgatatttggatccatgctactaccttcgggtaaaattgtagcatcatataccatttctagtactttaggttcattattatccattgcagaggacgtcatgatcgcatcctaaaaaaatatattatttttatgttattttgttaaaaataatcatcgaatacttcgtaagatactccttcatgaacataatcagttacaaaacgtttatatgaagtaaagtatctacgatttttacaaaagtccggatgcataagtacaaagtacgcgataaacggaataataatagatttatctagtctatctttttctatagctttcatagttagatacatggtctcagaagtaggattatgtaacatcagcttcgataaaatgactgggttatttagtcttacacattcgctcatacatgtatgaccgttaactacagagtctacactaaaatgattgaacaatagatagtctaccattgtttcgtattcagatagtacagcgtagtacatggcatcttcacaaattatatcattgtctaatagatatttgacgcatcttatggatcccacttcaacagccatcttaaaatcggtaaaatcatattgctttcctttatcattaataatttctaaaacatcatctctatcataaaagatacaaatattaactgtttgatccgtaataacattgctagtcgatagcaatttgttaataagatgcgctgggctcaatgtcttaataagaagtgtaagaggactatctccgaatttgttttgtttattaacatccgttgatggaagtaaaagatctataatgtctacattcttgactgttttagagcatacaatatggagaggtgtatttccatcatgatctggttttgagggactaattcctagtttcatcatccatgagattgtagaagcttttggattgtctgacataagatgtctatgaatatgatttttgccaaatttatccactatcctggcttcgaatccgatggacattatttttttaaacactctttctgaaggatctgtacacgccaacaacggaccacatccttcttcatcaaccgagttgttaatcttggctccatactgtaccaataaatttattctctctatgacttcatcatctgttcccgagagataatatagaggcgttttatgctgtttatcacacgcgtttggatctgcgccgtgcgtcagcagcatcgcgactattctattattattaattttagaagctatatgcaatggataatttccatcatcatccgtctcatttggagagtatcctctatgaagaagttcttcgacaaatcgttcatctagtcctttaattccacaatacgcatgtagaatgtgataattatttccagaaggttcgatagcttgtagcatattcctaaatacatctaaatttttactattatatttggcataaagagatagataatactcggccgacataatgttgtccattgtagtataaaaattaatatttctatttctatttctgtatatttgcaacaatttactctctataacaaatatcataacttagttcttttatgtcaagaaggcactggtttagttcatctataaatgtcacgccataactaccacgcatgctatactcagaattatgataaagatatttatccttggggtgtaggtaatggggattaatctttgttggatcagtctctaagttaacacatgtcacacatgatccatttatagttatatcacacgatgatgatttatgaattgattccggaagatcgctatcgtattttgtggttccacaattcatttccatacatgttattgtcacactaatattatgatgaactttatctagccgctgagtggtaaacaacagaacagatagtttattatctttaccaacaccctcagccgctgccacaaatctctgatccgtatccatgatggtcatgtttatttctagtccgtatccagtcaacactatgttagcatttctgtcgatatagctttcactcatatgacactcaccaataatagtagaattaatgtcgtaatttacaccaatagtgagttcggcggcaaagtaccaataccggtaatcttgtcgaggaggacatatagtattcttgtattctaccgaatacccgagagatgcgatacaaaagagcaagactaatttgtaaaccatcttactcaaaatatgtaacaatagtacgatgcaatgagtaagacaataggaaatctatcttatatacacataattattctatcaattttaccaattagttagtgtaatgttaacaaaaatgtgggagaatctaattagtttttctttacacaattgacgtacatgagtctgagttccttgtttttgctaattatttcatccaatttattattcttgactatatcgagatcttttgtataggagtcagacttgtattcaacatgcttttctataatcattttagctatttcggcatcatccaatagtacattttccagattagcagaatagatattaatgtcgtatttgaacagagcctgtaacatctcaatgtctttattatctatagccaatttaatgtccggaatgaagagaagggaattattggtgtttgtcgacgtcatatagtcgagcaagagaatcatcatatccacgtgtccattttttatagtggtgtgaatacaactaaggagaatagccagatcaaaagtagatggtatttctgaaagaaagtatgatacaatacttacatcattaagcatgacggcatgataaaatgaagttttccatccagttttcccatagaacatcagtctccaatttttcttaacaaacagttttaccgtttgcatgttaccactatcaaccgcataatacaatgcagtgtttcccttgtcatcaaattgtgaatcatccagtccactgaatagcaaaatctttactattttggtatcttccaatgtggctgcctgatgtaatggaaattcattctctagaagatttttcaatgctccagcgttcaacaacgtacatactagacgcacgttattatcagctattgcataatacaaggcactatgtccatggacatccgccttaaatgtatctttactagagagaaagcttttcagctgcttagacttccaagtattaattcgtgacagatccatgtctgaaacgagacgctaattagtgtatattttttcattttttataattttgtcatattgcaccagaattaataatatctctaatagatctgattagtagatacatggctatcgcaaaacaacatatacacatttaataaaaataatatttattaagaaaattcagatttcacgtacccatcaatataaataaaataatgattccttacaccgtacccatattaaggagattccaccttacccataaacaatataaatccagtaatatcatgtctaatgatgaacacaaatggtgtattaaattccagtttttcaggagatgatctcgccgtagctaccataatagtagatgcctctgctacagttccttgttcgtcgacatctatctttgcattctgaaacattttataaatatataatgggtccctagtcatatgtttaaacgacgcattatctggattaaacatactaggagccatcatttcggctatcgacttaatatccctcttattttcgatagaaaatttagggagtttaagattgtacactttattccctaattgaaacgaccaatagtctaattttgcagccgtaatagaatctgtgaaatgggtcatattatcacctattgccaggtacatactaatattagcatccttatacggaaggcgtaccatgtcatattctttgtcatcgattgtgattgtatttccttgcaatttagtaactacgttcatcatgggaaccgttttcgtaccgtacttattagtaaaactagcattgcgtgttttagtgatatcaaacggatattgccatgtacctttaaaatatatagtattaatgattgcccatagagtattattgtcgagcatattagaatctactacattagacataccggatctacgttctactatagaattaattttattaaccgcatctcgtctaaagtttaatctatataggccgaatctatgatattgttgataatacgacggtttaatacacacagtattatctacgaaactttgataagttagatcagtgtacgtatatttagatgttttcagcttagctaatcctgatattaattctgtaaatgctggacccagatctctttttctcaaatccatagtcttcaataattctattctagtattacctgatgcaggcaatagcgacataaacatagaaaacgaatagccaaacggcgagaagacaatattatcatcttgaatatttttatacgctactataccggcattggtaaatccttgcagacgataggtagacgctgaacacgttaacgatagtatcaataacgcaatcatgattttatggtattaataattaaccttatttttatgttcggtataaaaaaattattgatgtctacacatccttttgtaattgacatctatatatccttttgtataatcaactctaatcactttaacttttacagttttccctaccagtttatccctatattcaacatatctatccatatgcatcttaacactctctgccaagatagcttcagagtgaggatagtcaaaaagataaatatatagagcataatccttctcgtatactctgccctttattacatcgcccgcattgggcaacgaataacaaaatgcaagcatcttgttaacgggctcgtaaattgggataaaaattatgtttttatatctattttattcaagagaatattcaggaatttctttttccggttgtatctcgtcgcagtatatatcatttgtacattgtttcatattttttaatagtttacaccttttagtaggactagtatcgtacaattcatagctgtattttgaattccaatcacgcataaaaatatcttccaattgttgacgaagacctaatccatcatccggtgtaatattaatagatgctccacatgtatccgtaaagtaatttcctgtccaatttgaggtacctatataggccgttttatcggttaccatatatttggcatggtttaccctagaatacggaatgggaggatcagcatctggtacaataaatagctttacttctatatctatgtttttagattttagcatagcgatagatcttaaaaagtttctcatgataaacgaagatcgttgccagcaactaatcaatagcttaacggatacttgtctgtctatagcggatcttcttaattcatcttctatataaggccaaaacaaaattttacccgccttcgaataaataatagggataaagttcataacagatacataaacgaatttactcgcatttctaatacatgacaataaagcggttaaatcattggttctttccatagtacatagttgttgcggcgcagaagcaataaatacagagtgtggaacaccacttacgttaatactaagaggatgatctgtattataatacgacggataaaagtttttccaattatatggtagattgttaactccaagataccagtatacctcaaaaatttgagtgagatccgctgccaagttcctattattgaagatcgcaatacccaattctttgacctgagttagtgatctccaatccatgttagcgcttcctaaataaatatgtgtattatcagatatccaaaattttgtatgaagaactcctcctaggatatttgtaatatctatgtatcgtacttcaactccggccatttgtagtctttcaacatcctttaatggtttgttagatttattgacggctactctaactcttactcctcttttgggtaattgtacaatctcgtttaatattatcgtgccgaaattcgtacccacttcatccgataaactccaataaaaagatgatatatctagtgtttttgtggtattggatagaatttccctccacatgttaaatgtagacaaatatactttatcaaattgcatacctataggaatagtctctgtaatcactgcgattgtattatccggattcattttatttgttaaaaaataatcctatatcacttcactctattaaaaatccaagtttctatttctttcatgactgattttttaacttcatccgtttccttatgaagatgatgtttggcaccttcataaatttttatttctctattacaatttgcatgttgcatgaaataatatgcacctaaaacatcgctaatctcattgtttgttccctggagtatgagagtcgggggggtgttaatcttggaaattatttttctaaccttgttggtagccttcaagacctgactagcaaatccagccttaattttttcatgattgattaatgggtcgtattggtatttataaactttatccatatctctagatactgattctggacatagctttccgactggcgcatttggtgtgatggttcccataagtttggcagctagcagattcagttttgaaacagcatctgcattaactagaggagacattagaatcattgctgtaaacaagtttggattatcgtaagaggctagtatagaaattgttgctcccatggaatgacccaataagtagatttaatagttaccacgtgctgtaccaaagtcatcaatcatcattttttcaccattacttcttccatgtccaatatgatcatgtgagaatactaaaattcctaacgatgatatgttttcagctagttcgtcataacgtccagaatgtttaccagctccatgacttatgaatactaatgccttaggatatgtaataggtttccaatatttacaatatatgtaatcattgtccagattgaacatacagtttgcactcatgattcacgttatataactatcaatattaacagttcgtttgatgatcatattatttttatgttttattgataattgtaaaaacatacaattaaatcaatatagaggaaggagacggatactgtcttttgtgagatagtcatggcgactaaatcagattatgaggatgctgttttttactttgtggatgatgataaaatatgtagtcgcgactccatcatcgatctaatagatgaatatatcacgtggagaaatcatgttatagtgtttaacaaagatattaccagttgtggaagactgtacaaggaattgatgaagttcgatgatgccgctatacagtactatggtattgataaaattaatgagattgtcgaagctatgagcgaaggagaccactacatcaattttacaaaagtccatgatcaggaaagtttattcgctaccataggaatatgtgctaaaatcactgaacattggggatacaaaaagatttcagaatctagattccaatcattgggaaacattacagatctgatgaccgacgataatataaacatcttgatactttttctagaaaaaaaattgaattgatgatataggggtcttcataacgcataattattacgttagcattctatatccgtgttaaaaaaaattatcctatcatgtatttgagagttttatatgtagcaaacatgatagctgtgatgccaataagctttagatattcacgcgtgctagtgttagggatggtattatctggtggtgaaatgtccgttatataatctacaaaacaatcatcgcatatagtatgcgatagtagagtaaacatttttatcgtttctactgggttcatacatcgtctacccaattcggttatgaatgaaattgtcgccaatcttacacccaaacccttgttatccattagcatagtattaacttcgttatttatgtcataaactgtaaatgattctgtagatgccatatcatacatgatattcatgtccctattataatcattactaactttatcacaatatatgttgataatatctatatatgatctagtctttgtgggcaactgtctatacaagtcgtctaaacgttgtttactcatatagtatcgaacagccatcattacatggtcccgttccgttgatagataatcgagtatgttagtggacttgtcaaatctatataccatattttctggaagtggatatacatagtcgtgatcaacattattgctagcctcatcttctatatcctgtactataccattatctatatcatctacataatctacgatattattatacataaacatcgacaacatactattgtcaattatctaagtcctgttgatccaaacccttgatctcctctatctgtactatctagagattgtacttcttccagttctggataatatatacgttgatagattagctgggctattctatcccccgtatttacattaaacgtacattttccattattaataagaataactcctatgtttcccctataatcttcgtctattacaccgcctcctatatcaatgccttttagggacagaccagacctaggagctattctaccatagcagaacttaggcatggacatactaatatctgtcttaattaactgtcgttctccaggagggatagtataatcgtaagcgctatataaatcatatccggcggcgtaaggtgattgcctagtaggagatttagctctgttagtttccttaacaaatctaactggtgagttaatattcatgttgaacataaaactaatattttatttcaaaattatttaccatcccatatattccatgaataagtgtgatgattgtacacttctatagtatctatatacgattcacgataaaatcctcctatcaatagcagtttattatccactatgatcaattctggattatccctcggataaataggatcatctatcagagtccatgtattgctggattcacaataaaattccgcatttctaccaaccaagaataaccttctaccgaacactaacgcgcatgatttataatgaggataataagtggatggtccaaactgccactgatcatgattgggtagcaaatattctgtagttgtatcagtttcagaatgtcctcccattacgtatataacattgtttatagatgccactgctggattacatctaggtttcagaagactcggcatattaacccaagcagcatccccgtggaaccaacgctcaacagatgtgggatttggtagacctcctactacgtataatttattgttagcgggtatcccgctagcatacagtctggggctattcatcggaggaattggaatccaattgtttgatatataatttacagctatagcattgttatgtatttcattgttcatccatccaccgatgagatatactacttctccaacatgagtacttgtacacatatggaatatatctataatttgatccatgttcataggatactctatgaatggatacttgtatgatttgcgtggttgtttatcacaatgaaatattttggtacagtctagtatccattttacattatttatacctctgggagaaagataatttgacctgattacatttttgataaggagtagcagatttcctaatttatttcttcgctttatataccacttaatgacaaaatcaactacataatcctcatctggaacatttagttcatcgctttctagaataagtttcatagatagataatcaaaattgtctatgatgtcatcttccagttccaaaaagtgtttggcaataaagtttttagtatgacataagagattggatagtccgtattctatacccatcatgtaacactcgacacaatattcctttctaaaatctcgtaagataaagtttatacaagtgtagatgataaattctacagaggttaatatagaagcacgtaataaattgacgacgttatgactatctatatatacctttccagtatatgagtaaataactatagaagttaaactgtgaatgtcaaggtctagacaaacccttgtaactggatctttatttttcgtgtatttttgacgtaaatgtgtgcgaaagtaaggagataactttttcaatatcgtagaattgactattatattgccacctatagcatcaataattgttttgaatttcttagtcatagacaatgctaatatattcttacagtacacagtattaacaaatatcggcatttatgtttctttaaaagtcaacatctagagaaaaatgattatctttttgagacataactcccattttttggtattcacccacacgtttttcgaaaaaattagtttttccttccaatgatatattttccatgaaatcaaacggattggtaacattataaatttttttaaatcccaattcagaaatcaatctatccgcgacgaattctatatatgttttcatcatttcacaattcattcctataagtttaactggaagagccgcagtaagaaattcttgttcaatggatactgcatctgttataatagatctaacggtttcttcactcggtggatacaataaatgtttaaacatcaaacatgcgaagtcgcagtgtagaccctcgtctctactaattagttcgttggaaaacgtgagtccgggcattaggccacgctttttaagccaaaatatggaagcgaatgatccggaaaagaagattccttctactgcagcaaaggcaataagtctctctccataaccggcgctgtcatgtatccacttttgagcccaatcggccttcttttttacacaaggcattgtttctatggcattaaagagatagtttttttcattactatctttaacataagtatcgatcaaaagactatacatttccgaatgaatgttttcaatggccatctgaaatccgtagaaacatctagcctcggtaatctgtacttctgtacaaaatcgttccgccaaattttcattcactattccgtcactggctgcaaaaaacgccaatacatgttttataaaatatttttcgtctggtgttagtttattccaatcattgatatctttagatatatctacttcttccactgtccaaaatgatgcctctgcctttttatacatgttccagatgtcatgatattggattgggaaaataacaaatctatttggatttggtgcaaggatgggttccataactaaattaacaatatcaataaattttttttcagttatctatatgcctgtacttggattttttgtacatcgatatcgccgcaatcactacaataattacaagtattattgatagcattgttattagtactatcataattaaattatcgacattcatgggtgctgaataatcgttattatcatcattatcattttgtaattgtgacatcatactaaataaatcgtttgcgagattgttgtgggaagcgggcatggaggatgcattatcattattatttaacgccttccatttggattcacaaatatggcgcgcgttcaacattttatggaaactataattttgtgaaaacagataacaagaaaactcgtcatcgttcaaatttttaacgatagtaaaccgattaaacgtcgagctaatttctaacgctagcgactctgttggatatgggtttccagatatatatcttttcagttcccctacgtatctataatcatctgtaggaaatggaagatatttccatttatctactgttcctaatatcatatgtggtggtgtagtagaaccattaagcgcgaaagatgttatttcgcatcgtattttaacttcgcaataatttctggttagataacgcactctaccagtcaagtcaatgatattagcctttacagatatattcatagtagtcgtaacgatgactccatcttttagatgcgatactcctttgtatgtaccagaatcttcgtacctcaaactcgatatatttaaacaagttaatgagatattaacgcgttttatgaatgatgatatataaccagaagttttatcctcggtggctagcgctataaccttatcattataataccaactagtgtgattaatatgtgacacgtcagtgtgggtacaaatatgtacattatcgtctacgtcgtattcgatacatccgcatacagccaacaaatataaaatgacaaatactctaacgccgttcgtacccatcttgatgcggtttaataaatgttttgatttcaatttattgtaaaaaaagattcggttttatactgttcgatattctcattgcttatattctcatctatcatctccacacagtcaaatccgtggttagcatgcacctcatcaaccggtaaaagactatcggactcttctatcattataactctagaatatttaatttggtcattattaatcaagtcaattatcttatttttaacaaacgtgagtattttactcattttttataaaaacttttagaaatatacagactctatcgtgtgtctatatcttctttttatatccaatgtatttatgtctgatttttcttcatttatcatatataatggtccaaattctacacgtgcttcggattcatccagatcattaaggttcttataattgtaacatccttctcttccctcttctacatcttccttcttattcttattcttagcgtcacagaatctaccacagcaggatcccatgacgagcgtcatattaaactaatccattttcaattataatatatgattagtaatgaccattaaaataaaaaatattcttcataaccggcaagaaagtgaaaagttcacattgaaactatgtcagtagtatacatcatgaaatgatgatatatatatactctattttggtggaggattatatgatataattcgtggataatcattcttaagacacatttcttcattcgtaaatcttttcacgttaaatgagtgtccatattttgcaatttcttcatatgatggcggtgtacgtggacgaggctgctcctgttcttgttgtggtcgccgactgtcgtgtttgcgtttatccctccattatcgcgattgcgtagatggagtactattatataccttgtaattaaatttttttattaattaaacgtataaaaacgttccgtatctgtatttaagagccagatttcgtctaatagaacaaatagctacagtaaaaataactagaataattgctacacccactagaaaccacggatcgtaatacggcaatcggttttcgataataggtggaacgtatattttatttaaggacttaacaattgtctgtaaaccacaatttgcttccgcggatcctgtattaactatctgtaaaagcatatgttggccgggcggagccgaacattctccgatatccaatttctgtatatctataatattattaacctccgcatacgcattacagttcttttctagcttggataccgcactaggtacatcgtctagatctattcctatttcctcagcgatagctcttctatccttttccggaagcaatgaaatcacttcaataaatgattcaaccatgagtgtgaaactaagtcgagaattactcatgcatttgttagttattcggagcgcgcaatttttaaactgtcctataacctctcctatatgaatagcacaagtgacattagtagggatagaatgttgagctaatttttgtaaataactatctataaaaagattatacaaagttttaaactctttagtttccgccatttatccagtctgagaaaatgtctctcataataaatttttccaagaaactaattgggtgaagaatggaaacctttaatctatatttatcacagtctgttttggtacacatgatgaattcttctaatgccgtactaaattcgatatctttttcgatttctggatatgtttttaataaagtatgaacaaagaaatggaaatcgtaataccagttatgtttaactttgaaattgttttttattttcttgttaatgattccagccacttgggaaaagtcaaagtcgtttaatgccgatttaatacgttcattaaaaacaaactttttatcctttagatgaattattattggttcattggaatcaaaaagtaagatattatcgggtttaagatctgcgtgtaaaaagttgtcgcagcatggtagttcgtagattttaatgtataacagagccatctgtaaaaagataaactttatgtattgtaccaaagatttaaatcctaatttgatagctaactcggtatctactttatctgccgaatacagtgctaggggaaaaattataatgtttcctctttcgtattcgtagttagttctcttttcatgttcgaaaaagtgaaacatgcggttaaaatagtttataacattaatattactgttaataactgccgggtaaaagtgggatagtaatttcacgaatttgatactgtcctttctctcgttaaacgcctttagaaaaactttagaagaatatctcaatgatagttcctgaccatccatagtttgtatcaataatagcaacatatgaagaacacgtttatacagagtatgtaaaaatgttaatttatagtttaatcccatggcccacgcacacacgattaattttttttcatctccctttagattgttgtatagaaatttgggtactgtgaactccgccgtagtttccatgggactatataattttgtggcctcgaatacaaattttactacatagttatctatcttaaaaactataccatatcctcctgtagatatgtgataaaaatcgtcgtttataggataaaatcgtttatccttttgttggaaaaaggatgaattaatgtaatcattctcttctatctttagtagtgtttccttattaaaattcttaaaataatttaacaatctaactgacggagcccaattttggtgtaaatctaattgggacattatattgttaaaatacaaacagtctcctaatataacagtatctgataatctatggggagacatccattgatattcaggggatgaatcattggcaacacccatttattgtacaaaaagccccaatttacaaacgaaagtccaggtttgatagagacaaactattaactattttgtctctgtttttaacacctccacagtttttaatttctttagtaatgaaattattcacaatatcagtatcttctttatctaccagagattttactaacttgataaccttggctgtctcattcaatagggtagtaatatttgtatgtgtgatattgatatctttttgaattgtttcttttagaagtgattctttgatggtgccagcatacgaattacaataatgcagaaactcggttaacatgcaggaattatagtaagccaattccaattgttgcctgtgttgtattagagtgtcaatatgagcaatggtgtccttgcgtttctctgatagaatgcgagcagcgattttggcgttatcatttgacgatatttctggaatgacgaatcctgtttctactaactttttggtaggacaaagtgaaacaatcaagaagatagcttctcctcctatttgtggaagaaattgaactcctctagatgatctactgacgatagtatctccttgacagatattggaccgaattacagaagtacctggaatgtaaagccctgaaaccccctcattttttaagcagattgttgccgtaaatcctgcactgtgaccaagatagagagctcctttggtgaatccatctctatgtttcagtttaaccaagaaacagtcagctggtctaaaatttccatctctatctaatacagcatctaacttgatgtcaggaactatgaccggtttaatgttatatgtaacattgagtaaatccttaagttcataatcatcactgtcatcagttatgtacgatccaaacaatgtttctactggcatagtggatacgaagatgctatccatcagaatgtttccctgattagtattttctatatagctattcttctttaaacgattttccaaatcagtaactatgttcatttttttaggagtaggacgcctagccagtatggaagaggattttctagatcctctcttcaacatctttgatctcaatggaatgcaaaaccccatagtgaaacaaccaacgataaaaataatattgtttttcactttttataattttaccatctgactcatggattcattaatatctttataagagctactaacgtataattctttataactgaactgagatatatacaccggatctatggtttccataattgagtaaatgaatgctcggcaataactaatggcaaatgtataaaacaacgaaattatactagagttgttaaagttaatattttctatgagctgttccaataaattatttgttgtgactgcgttcaagtcataaatcatcttgatactatccagtaaacagtctttaagttctggaatattatcatcccattgtaaagcccctaattcgactatcgaatatcctgctctgatagcagtttcaatatcgacggacgtcaatactgtaataaaggtggtagtattgtcatcatcgtgataaactacgggaatatggtcgttagtaggtacggtgactttacacaacgcgatatataactttccttttgtaccatttttaacgtagttgggacgtcctgcagggtattgttttgaagaaatgatatcgagaacagatttgatacgatatttgttggattcctgattattcactataatataatctagacagatagatgattcgataaatagagaaggtatatcgttggtaggataatacatccccattccagtattctcggatactctattgatgacactagttaagaacatgtcttctattctagaaaacgaaaacatcctacatggactcattaaaacttctaacgctcctgattgtgtctcgaatgcctcgtacaaggatttcaaggatgccatagattctttgaccaacgatttagaattgcgtttagcatctgatttttttattaaatcgaatggtcggctctctggtttgctaccccaatgataacaatagtcttgtaaagataaaccgcaagaaaatttatacgcatccatccaaataaccctagcaccatcggatgatattaatgtattattatagattttccatccacaattattgggccagtatactgttagcaacggtatatcgaatagattactcatgtaacctactagaatgatagttcgtgtactagtcataatatctttaatccaatctaagaaatttaaaattagattttttacactgttaaagttaacaaaggtattacccggatacgtggatatcatatatggcattggtccattatcagtaatagctccataaactgatacggcgatggtttttatatgtgtttgatctaacgaggaagaaattcgcgcccacaattcatctctagatatgtatttaatatcaaacggtaacacatcaatttcgggacgcgtatatgtttctaaatttttaatccaaatataatgatgacctatatgccctattatcatactgtcaactatagtacacctagagaacttacgatacatctgtttcctataatcgttaaattttacaaatctataacatgctaaaccttttgacgacaaccattcattaatttctgatatggaatctgtattctcgataccgtattgttctaaagccagtgctatatctccctgttcgtgggaacgctttcgtataatatcgatcaacggataatctgaagtttttggagaataatatgactcatgatctatttcgtccataaacaatctagacataggaattggaggcgatgatcttaattttgtgcaatgagtcgtcaatcctataacttctaatattgtaatattcatcatcgacataacactatctatgttatcatcgtatattagtataccacggccttcttcatttcgtgccaaaataatatacagtcttaaataattacgcaatatctcaatagtttcataattgttagctgttttcatcaaggtttgtatcctgtttaacatgatggcgttctataacgtctctattttctatttttaattttttaaatttttaacgatttactgtggctagatacccaatctctctcaaatatttttttagcctcgcttacaagctgtttatctatactattaaaactgacgaatccgtgattttggtaatgggttccgtcgaaatttgccgaagtgatatgaacatattcgtcgtcgactatcaacaattttgtattattctgaatagtgaaaaccttcacagatagatcattttgaacacacaacgcgtctagacttctggcggttgccatagaatatacgtcgttcttatcccaattaccaactagaagtctgatcttaactcctctattaatggctgcttctataatggagttgtaaatgtcaggccaatagtagctattaccgtcgacacgtgtagtgggaactatggccaaatgttcaatatctatactagtcttagccgacttgagtttatcaataactacatcagtgtctagatctctagaatatcccaataggtgttctggagaatcagtaaagaacactccacctataggattcttaatatgatacgcagtgctaactggcagacaacaagccgcagagcataaattcaaccatgaattttttgcgctattaaaggctttaaaagtatcaaatcttctacgaagatctgtggccagcgggggataatcagaatatacacctaacgttttaatcgtatgtatagatcctccagtaaatgacgcgtttcctacataacatctttcatcatctgacacccaaaaacaaccgagtagtagtcccacattattttttttatctatattaacggttataaaatttatatccgggcagtgactttgtagctctcccagatttcttttccctcgttcatctagcaaaactattattttaatccctttttcagatgcctcttttagtttatcaaaaataagcgcgcccctagtcgtactcagaggattacaacaaaaagatgctatgtatatatatttcttagctagagtgataatttcgttaaaacattcaaatgttgttaaatgatcggatctaaaatccatattttctggtagtgtttctaccagcctacattttgctcccgcaggtaccggtgcaaatggccacatttagttaacataaaaacttatacatcctgttctatcaacgattctagaatatcatcggctatatcgctaaaattttcatcaaagtcgacatcacaacctaactcagtcaatatattaagaagttccatgatgtcatcttcgtttatttctatatccgtatccattgtagattgttgaccgattatcgagtttaaatcattactaatactcaatccttcagaatacaatctgtgtttcattgtaaatttataggcggtgtatttaagttggtagattttcaattatgtatcaatatagcaacagtagttcttgctcctccttgattctagcatcctcttcattattttcttctacgtacataagcatgtccaatacgttagacaacacaccgacgatggcggccgccacagacacgaatatgactagaccgatgaccatttaaaaacccctctctagctttcacttaaactgtatcgattattcttttagaacatgtataatataaaaacattattctatttcgaatttaggcttccaaaaatttttcatccgtaaaccgataataatatatatagacttgttaatagtcggaataaatagattaatgcttaaactatcatcatctccacgattagagatacaatatttacattctttttgctgtttcgaaactttatcaatacacgttaatacaaacccaggaaggagatattgaaactgaggctgttgaaaatgaaacggtgaatacaataattcagataatgtaaaatcatgattccgtattctgatgatattagaactgctaatggatgtcgatggtatgtatctaggagtatctattttaacaaagcatcgatttgctaatatacaattatcattttgattaattgttattttattcatattcttaaaaggtttcatatttatcaattcttctacattaaaaatttccatttttaatttatgtagccccgcaatactcctcattacgtttcattttttgtctataatatccattttgttcatctcggtacatagattatccaattgagaagcgcatttagtagttttgtacattttaagtttattgacgaatcgtcgaaaactagttatagttaacattttattatttgataccctgatattaatacccctgccgttactattatttataactgatgtaacccacgtaacattagaattaattatcgatagtaatgcatcgacgcttccaaaattgtctattataaactcaccgataatttttttattgcatgttttcatattcattaggattatcaaatctttaatcttattacgattgtatgcgttgatattacaagacgtcattctaaaagacggaggatctccatcaaatgccagacaatcacgtacaaagtacatggaaataggttttgttctattgcgcatcatagattcatatagaacacccatagaaatactaatttgttttactctataaaatactaatgcatctatttcatcgttttgtataacgtctttccaagtgccaaattccaaatttttttcattgatagtaccaaattcttctatctctttaactacttgcatagataggtaattacagtgatgcctacatgccgttttttgaaactgaatagatgcgtctagaagcgatgctacactagtcacaatcaccactttcatatttagaatatatgtatgtaaaaatatagtagaatttcattttgtttttttctatgctataaatgaattctcattttgcatctgctcatactccgttttatatcaataccaaagaaggaagatatctggttctaaaagccgttaaagtatgcgatgttagaactgtagaatgcgaaggaagtaaagcttcctgcgtactcaaagtagataaaccctcatcgcccgcgtgtgagagaagaccttcgtccccgtccagatgcgagagaatgaataaccctggaaaacaagtcccgtttatgaggacggacatgctacaaaatatgttcgcggctaatcgcgataatgtagcttctagacttttgtcctaaaatactattatatccttttcgatattaataaatccgtgtcgtccaggttttttatctctttcagtatgtgaatagataggtattttatctctattcatcatcgaatttaagagatccgataaacattgtttgtattctccagatgtcagcatctgatacaacaatatatgtgcacataaacctctggcacttatttcatgtaccttccccttatcactaaggagaatagtatttgagaaatatgtatacatgatattatcatgaattagatatacagaatttgtaacactctcgaaatcacacgatgtgtcggcgttaagatctaatatatcactcgataacacattttcatctagatacactagacattttttaaagctaaaatagtctttagtagtgacagtaactatgcgattattttcatcgatgatacatttcatcggcatattattacgcttaccatcaaagactataccatgtgtatatctaacgtattctagcatggttgccatacgtgcattaaacttttcaggatctttggatagatcttccaatctatctatttgagaaaacatttttatcatgttcaatagttgaaacgtcggatccactatatagatattatctataaagattttaggaactacgttcatggtatcctggcgaatattaaaactatcaatgatatgattatcgttttcatcttttatcaccatatagtttctaagatatgggattttacttaatataatattatttcccgtgataaattttattagaaaggccaaatctataagaaaagtcctagaattagtctgaagaatatctatatcgccgtaccgtatatttggattaattagatatagagaatatgatccgtaacatatacaacttttattatggcgtctaagatattcttccatcaacttattaacatttttgactagggaagatacattatgacgtcccattacttttgccttgtctattactgcgacgttcatagaatttagcatatctcttgccaattcttccattgatgttacattataagaaattttagatgaaattacatttggagctttaatagtaagaactcctaatatgtccgtgtatgtggtcactaatacagattgtagttctataatcgtaaataatttacctatattatatgtttgagtctgtttagaaaagtagctaagtatacgatcttttatttctgatgcagatgtatcaacatcggaaaaaaatctttttttattcttttttactaaagatacaaatatgtctttgttaaaaacagttattttctgaatatttctagcttgtaattttaacatatgatattcgttcacactaggtactctgcctaaataggtttctataatctttaatgtaatattaggaagagtattctgatcaggattcctattcattttgaggatttaaaactctgattattgtctaatatggtctcaacacaaactttttcacagagcgatagagtttttgataactcgtttttcttaagaaatataaaactactgtttccagagctcgctctatcttttattttatctaattcgatacaaactcctgatactggttcagaaagtaattcattaattttcagtcctttatagaagatatttaatatagataatacaaaattttcagttcttgatatcgatctgattgatcctagaactagatatattaataacgtgctcattaggcagtttatggcagcttgataattagatatagtatattccagttcatatttattagataccgcattgcccagattttgatattctatgaattcctctgaaaataaatccaaaataactagacattctattttttgtggattagtgtactctcttccctctatcatgttcactactggtgtccacgatgataaatatctagagggaatataatatagtccataggatgccaatctagcaatgtcgaataactgtaatttgattcttcgttcttcattatgaattgattcttgaggtataaacctaacacaaattatattattagacttttcgtatgtaatgtctttcatgttataagtttttaatcctggaatagaatctattttaatgaggcttttaaacgcagagttctccaacgagtcaaagcataatactctgttgtttttcttatatacgatgttacgattttcttctttgaatggaataggtttttgaattagtttataattacaacataatagataaggaagtgtgcaaatagtacgcggaaaaaacataatagctcccctgttttcatccatggttttaagtaaatgatcactggcttctttagtcaatggatattcgaacattaaccgtttcatcatcattggacagaatccatatttcttaatgtaaagagtgatcaaatcattgtgtttattgtaccatcttgttgtaaatgtgtattcggttatcggatctgctcctttttctattaaagtatcgatgtcgatctcgtctaagaattcaactatatcgacatatttcatttgtatacacataaccattactaacgtagaatgtataggaagagatgtaacgggaacagggtttgttgattcgcaaactattctaatacataattcttctgttaatacgtcttgcacgtaatctattatagatgccaagatatctatataattattttgtaagatgatgttaactatgtgatctatataagtagtgtaataattcatgtatttcgatatatgttccaactctgtctttgtgatgtctagtttcgtaatatctatagcatcctcaaaaaatatattcgcatatattcccaagtcttcagttctatcttctaaaaaatcttcaacgtatggaatataataatctattttacctcttctgatatcattaatgatatagtttttgacactatcttctgtcaattgattcttattcactatatctaagaaacggatagcgtccctaggacgaactactgccattaatatctctattatagcttctggacataattcatctattataccagaattaatgggaactattccgtatctatctaacatagttttaagaaagtcagaatctaagacctgatgttcatatattggttcatacatgaaatgatctctattgatgatagtgactatttcattctctgaaaattggtaactcattctatatatgctttccttgttgatgaaggatagaatatactcaatagaatttgtaccaacaaactgttctcttatgaatcgtatatcatcatctgaaataatcatgtaaggcatacatttaacaattagagacttgtctcctgttatcaatatactattcttgtgataatttatgtgtgaggcaaatttgtccacgttctttaattttgttatagtagatatcaaatccaatggagctacagttcttggcttaaacagatatagtttttctggaacgaattctacaacattattataaaggactttgggtagataagtgggatgaaatcctattttaattaatgcgatagccttgtcctcgtgcagatatccaaacgcttttgtgatagtatggcattcattgtctagaaacgctctacgaatatctgtgacagatatcatctttagagaatatactagtcgcgttaatagtactacaatttgtattttttaatctatctcaataaaaaaattaatatgtatgattcaatgtataactaaactactaactgttattgataactagaatcagaatctaatgatgacgtaaccaagaagtttatctactgccaatttagctgcattatttttagcatctcgtttagattttccatctgccttatcgaatactcttccgtcgatgtctacacaggcataaaatgtaggagagttactaggccccactgattcaatacgaaaagaccaatctctcctagtaatttggcagtactcattaataacggtgacagggttagcacctttccaatcaataatttttttagccggaataacatcatcaaaagacttatgatcctctctcattgatttttcgcgggatacatcatctattatggcgtcagccataacatcagcatccggcttatccgcctccgttgtcataaaccaacgaggaggaatatcgtcggagctgtacaccatagcactacgttgaagatcgtacagagctttattaacttctcgcttctccatattaagttgtctagttagttgtgcagcagtagctccttcgattccaatggttttaatagcctcacacacaatctctgcgttagaacgttcgtcgatatagattttagacatttttagagagaactaacacaaccagcaataaaactgaacctactttatcatttttttattcatcatcctctggtggttcgtcgttcctatcgaatgtggatctgattaacccgtcatctataggtgatgctggttctggagattctggaggagatggattattatctggaagaatctctgttatttccttgttttcatgtatcgattgcgttgtaacattaagattgcgaaatgctctaaatttgggaggcttaaagtgttgtttgcaatctctacacgcatgtctaactagtggaggttcgtcagcggctctagtttgaatcatcatcggcgtagtattcctacttttacagttaggacacggtgtattgtatttctcgtcgagaacgttaaaataatcgttgtaactcacatcctttattttatctatattgtattctactcctttcttaatgcattttataccgaataagagatagcgaaggaattctttttcggtgccgctagtacccttaatcatatcacatagtgttttatattccaaatttgtggcaatagacggtttatttctatacgatagtttgtttctggaatcctttgagtattctataccaatattattctttgattcgaatttagtttcttcgatattagattttgtattacctatattcttgatgtagtactttgatgatttttccatggcccattctattaagtcttccaagttggcatcatccacatattgtgatagtaattctcggatatcagtagcggctaccgccattgatgtttgttcattggatgagtaactactaatgtatacattttccatttataacacttatgtattaactttgttcatttatattttttcattattatgttgatattaacaaaagtgaatatatatgttaataattgtattgtggttatacggctacaatttcataatgagtggaagtcagtgtccgatgatcaatgacgatagctttactctgaaaagaaagtatcaaatcgatagtgcggagtcaacaataaaaatggataagaagaggataaagtttcagaatagagccaaaatggtaaaagaaataaatcagacaataagagcagcacaaactcattacgagacattgaaactaggatacataaaatttaagagaatgattaggactactactctagaagatatagcaccatctattccaaataatcagaaaacttataaactattctcggacatttcagccatcggcaaagcatcacagaatccgagtaagatggtatatgctctgctgctttacatgtttcccaatttgtttggagatgaccatagattcattcgttatagaatgcatccaatgagtaaaatcaaacacaagatcttctctcctttcaaacttaatcttattagaatattagtggaagaaagattctataataatgaatgcagatctaataaatggagaataattggaacacaagttgataaaatgttgatagctgaatctgataaatatacaatagatgcaaggtataacctaaaacccatgtatagaatcaagggaaaatctgaagaagataccctcttcatcaaacagatggtagaacaatgtgtgacatcccaggaattggtggaaaaagtgttgaagatactgtttagagatttgttcaagagtggagaatacaaagcatacagatacgatgatgatgtagaaaatggatttattggattggatacactaaaattaaacattgttcatgatatagttgaaccatgtatgcctgttcgtaggccagtggctaagatactgtgtaaagaaatggtaaataaatactttgagaatccgctacatattattggtaaaaatcttcaagagtgcattgactttgttagtgaataggcatttcatctttctccaatactaattcaaattgttaaattaataatggatagtataaatagttattagtgataaaatagtaaaaataattattagaataagagtgtagtatcatagataactctcttctataaaaatggattttattcgtagaaagtatcttatatacacagtagaaaataatatagattttttaaaggatgatacattaagtaaagtaaacaattttaccctcaatcatgtactagctctcaagtatctagttagcaattttcctcaacacgttattactaaggatgtattagctaataccaatttttttgttttcatacatatggtacgatgttgtaaagtgtacgaagcggttttacgacacgcatttgatgcacccacgttgtacgttaaagcattgactaagaattatttatcgtttagtaacgcaatacaatcgtacaaggaaaccgtgcataaactaacacaagatgaaaaatttttagaggttgccgaatacatggacgaattaggagaacttataggcgtaaattatgacttagttcttaatccattatttcacggaggggaacccatcaaagatatggaaatcatttttttaaaactgtttaagaaaacagacttcaaagttgttaaaaaattaagtgttataagattacttatttgggcatacctaagcaagaaagatacaggcatagagtttgcggataatgatagacaagatatatatactctatttcaacaaactggtagaatcgtccatagcaatctaacagaaacgtttagagattatatctttcccggagataagactagctattgggtgtggttaaacgaaagtatagctaatgatgcggatatcgttcttaatagacacgccattaccatgtatgataaaattcttagttatatatactctgagataaaacaaggacgcgttaataaaaacatgcttaagttagtttatatctttgagcctgaaaaagatatcagagaacttctgctagaaatcatatatgatattcctggagatatcctatctattattgatgcaaaaaacgacgattggaaaaaatattttattagtttttataaagctaattttattaacggtaatacatttattagtgatagaacgtttaacgaggacttattcagagttgttgttcaaatagatcccgaatatttcgataatgaacgaattatgtctttattctctacgagtgctgcggacattaaacgatttgatgagttagatattaataacagttatatatctaatataatttatgaggtgaacgatatcacattagatacaatggatgatatgaagaagtgtcaaatctttaacgaggatacgtcgtattatgttaaggaatacaatacatacctgtttttgcacgagtcggatcccatggtcatagagaacggaatactaaagaaactgtcatctataaaatccaagagtagacggctgaacttgtttagcaaaaacattttaaaatattatttagacggacaattggctcgtctaggtcttgtgttagatgattataaaggagacttgttagttaaaatgataaaccatcttaagtctgtggaggatgtatccgcattcgttcgattttctacagataaaaaccctagtattcttccatcgctaatcaaaactattttagctagttataatatttccatcatcgtcttatttcaaaggtttttgagagataatctatatcatgtagaagaattcttggataaaagcatccatctaaccaagacggataagaaatatatacttcaattgataagacacggtagatcatagaacagaccaaatatattattaataatttgtatatacatagatataattatcacatattaaaaattcacacatttttgataaatgggaactgctgcaacaattcagactcccaccaaattaatgaataaagaaaatgcagaaatgattttggaaaaaattgttgatcatatagttatgtatattagtgacgaatcaagtgattcagaaaataatcctgaatatattgattttcgtaacagatacgaagactatagatctctcattataaaaagtgatcacgagtttgtaaagctatgtaaaaatcatgcagagaaaagttctccagaaacgcaacaaatgattatcaaacacatatacgaacaatatcttattccagtatctgaagtactattaaaacctataatgtccatgggtgacataattacatataacggatgtaaagacaatgaatggatgctagaacaactctctaccctaaactttaacaatctccgcacatggaactcatgtagcataggcaatgtaacgcgtctgttttatacattttttagttatctgatgaaagataaactaaatatataagtataatcccattctaatactttaacctgatgtattacctgcatcttattagaatattaacctaactaaaagacataacataaaaactcattacatagttgataaaaagcggtaggatataaatattatggctgccaccgttccgcgttttgacgacgtgtacaaaaatgcacaaagaagaattctagatcaagaaacattttttagtagaggtctaagtagaccgttaatgaaaaacacatatctatttgataattacgcgtatggatggataccagaaactgcaatttggagtagtagatacgcaaacttagatgcaagtgactattatcccatttcgttgggattacttaaaaagttcgagtttctcatgtctctatataaaggtcctattccagtatacgaagaaaaagtaaatactgaattcatagccaatggatcgttctctggtagatacgtatcatatcttcgaaagttttctgctcttccaacaaacgagtttattagttttttgttactgacttccattccaatctataatatcttgttctggtttaaaaatactcagtttgatattactaaacacacattattcagatacgtctatacagataatgccaaacacctggcgttggctaggtatatgcatcaaacaggagactataagcctttgtttagtcgtctcaaagagaattatatatttaccggtcccgttccaataggtatcaaagatatagatcaccctaatcttagtagagcaagaagtccatccgattatgagacattagctaatattagtactatattgtactttaccaagtatgatccggtattaatgtttttattgttttacgtacctgggtattcaattactacaaaaattactccagccgtagaatatctaatggataaactgaatctaacaaagagcgacgtacaactgttgtaaattattttatgcttcgtaaaatgtaggttttgaaccaaacattctttcaaagaatgagatgcataaaactttattatccaatagattgactatttcggacgtcaatcgtttaaagtaaacttcgtaaaatattctttgatcactgccgagtttaaaacttctatcgataattgtctcatatgttttaatatttacaagttttttggtccatggtacattagccggacaaatatatgcaaaataatatcgttctccaagttctatagtttctggattatttttattatattcagtaaccaaatacatattagggttatctgcggatttataatttgagtgatgcattcgactcaacataaataattctagaggagacgatctactatcaaattcggatcgtaaatctgtttctaaagaacggagaatatctatacatacctgattagaattcatccgtccttcagacaacatctcagacagtctggttttgtacatcttaatcatattcttatgaaacttggaaacatctcttctagtttcactagtacctttattaattctctcaggtacagattttgaattcgacgatgccgagtatttcatcgttgtatatttcttcttcgattgcataatcagattcttatataccgcctcaaactctattttaaaattattaaacaatactctactattaatcagtcgttctaactctttcgctatttctatagacttatctacatcttgactgtctatctctgtaaacacggagtcggtatctccatacacgctacgaaaacgaaatctgtaatctataggcaacgatgttttcacaatcggattaatatctctatcgtccatataaaatggattacttaatggattggcaaaccgtaacataccgttagataactctgctccatttagtaccgattctagatacaagatcattctacgtcctatggatgtgcaactcttagccgaagcgtatgagtatagagcactatttctaaatcccatcagaccatatactgagttggctactatcttgtacgtatattgcatggaatcataaatggccttttcagttgaactggtagcctgttttaacatctttttatatctggctctctctgccaaaaatgttcttaatagtctaggaatggttccttctatcgatctatcgaaaattgctatttcagagatgaggttcggtagtctaggttcacaatgaaccgtaatatatctaggaggtggatatttctgaagcaatagctgattatttatttcttcttccaatctattggtactaacaacgacaccgactaatgtttccggagatagatttccaaagatacacacattaggatacagactgttataatcaaagattaatacattattactaaacattttttgttttggagcaaataccttaccgccttcataaggaaacttttgttttgtttctgatctaactaagatagttttagtttccaacaatagctttaacagtggacccttgatgactgtactcgctctatattcgaataccatggattgaggaagcacatatgttgacgcacccgcgtctgtttttgtttctactccataatactcccacaaatactgacacaaacaagcatcatgaatacagtatctagccatatctaaagctatgtttagattataatccttatacatctgagctaaatcaacgtcatcctttccgaaagataatttatatgtatcattaggtaaagtaggacataatagtacgactttaaatccattttcccaaatatctttacgaattactttacatataatatcctcatcaacagtcacataattacctgtggttaaaacctttgcaaatgcagcggctttgcctttcgcgtccgtagtatcgtcaccgatgaacgtcatttctctaactcctctatttaatactttacccatgcaactgaacgcgttcttggatatagaatccaatttgtacgaatccaatttttcagatttttgaatgaatgaatatagatcgaaaaatatagttccattattgttattaacgtgaaacgtagtattggccatgccgcctactcccttatgactagactgatttctctcataaatacagagatgtacagcttcctttttgtccggagatctaaagataatcttctctcctgttaataactctagacgattagtaatatatctcagatcaaagttatgtccgttaaaggtaacgacgtagtcgaacgttagttccaacaattgtttagctattcgtaacaaaactatttcagaacatagaactagttctcgttcgtaatccatttccattagtgactgtatcctcaaacatcctctatcgacggcttcttgtatttcctgttccgttaacatctcttcattaatgagcgtaaacaataatcgtttaccacttaaatcgatataacagtaacttgtatgcgagattgggttaataaatacagaaggaaacttcttatcgaagtgacactctatatctagaaataagtacgatcttgggatatcgaatctaggtatttttttagcgaaacagttacgtggatcgtcacaatgataacatccattgttaatctttgtcaaatattgctcgtccaacgagtaacatccgtctggagatatcccgttagaaatataaaaccaactaatattgagaaattcatccatggtggcattttgtatgctgcgtttctttggctcttctatcaaccacatatctgcgacggagcattttctatctttaatatctagattataacttattgtctcgtcaatgtctatagttctcatctttcccaacggcctcgcattaaatggaggaggagacaatgactgatatatttcgtccgtcactacgtaataaaagtaatgaggaaatcgtataaatacggtctcaccatttcgacatctggatttcagatataaaaatctgttttcaccgtgactttcaaaccaattaatgcaccgaacatccatttatagaatttagaaatatattttcatttaaatgaatcccaaacattggggaagagccgtatggaccattatttttatagtactttcgcaagcgggtttagacggcaacatagaagcgtgtaaacgaaaactatatactatagtcagcactcttccatgtcctgcatgtagacggcacgcgactatcgctatagaggacaataatgtcatgtctagcgatgatctgaattatatttattattttttcatcagattatttaacaatttggcatctgatcccaaatacgcgatcgatgtgacaaaggttaaccctttataaacttaacccattataaaacttatgattagtcacaactgaaataaccgcgtgattattttttggtataattctacacggcatggtttctgtaactatgaattcaacccccgttacattagtgaaatctttaacaaacagcaagggttcgtcaaagacataaaactcattgtttacaatcgaaatagaccccctatcacacttaaaataaaaaatatccttatcctttaccaccaaataaaattctgattggtcaatgtgaatgtattcacttaacagttccacaaatttatttattaactccgaggcacatacatcgtcggtattttttatggcaaactttactcttccagcatccgtttctaaaaaaatattaacgagttccatttatatcatccaatattattgaaatgacgttgatggacagatgatacaaataagaaggtacggtacctttgtccaccatctcctccaattcatgctctattttgtcattaactttaatgtatgaaaacagtacgccacatgcttccatgacagtgtgtaacactttggatacaaaatgtttgacattagtataattgttcaagactgtcaatctataatagatagtagctataatatattctatgatggtattgaagaagatgacaaccttggcatattgatcatttaacacagacatggtatcaacagatagcttgaatgaaagagaatcagtaattggaataagcgtcttctcgatagagtgtccgtataccaacatgtctgatattttgatgtattccattaaattatttagttttttctttttattttcgttaaacagcatttctgtcaacggaccccaacatcgttgaccgattaagttttgattgatttttccgtgtaatgcgtatctagtcagatcgtatagcctatccaataatccatcatctgtgcgtagatcacatcgtacactttttaattctctatagaagagcgacagacatctggagcaattacagacagcaatttctttattctctacagatgtaagatacttgaagacattcctatgatgatgcagaattttggataacacggtattgatggtatctgttaccataattcctttgatggctgatagtgtcagagcacaagatttccaatctttgacaatttttagcaccattatctttgttttgatatctatatcagacagcatggtgcgtctgacaacacagggattaagacggaaagatgaaatgattctctcaacatcttcaatggataccttgctattttttctggcattatctatatgtgcgagaatatcctctagagaatcagtatcctttttgatgatagtggatctcaatgacatgggacgtctaaaccttcttattttatcaccagattgcatggtgatttgtcttctttcttttatcataatgtaatctctaaattcatcggcaaattgtctatatctaaaatcataatatgagatgtttacctctacaaatatctgttcgtccaatgttagagtatctacatcagttttgtattccaaattaaacatggcaacggatttaattttatattcctctattaagtcctcgtcgataataacagaatgtagataatcatttaatccatcgtacatggttggaagatgcttgttgacaaaatctttaattgtcttgatgaaggtgggactatatctaacatcttgattaataaaatttataacattgtccataggatactttgtaactagttttatacacatctcttcatcggtaagtttagacagaatatcgtgaacaggtggtatattatattcatcagatatacgaagaacaatgtccaaatctatattgtttaatatattatatagatgtagcgtagctcctacaggaatatctttaactaagtcaatgatttcatcaaccgttagatctattttaaagttaatcatataggcattgatttttaaaaggtatgtagccttgactacattctcattaattaaccattccaagtcactgtgtgtaagaagattatattctatcataagcttgactacatttggtcccgataccattaaagaattcttatgatataaggaaacagcttttaggtactcatctactctacaagaattttggagagccttaacgatatcagtgacgtttattatttcaggaggaaaaaacctaacattgagaatgtcggagttaatagcttccagatacagtgattttggcaatagtccgtgtaatccataatccagtaacacgagctggtgcttgctagacaccttttcaatgtttaatttttttgaaataagctttgataaagccttcctcgcaaattccggatacatgaacatgtcggcgacatgattaagtattgttttttcattatttttatattttctcaacaagttctcaataccccaatagatgatagaatatcacccaatgcgtccatgttgtctatttccaacaggtcgctatatccaccaatagaagtttttccaaaaaagattctaggaacagttctaccaccagtaatttgttcaaaatagtcacgcaattcattttcgggtttaaattctttaatatcgacaatttcatacgctcctcttttgaaactaaacttatttagaatatccagtgcatttctacaaaaaggacatgtatacttgacaaaaattgtcactttgttattggccaacctttgttgtacaaattcctcggccattttaatatttaagtgatataaaactatctcgacttatttaactctttagtcgagatatatggacgcagatagctatatgatagccaactacagaaggcaaacgctataaaaaacataattacgacgagcatatttataaatatttttattcagcattacttgatatagtaatattaggcacagtcaaacattcaaccactctcgatacattaactctctcattttctttaacaaattctgcaatatcttcgtaaaaagattcttgaaactttttagaatatctatcgactctagatgaaatagcgttcgtcaacatactatgttttgtatacataaaggcgcccattttaacagtttctagtgacaaaatgctagcgatcctaggatcctttagaatcacatagattgacgattcgtctctcttagtaactctagtaaaataatcatacaatctagtacgcgaaataatattatccttgacttgaggagatctaaacaatctagttttgagaacatcgataagttcatcgggaatgacatacatactatctttaatagaactcttttcatccagttgaatggattcgtccttaaccaactgattaatgagatcttctattttatcattttccagatgatatgtatgtccattaaagttaaattgtgtagcgcttctttttagtctagcagccaatactttaacatcactaatatcgatatacaaaggagatgatttatctatggtattaagaattcgtttttcgacatctgtcaaaaccaattcctttttgcctgtatcatccagttttccatcctttgtaaagaaattattttctactagactattaataagactgataaggattcctccataattgcacaatccaaactttttaacaaaactagactttacaagatctacaggaatgcgtacttcaggtttcttagcttgtgattttttcttttgtggacattttcttgtgaccaactcatctaccatttcattgattttagcagtgaaataagctttcaatgcacgggcactgatactattgaaaacgagttgatcttcaaattccgccatttaagttcaccaaacaacttttaaatacaaatatatcaatagtagtagaataagaactataaaaaaaataataattaaccaataccaaccccaacaaccggtattattagttgatgtgactgttttctcatcacttagaacagatttaacaatttctataaagtctgtcaaatcatcttccggagaccccataaatacaccaaatatagcggcgtacaacttatccatttatacattgaatattggcttttctttatcgctatcttcatcatattcatcatcaatatcaacaagtcccagattacgagccagatcttcttctacattttcagtcattgatacacgttcactatctccagagagtccgataacgttagccaccacttctctatcaatgattagtttcttgagtgcgaatgtaatttttgtttccgttccggatctatagaaaactacaggtgtgataattgccttggccaattgtctttctcttttactgagtgattctagttcaccttctatagatctgagaatggatgattctccagtcgaaacatattctaccatggatccgtttaatttgttgatgaagatggattcatccttaaatgttttctctgtaatagtttccaccgaaagactatgcaaagaatttggaatgcgttccttgtgcttaatgtttccatagacggcttctagaagttgatacaacataggactagccgcggtaacttttatttttagaaagtatccatcgcttctatcttgtttagatttatttttataaagtttagtctctccttccaacataataaaagtggaagtcatttgactagataaactatcagtaagttttatagagatagacgaacaattagcgtattgagaagcatttagtgtaacgtattcgatacattttgcattagatttactaatcgattttgcatactctataacacccgcacaagtctgtagagaatcgctagatgcagtaggtcttggtgaagtttcaactctcttcttgattaccttactcatgattaaacctaaataattgtactttgtaatataatgatatatattttcactttatctcatttgagaataaaaatgtttttgtttaaccactgcatgatgtacagatttcggaatcgcaaaccaccagtggttttattttatccttgtccaatgtgaattgaatgggagcggatgcgggtttcgtacgtagatagtacattcccgtttttagaccgagactccatccgtaaaaatgcatactcgttagtttggaataactcggatctgctatatggatattcatagattgactttgatcgatgaaggctcccctgtctgcagccatttttatgatcgtcttttgtggaatttcccaaatagttttataaactcgcttaatatcttctggaaggtttgtattctgaatggatccaccatctgccataatcctattcttgatctcatcattccataattttctctcggttaaaactctaaggagatgcggattaactacttgaaattctccagacaatactctccgagtgtaaatattactggtatacggttccaccgactcattatttcccaaaatttgagcagttgatgcagtcggcataggtgccaccaataaactatttctaagaccgtatgttctgattttatcttttagaggttcccaattccaaagatccgacggtacaacattccaaagatcatattgtagaataccgttactggcgtacgatcctacatatgtatcgtatggtccttccttctcagctagttcacaactcgcctctaatgcaccgtaataaatggtttcgaagatcttcttatttagatcttgtgcttccaggctatcaaatggataatttaagagaataaacgcgtccgctaatccttgaacaccaataccgataggtctatgtctcttattagagatttcagcttctggaataggataataattaatatctataattttattgagatttctgacaattactttgaccacatccttcagtttgagaaaatcaaatcgcccatctattacaaacatgttcaaggcaacagatgccagattacaaacggctacctcattagcatccgcatattgtattatctcagtgcaaagattactacacttgatagttcctaaattttgttgattactctttttgttacacgcatccttataaagaatgaatggagtaccagtttcaatctgagattctataatcgctttccagacgactcgagcctttattatagatttgtatctcctttctctttcgtatagtgtatacaatcgttcgaactcgtctccccaaacattgtccaatccaggacattcatccggacacatcaacgaccactctccgtcatccttcactcgtttcataaagagatcaggaatccaaagagctataaatagatctctggttctatgttcctcgtttcctgtattctttttaagatcgaggaacgccataatatcagaatgccacggttccaagtatatggccataactccaggccgtttgtttcctccctgatctatgtatctagcggtgttattataaactctcaacattggaataataccgtttgatataccattggtaccggagatatagcttccactggcacgaatattactaattgatagacctattccccctgccattttagagattaatgcgcatcgttttaacgtgtcatagataccctctatgctatcatcgatcatgttaagtagaaaacagctagacatttggtgacgactagttcccgcattaaataaggtaggagaagcgtgcgtaaaccatttttcagaaagtagattgtacgtctcaatagctgagtctatatcccattgatgaattcctactgcgacacgcattaacatgtgctgaggtctttcaacgatcttgttgtttattttcaacaagtaggatttttccaaagttttaaaaccaaaatagttgtatgaaaagtctcgttcgtaaataataaccgagttgagtttatccttatatttgttaactatatccatggtgatacttgaaataatcggagaatgtttcccatttttaggattaacatagttgaataaatcctccatcacttcactaaatagtttttttgtttccttgtgtagatttgatacggctattctggcggctagaatggcataatccggatgttgtgtagtacaagtggctgctatttcggctgccagagtgtccaattctaccgttgttactccattatatattccttgaataaccttcatagctattttaataggatctatatgatccgtgtttaagccataacataattttctaatacgagacgtgattttatcaaacatgacattttccttgtatccatttcgtttaatgacaaacatttttgttggtgtaataaaaaaattatttaacttttcattaatagggatttgacgtatgtagcgtacaaaattatcgttcctggtatatagataaagagtcctatatatttgaaaatcgttacggctcgattaaactttaatgattgcatagtgaatatatcattaggatttaactccttgactatcagggcggcaccagaaattaccatcaaaagcattaatacagttatgccgatcgcagttagaacggttatagcatccaccatttatatctaaaaattagatcaaagaatatgtgacaaagtcctagttgtatactgagaattgacgaaacaatgtttcttacatatttttttcttattagtaactgacttaatagtaggaactggaaagctagacttgattattctataagtatagatacccttccaaataatattctctttgataaaagttccagaaaatgtagaattttttaaaaagttatcttttgctattaccaagattgtgtttagacgcttattattaatatgagtgatgaaatccacaccgcctctagatatcgcttttatttccacattagatggtaaatccaatagtgaaactatctttttaggaatgtatggactcgcgtttagaggagtgaacgtcttaggcgtcggaaaggatgattcatcaaacgaataaacaatttcacaaatggatgttaatgtattagtaggaaattttttgacgctagtggaattgaagattctaatggatgatgttctacctatttcatccgataacatgttaatttccgacaccaacggttttaatatttcgatgatatacggtagtctctctttcggacttatatagcttattccacaatacgagtcattatatactccaaaaaacaaaataactagtataaaatctgtatcgaatgggaaaaacgaaattatcgacataggtatagaatctggaacattgaacgtattaatacttaattctttttctgtggtaagtaccgataggttattgacattgtatggttttaaatattctataacttgagacttgatagatattagtgatgaattgaaaattatttttatcaccacgtgtgtttcaggatcatcgtcgacgcccgtcaaccaaccgaatggagtaaaataaatatcattaatatatgctctagatattagtatttttatcaatcctttgattatcatcttctcgtaggcgaatgattccatgatcaagagtgatttaagaacatcctccggagtattaatgggcttagtaaacagtccatcgttgcaataataaaagttatccaagttaaaggatattatgcattcgtttaaagatatcacctcatctgacggagacaattttttggtaggttttagagactttgaagctacttgtttaacaaagttattcatcgtcgtttactattctatttaattttgtagttaatttatcacatatcacattaattgactttttggtccatttttccatacgtttatattcttttaatcctgcgttatccgtttccgttatatccagggatagatcttgcaagttaaatagaatgctcttaaataatgtcatttttttatccgctaaaaatttaaagaatgtataaacttttttcaaagatttaaaacttttaggtggagttctagtacacaatatcataaacaaactaataaacatcccgcattcagattccaacagctgattaacttccacattaatacagcctattttcgctccaaatgtacattcgaaaaatctgaataaaacatcgatgtcacaatttgtattatccaatacagaatgtctgtgattcgtgttaaaaccatcggagaaggaatagaaataaaaattattatagtggtggaattcagttggaatattgcctccggagtcataaaaggatactaaacattgttttttatcataaattacacatttccaatgagacaaataacaaaatccaaacattacaaatctagaggtagaacttttaattttgtctttaagtatatacgataagatatgtttattcataaacgcgtcaaatttttcatgaatcgctaaggagtttaagaatctcatgtcaaattgtcctatataatccacttcggatccataagcaaactgagagactaagttcttaatacttcgattgctcatccaggctcctctctcaggctctattttcatcttgacgacctttggattttcaccagtatgtattcctttacgtgataaatcatcgattttcaaatccatttgtgagaagtctatcgccttagatactttttcccgtagtcgaggtttaaagaaatacgctaacggtatactagtaggtaactcaaagacatcatatatagaatggtaacgcgtctttaactcgtcggttaactctttcttttgatcgagttcgtcgctactattgggtctgctcaggtgccccgactctactagttccaacatcataccgataggaatacaagacactttgccagcggttgtagatttatcatatttctccactacatatccgttacaatttgttaaaaatttagatacatctatattgctacataatccagctagtgaatatatatgacataataaattggtaaatcctagttctggtattttactaattactaaatctgtatatctttccatttatcatggaaaagaatttaccagatatcttcttttttccaaactgcgttaatgtattctcttacaaatattcacaagatgaattcagtaatatgagtaaaacggaacgtgatagtttctcattggcggtgtttccagttataaaacatagatggcataacgcacacgttgtaaaacataaaggaatatacaaagttagtacagaagcacgtggaaaaaaagtatctcctccatcactaggaaaacccgcacacataaacctaaccgcgaagcaatatatatacagtgaacacacaataagctttgaatgttatagttttctaaaatgtataacaaatacagaaatcaattcgttcgatgagtatatattaagaggactattagaagctggtaatagtttacagatattttccaattccgtaggtaaacgaacagatactataggtgtactagggaataagtatccatttagcaaaattccattggcctcattaactcctaaagcacaacgagagatattttcagcgtggatttctcatagacctgtagttttaactggaggaactggagtgggtaagacgtcacaggtacccaagttattgctttggtttaattatttatttggtggattctctactctagataaaatcactgactttcacgaaagaccagtcattctatctcttcctaggatagctttagttagattgcatagcaataccattttaaaatcattgggatttaaggtactagatggatctcctatttctttacggtacggatctataccggaagaattaataaacaaacaaccaaaaaaatatggaattgtattttctacccataagttatctctaacaaaactatttagttatggcactcttattatagacgaagttcatgagcatgatcaaataggagatattattatagcagtagcgagaaagcatcatacgaaaatagattctatgtttttaatgactgccacgttagaggatgacagggaacggctaaaagtatttttacctaatcccgcatttatacatattcctggagatacactgtttaaaattagcgaggtatttattcataataagataaatccatcttccagaatggcatacatagaagaagaaaagagaaatttagttactgctatacagatgtatactcctcctgatggatcatccggtatagtctttgtggcatccgttgcacagtgtcacgaatataaatcatatttagaaaaaagattaccgtatgatatgtatattattcatggtaaggtcttagatatagacgaaatattagaaaaagtgtattcatcacctaatgtatcgataattatttctactccttatttggaatccagcgttactatacacaatgttacacacatttatgatatgggtagagtttttgtccccgctccttttggaggatcgcaacaatttatttctaaatctatgagagatcaacgaaaaggaagagtaggaagagttaatcctggtacatacgtctatttctatgatctgtcttatatgaagtctatacagcgaatagattcagaatttctacataattatatattgtacgctaataagtttaatctaacactccccgaagatttgtttataatccctacaaatttggatattctatggcgtacaaaggaatatatagactcgttcgatattagtacagaaacatggaataaattattatccaattattatatgaagatgatagagtatgctaaactttatgtactaagtcctattctcgctgaggagttggataactttgagaggacgggagaattaactagtattgtacgagaagccattttatctctaaatttacgaattaagattttaaattttaaacataaagatgatgatacgtatatacacttttgtaaaatattattcggtgtctataacggaacaaacgctactatatattatcatagacctctaacgggatatatgaatatgatttcagatactatatttgttcctgtagataataactaaaaatcaaactctaatgaccacatctttttttagagatgaaaaattttctacatctccttttgtagacacgactaaacattttgcagaaaaaagtttattagtgtttagataatcgtatacttcatcagtgtagatagtaaatgtgaacagataaaaggtattcttgctcaatagattggtaaattccatagaatatattaatcctttcttcttgagatcccacatcatttcaaccagagacgttttatccaatgatttacctcgtactataccacatacaaaactagattttgcagtgacgtcgtacctggtattcctaccaaacaaaattttacttttagttcttttagaaaattctaaggtagaatctctatttgccaatatgtcatctatggaattaccactagcaaaaaatgatagaaatatatattgatacatcgcagctggttttgatctactatactttaaaaacgaatcagattccataattgcctgtatatcatcagctgaaaaactatgttttacacgtattccttcggcatttctttttaatgatatatcttgtttagacaatgataaagttatcatgtccatgagagacgcgtctccgtatcgtataaatatttcattagatgttagacgcttcattaggggtatacttctataaggtttcttaatcagtccatcattggttgcgtcaagaactactatcggatgttgttgggtatctctagtgttacacatggccttactaaagtttgggtaaataactatgatatctctattaattatagatgcatatatttcattcgtcaaggatattagtatcgacttgctatcgtcattaatacgtgtaatgtaatcatataaatcatgcgatagccaaggaaaatttaaatagatgttcatcatataatcgtcgctataattcatattaatacgttgacattgactaatttgtaatatagcctcgccacgaagaaagctctcgtattcagtttcatcgataaaggataccgttaaatataactggttgccgatagtctcatagtctattaagtggtaagtttcgtacaaatacagaatccctaaaatattatctaatgttggattaatctttaccataactgtataaaatggagacggagtcataactattttaccgtttgtacttactggaatagatgaaggaataatctccggacatgctggtaaagacccaaatgtctgtttgaagaaatccaatgttccaggtcctaatctcttaacaaaaattacgatattcgatcccgatatcctttgcattctatttaccagcatatcacgaactatattaagattatctatcatgtctattctcccaccgttatataaatcgcctccgctaagaaacgttagtatatccatacaatggaatacttcatttctaaaatagtattcgttttctaattctttaatgtgaaatcgtatactagaaagggaaaaattatctttgagttttccgttagaaaagaaccacgaaactaatgttctgattgcgtccgattccgttgctgaattaatggatttacaccaaaaactcatataacttctagatgtagaagcattcgctaaaaaattagtagaatcaaaggatataagtagatgttccaacaagtgagcaattcccaagatttcatctatatcattctcgaatccgaaattagaaattcccaagtagatatcctttttcatccgatcgttgatgaaaatacgaactttattcggtaagacaatcatttactaaggagtaaaataggaagtaatgttcgtatgtcgttatcatcgtataaattaaaggtgtgttttttaccattaagtgacattataattttaccaatattggaattataatataggtgtatttgcgcactcgcgacggttgatgcatcggtaaatatagctgtatctaatgttctagtcggtatttcatcatttcgctgtctaataatagcgttttctctatctgtttccattacagctgcctgaagtttattggtcggataatatgtaaaataataagaaatacatacgaataacaaaaataaaataagatataataaagatgccatttagagatctaattttgttcaacttgtccaaattcctacttacagaagatgaggaatcgttggagatagtgtcttccttatgtagaggatttgaaatatcttatgatgacttgataacttactttccagataggaaataccataaatatatttataaagtatttgaacatgtagatttatcggaggaattaagtatggaattccatgatacaactttgcgagatttagtttatcttagattgtacaagtattccaagtgtatacggccgtgttataaattaggagataatctaaaaggcatagttgttataaaggacaggaatatttatattagggaagcaaatgatgacttgatagaatatctcctcaaggaatacactcctcagatttatacatattctaatgagcgcgtccccataactggttcaaaattaattctttgtggattttctcaagttacatttatggcgtatacaacgtcgcatataacaacaaataaaaaggtagatgttctcgtttccaaaaaatgtatagatgaactagtcgatccaataaattatcaaatacttcaaaatttatttgataaaggaagcggaacaataaacaaaatactcaggaagatattttattcggtaaccggtggccaaactccataggtagctttttctatttcggattttagaatttccaaattcaccagcgatttatcggttttggtgaaatccaaggatttattaatgtccacaaatgccatttgttttgtctgtggattgtatttgaaaatggaaacgatgtagttagatagatgcgctgcgaagtttcctattagggttccgcgcttcacgtcacccagcatacttgaatcaccatcctttaaaaaaaatgataagatatcaacatggagtatatcatactcggattttaattcttctactgcatcactgacattttcacaaatactacaatacggtttaccgaaaataatcagtacgttcttcatttatgggtatcaaaaacttaaaatcgttactgctggaaaataaatcactgacgatattagatgataatttatacaaagtatacaatggaatatttgtggatacaatgagtatttatatagccgtcgccaattgtgtcagaaacttagaagagttaactacggtattcataaaatacgtaaacggatgggtaaaaaagggagggcatgtaaccctttttatcgatagaggaagtataaaaattaaacaagacgttagagacaagagacgtaaatattctaaattaaccaaggacagaaaaatgctagaattagaaaagtgtacatccgaaatacaaaatgttaccggatttatggaagaagaaataaaggcaaaaatgcaattaaaaatcgataaacttacatttcaaatatatttatctgattctgataacataaaaatatcattgaatgagatactaacacatttcaacaataatgagaatgttacattattttattgtgatgaacgagacgcagaattcgttatgtgtctcgaggctaaaacacatttctctaccacaggagaatggccgttgataataagtaccgatcaggatactatgctatttgcatctactgataatcatcctaagatgataaaaaacttaactcaactgtttaaatttgttccctcggcagaggataactatttagcaaaattaacggcgttagtgaatggatgtgatttctttcctggactctatggggcatctataacacccaccaacttaaacaaaatacaattgtttagtgattttacaatcgataatatagtcactagtttggcaattaaaaattattatagaaagactaactctaccgtagacgtgcgtaatattgttacgtttataaacgattacgctaatttagacgatgtctactcgtatgttcctccttgtcaatgcactgttcaagaatttatattttccgcattagatgaaaaatggaatgaatttaaatcatcttatttagagaccgttccgttaccctgtcaattaatgtacgcgttagaaccacgtaaggagattgatgtttcagaagttaaaactttatcatcttatatagatttcgaaaatactaaatcagatatcgatgttataaaatctatatcctcgatttttggatattctaacgaaaactgtaacacgatagtattcggcatctataaggataatttactactgagtataaataattcattttactttaacgatagtctgttaataaccaatactaaaagtgataatataataaatataggttactagattaaaaatggtgttccaactcgtgtgctctacatgcggtaaagatatttctcacgaacgatataaattgattatacgaaaaaaatcattaaaggatgtactcgtcagtgtaaagaacgaatgttgtaggttaaaattatctacacaaatagaacctcaacgtaacttaacagtgcaacctctattggatataaactaatatggatccggttaattttatcaagacatatgcgcctagaggttctattatttttattaattataccatgtcattaacaagtcatttgaatccatcgatagaaaaacatgtgggtatttattatggtacgttattatcggaacacttggtagttgaatctacctatagaaaaggagttcgaatagtcccattggatagtttttttgaaggatatcttagtgcaaaagtatacatgttagagaatattcaagttatgaaaatagcagctgatacgtcattaactttattgggtattccgtatggatttggtcatgatagaatgtattgttttaaattggtagctgactgttataaaaatgccggtgttgaaacatcgtctaaacgaatattaggtaaagatatttttctgagccaaaacttcacagacgataatagatggataaagatatatgattctaataatttaacattttggcaaattgattaccttaaagggtgagttaatatgcataactactcctccgttgttttttccctcgttctttttcttaacgttgtttgccatcactctcataatgtaaagatattctaaaatggtaaacttttgcatatcggacgcagaaattggtataaatgttgtaattgtattatttcccgtcaatggactagtcacagctccatcagttttatatcctttagagtatttctcactcgtgtctaacattctagagcattccatgatctgtttatcgttgatattggccggaaagatagattttttattttttattatattactattggcaattgtagatataacttctggtaaatatttttctaccttttcaatctcttctattttcaagccggctatatattctgctatattgttgctagtatcaataccttttcttgctaagaagtcatatgtggtattcactatatcagttttaactggtagttccattagcctttccacttctgcagaataatcagaaattggttctttaccagaaaatccagctactataataggctcaccgatgatcattggcaaaatcctatattgtaccagattaatgagagcatatttcatttccaataattctgctagttcttgagacattgatttatttgatgaatctagttggttctctagatactctaccatttctgccgcatacaataacttgttagataaaatcagggttatcaaagtgtttagcgtggctagaatagtgggcttgcatgtattaaagaatgcggtagtatgagtaaaccgttttaacgaattatatagtctccagaaatctgtggcgttacatacatgagccgaatgacatcgaagattgtccaatatttttaatagctgctctttgtccattatttctatatttgactcgcaacaattgtagataccattaatcactgattcctttttcgatgccggacaatagcacaattgtttagctttggactctatgtattcagaattaatagatatatctcttaatacagattgcactatacattttgaaactatgtcaaaaattgtagaacgacgctgttctgcagccatttaactttaaataatttacaaaaatttaaaatgagcatccgtataaaaatcgataaactgcgccaaattgtggcatatttttcagagttcagtgaagaagtgtctataaatgtagactcgacggatgagttaatgtatatttttgccgccttgggcggatctgtaaacatttgggccattatacctctcagtgcatcagtgttctaccgcggagccgaaaatattgtgtttaatcttccggtgtccaaggtaaaatcgtgtttgtgtagttttcacaatgatgccatcatagatatagaacctgatctggaaaataatctagtaaaactttctagttatcatgtagtaagtgtcgattgtaacaaggaactgatgcctattaggacagatactactatttgtctaagtatagatcaaaagaaatcttacgtgtttaattttcacaagtatgaagaaaaatgttgtggtagaaccgtcattcatttagaatggttgttgggctttatcaagtgtattagtcagcatcagcatttggctattatgtttaaagatgacaatattattatgaagactcctggtaatactgatgcgttttccagggaatattctatgactgaatgttctcaagaactacaaaagttttctttcaaaatagctatctcgtctctcaacaaactacgaggattcaaaaagagagtcaatgtttttgaaactagaatcgtaatggataatgacgataacattctaggaatgttgttttcggatagagttcaatcctttaagatcaacatctttatggcgtttttagattaatactttcaatgagataaatatgggtggcggagtaagtgttgagctccctaaacgggatccgcctccgggagtacccactgatgagatgttattaaacgtggataaaatgcatgacgtgatagctcccgctaagcttttagaatatgtgcatataggaccactagcaaaagataaagaggataaagtaaagaaaagatatccagagtttagattagtcaacacaggacccggtggtctttcggcattgttaagacaatcgtataatggaaccgcacccaattgctgtcgcacttttaatcgtactcattattggaagaaggatggaaagatatcagataagtatgaagagggtgcagtattagaatcgtgttggccagacgttcacgacactggaaaatgcgatgttgatttattcgactggtgtcagggggatacgttcgatagaaacatatgccatcagtggatcggttcagcctttaataggagtgatagaactgtagagggtcaacaatcgttaataaatctgtataataagatgcaaacattatgtagtaaagatgctagtgtaccaatatgtgaatcatttttgcatcatttacgcgcacacaatacagaagatagcaaagagatgatcgattatattctaagacaacagtctgcggactttaaacagaaatatatgagatgtagttatcccactagagataagttagaagagtcattaaaatatgcggaacctcgagaatgttgggatccagagtgttcgaatgccaatgttaatttcttactaacacgtaattataataatttaggactttgcaatattgtacgatgtaatactagcgtgaacaacttacagatggataaaacttcctcattaagattgtcatgtggattaagcaatagtgatagattttctactgttcccgtcaatagagcaaaagtagttcaacataatattaaacattcgttcgacctaaaattgcatttgatcagtttattatctctcttggtaatatggatactaattgtagctatttaaatgggtgccgcggcaagcatacagacgacggtgaatacactcagcgaacgtatctcgtctaaattagaacaagaagcgaacgctagtgctcaaacaaaatgtgatatagaaatcggaaatttttatatccgacaaaaccatggatgtaacctcactgttaaaaatatgtgctctgcggacgcggatgctcagttggatgctgtgttatcagccgctacagaaacatatagtggattaacaccggaacaaaaagcatacgtgccagctatgtttactgctgcgttaaacattcagacaagtgtaaacactgttgttagagattttgaaaattatgtgaaacagacttgtaattctagcgcggtcgtcgataacaaattaaagatacaaaacgtaatcatagatgaatgttacggagccccaggatctccaacaaatttggaatttattaatacaggatctagcaaaggaaattgtgccattaaagcgttgatgcaattgacgactaaggccactactcaaatagcacctagacaagttgctggtacaggagttcagttttatatgattgttatcggtgttataatattggcagcgttgtttatgtactatgccaagcgtatgctgttcacatccaccaatgataaaatcaaacttattttagccaataaggaaaacgtccattggactacttacatggacacattctttagaacttctccgatggttattgctaccacggatatacaaaactgaaaatatattgataatattttaatagattaacatggaagttatcgctgatcgtctagacgatatagtgaaacaaaatatagcggatgaaaaatttgtagattttgttatacacggtctagagcatcaatgtcctgctatacttcgaccattaattaggttgtttattgatatactattatttgttatagtaatttatatttttacggtacgtctagtaagtagaaattatcaaatgttgttggtggcgctagtcatcacattaactattttttattactttatactataatagtactagactgacttctaacaaacatctcacctgccataaataaatgcttgatattaaagtcttctatttctaacactattccatctgtggaaaataatactctgacattatcgctaattgacacatcggtgagtgatatgcctataaagtaataatcttctttgggcacatataccagtgtaccaggttctaacaacctatttactggtgctcctgtagcatactttttctttaccttgagaatatccatcgtttgcttggtcaatagcgatatgtgattttttatcaaccactcgaaaaagtaattggagtgttcatatcctctacgggctattgtctcatggccgtgtatgaaatttaagtaacacgactgtggtagatttgttctatagagccggttgccgcaaatagatagaactaccaatatgtctgtacaaatgttaaacattaattgattaacagaaaaaacaatgttcgttctgggaatagaaaccagatcaaaacaaaattcgttagaatatatgccacgtttatacattgaatataaaataactacagtttgaaaaataacagtatcatttaaacatttaacttgcggggttaatctcacaactttactgtttttaaactgttcaaaatatagcatcgatccatgagaaatacgtttagccgcctttaatagaggaaatcccaccgcctttctggatctcaccaacgacgatagttctgaccagcaactcatttcttcatcatccacctgttttaacatataataggcaggagatagatatccgtcattgcaatattccttctcgtaggcacacaatctaatattgataaaatctccattctcttctctgcatttattatcttgtttcggtggctgattaggctgtagtcttggtttaggctttggtatatcgttgttgaatctattttggtcattaaatctttcatttcttcctggtatatttttatcacctcgtttggttggatttttgtctatattatcgtttgtaacatcggtacgggtattcatttatcacaaaaaaaacttctctaaatgagtctactgctagaaaacctcatcgaagaagataccatattttttgcaggaagtatatctgagtatgatgatttacaaatggttattgccggcgcaaaatccaaatttccaagatctatgctttctatttttaatatagtacctagaacgatgtcaaaatatgagttggagttgattcataacgaaaatatcacaggagcaatgtttaccacaatgtataatataagaaacaatttgggtctaggagatgataaactaactattgaagccattgaaaactatttcttggatcctaacaatgaagttatgcctcttattattaataatacggatatgactgccgtcattcctaaaaaaagtggtaggagaaagaataagaacatggttattttccgtcaaggatcatcacctatcttgtgtattttcgaaactcgtaaaaagattaatatttataaagaaaatatggaatccgcatcgactgagtatacacctatcggagacaacaaggctttgatatctaaatatgcgggaattaatatcctaaatgtgtattctccttccacatccataagattgaatgccatttacggattcaccaataaaaataaactagagaaacttagtactaataaggaactagaatcgtatagttctagccctcttcaagaacccattaggttaaatgattttctgggactattggaatgtgttaaaaagaatattcctctaacagatattccgacaaaggattgattactataaatggagaatgttcctaatgtatactttaatcctgtgtttatagagcccacgtttaaacattctttattaagtgtttataaacacagattaatagttttatttgaagtattcgttgtattcattctaatatatgtattttttagatctgaattaaatatgttcttcatgcctaaacgaaaaatacccgatcctattgatagattacgacgtgctaatctagcgtgtgaagacgataaattaatgatctatggattaccatggatgacaactcaaacatctgcgttatcaataaatagtaaaccgatagtgtataaagattgtgcaaagcttttgcgatcaataaatggatcacaaccagtatctcttaacgatgttcttcgcagatgatgattcattttttaagtatttggctagtcaagatgatgaatcttcattatctgatatattgcaaatcactcaatatctagactttctgttattattattgatccaatcaaaaaataaattagaagccgtgggtcattgttatgaatctctttcagaggaatacagacaattgacaaaattcacagactttcaagattttaaaaaactgtttaacaaggtccctattgttacagatggaagggtcaaacttaataaaggatatttgttcgactttgtgattagtttgatgcgattcaaaaaagaatcctctctagctaccaccgcaatagatcctattagatacatagatcctcgtcgcgatatcgcattttctaacgtgatggatatattaaagtcgaataaagtgaacaataattaattctttattgtcatcatgaacggcggacatattcagttgataatcggccccatgttttcaggtaaaagtacagaattaattagacgagttggtaccaaaaattgaaaaactagcgtctttttttgctcgactgcagaccatgctcgaaggcgtacaggtagaaactatatccccgggcgatggtcggacatttccaaaaagaggccaaacctgtgttgtccactatactgggatgctggaagacggtaagaaggtggacagcagccgggataggaataagcctttcaagtttatgctcggaaagcaggaagttatcaggggttgggaggaaggcgtagcgcagatgagtgtcggccaacgggcaaagttgacgataagccctgactatgcatatggggccactggtcatcctggaatcatacctcctcatgcaactctcgtattcgatgtcgaacttctcaaacttgaatcagggggtggcagtggggtagatggctttggggacgtgggtgcacttgagagtctgagaggcaatgccgacctcgcctatatccttagtatggagccgtgtggccattgtcttataattaacaacgtcaacttttgtagagaaagtggtttgcggacgcgcacgggttctaacatagattgcgaaaaactccggcgcaggttctcaagtctccactttatggttgaagtcaagggggatcttacggctaagaagatggtgctggccctgctggagctggcccggcaagatcacggggccctcgattgttgtgttgtcgttattctgagtcatggatgtcaggcctcccacttgcagtttcctggcgccgtttatggcaccgatggctgtcctgtgtccgttgagaagatagttaatatatttaatggtacatcatgtcctagtctgggcgggaaacccaaacttttctttatccaggcttgcggtggagagcaaaaggaccacggctttgaggttgcctccacctctcctgaagatgagtcacccggtagtaaccctgagccagatgcgacaccattccaggagggtctccgcactttcgatcagttggacgcgataagttcattgcctacgccatccgatatattcgtgtcttatagcacctttcctggatttgtatcctggcgagaccccaaatccgggtcttggtatgtagagacactcgacgatatttttgaacagtgggctcacagtgaagatttgcagagcttgctcctcagagttgcgaatgcagtgtctgtcaaagggatttataagcagatgccagggtgtttcaattttctccgcaaaaaactgttctttaaaacatcctgattaattaatttttatgagctcggaggtaatgatatgtatcaatcggtgtgtagaaagtgttacatcgactcataatattatattttttatctaaaaaactaaaaataaacattgattaaattttaatataatacttaaaaatggatgttgtgtcgttagataaaccgtttatgtattttgaggaaattgataatgagttagattacgaaccagaaagtgcaaatgaggtcgcaaaaaaactaccgtatcaaggacagttaaaactattactaggagaattattttttcttagtaagttacagcgacacggtatattagatggtgccaccgtagtgtatataggatcggctcctggtacacatatacgttatttgagagatcatttctataatttaggagtgatcatcaaatggatgctaattgacggccgccatcatgatcctattttaaatggattgcgtgatgtgactctagtgactcggttcgttgatgaggaatatctacgatccatcaaaaaacaactgcatccttctaagattattttaatttctgatgtaagatccaaacgaggaggaaatgaacctagtacggcggatttactaagtaattacgctctacaaaatgtcatgattagtattttaaaccccgtggcatctagtcttaaatggagatgcccgtttccagatcaatggatcaaggacttttatatcccacacggtaataaaatgttacaaccttttgctccttcatattcagctgaaatgagattattaagtatttataccggtgagaacatgagactgactcgagttaccaaattagacgctgtaaattatgaaaaaaagatgtactaccttaataagatcgtccgtaacaaagtagttgttaactttgattatcctaatcaggaatatgactattttcacatgtactttatgctgaggaccgtgtactgcaataaaacatttcctactactaaagcaaaggtactatttctacaacaatctatatttcgtttcttaaatattccaacaacatcaactgaaaaagttagtcatgaaccaatacaacgtaaaatatctagcaaaaattctatgtctaaaaacagaaatagcaagagatccgtacgcggtaataaatagaaacgtgctactgagatatactaccgatatagagtataatgatttagttactttaataaccgttagacataaaattgattctatgaaaactgtgtttcaggtatttaacgaatcatccataaattatactccggttgatgatgattatggagaaccaatcattataacatcgtatcttcaaaaaggtcataacaagtttcctgtaaattttctatacatagatgtggtaatatctgacttatttcctagctttgttagactagatactacagaaactaatatagttaatagtgtactacaaacaggcgatggtaaaaagactcttcgtcttcccaaaatgttagagacggaaatagttgtcaagattctctatcgccctaatataccattaaaaattgttagatttttccgcaataacatggtaactggagtagagatagccgatagatctgttatttcagtcgctgattaatcaattagtagagatgagataagaacattataataatcaataatattatcttatatctcgtttagaaaaatgctaatattaaaatagctaacgctagtaatccaatcggaagccatttgatatctataatagggtatctaatttcctgattcagatagcggacagctatattctcggtagctactcgtttggaatcacaaacattatttacatctaatttactatctgtaatggaaacgtttcccaatgaaatggtacaatccgatacattgcattttgttatatttttttttaaagaggctggtaacaacgcatcgcttcgtttacatggctcgtaccaacaataatagggtaatcttgtatctattcctatccgtactatgcttttatcaggataaatacatttacatcgtatatcgtctttgttagcatcacagaatgcataaatttgttcgtccgtcatgataaaaatttaaagtgtaaatataactattatttttatagttgtaataaaaagggaaatttgattgtatactttcggttctttaaaagaaactgacttgataaaaatggctgtaatctctaaggttacgtatagtctatatgatcaaaaagagattaatgctacagatattatcattagtcatgttaaaaatgacgacgatatcggtaccgttaaagatggtagactaggtgctatggatggggcattatgtaaaacttgtgggaaaacggaattggaatgtttcggtcactggggtaaagtaagtatttataaaactcatatagttaagcctgaatttatttcagaaattattcgtttactgaatcatatatgtattcactgcggattattgcgttcacgagaaccgtattccgacgatattaacctaaaagagttatcgggacacgctcttaggagattaaaggataaaatattatccaagaaaaagtcatgttggaacagcgaatgtatgcaaccgtatcaaaaaattactttttcaaagaaaaaggtttgtttcgtcaacaagttggatgatattaacgttcctaattctctcatctatcaaaagttaatttctattcatgaaaagttttggccattattagaaattcatcaatatccagctaacttattttatacagactactttcccatccctccgctgattattagaccggctattagtttttggatagatagtatacccaaagagaccaatgaattaacttacttattaggtatgatcgttaagaattgtaacttgaatgctgatgaacaggttatccagaaggcggtaatagaatacgatgatattaaaattatttctaataacactaccagtatcaatttatcatatattacatccggcaaaaataatatgattagaagttatatcgtcgcccgacgaaaagatcagaccgctagatctgtaattggtcccagtacatctatcaccgttaatgaggtaggaatgcccgcatatattagaaatacacttacagaaaagatatttgttaatgcctttacagtggataaagttaaacaactattagcgtcaaaccaagttaaattttactttaataaacgattaaaccaattaacaagaatacgccaaggaaagtttatcaaaaataaaatacatttattgcctggtgattgggtagaagtagctgttcaagaatatacaagtattatttttggaagacagccgtctctacatagatacaacgtcatcgcttcatctatcagagctaccgaaggagatactatcaaaatatctcccggaattgccaactctcaaaatgctgatttcgacggagatgaagaatggatgatattggagcaaaatcctaaagccgtaattgaacaaagtattcttatgtatccgacgacgttactcaaacacgatattcatggagcccccgtttatggatctattcaagatgaaatcgtagcagcgtattcattgtttaggatacaagatctttgtttagatgaagtattgaacatcttggggaaatatggaagagagttcgatcctaaaggtaaatgtaaattcagcggtaaagatatctatacttacttgataggtgaaaagattaattatccgggtctcttaaaggatggtgaaattattgcaaacgacgtagatagtaattttgttgtggctatgaggcatctgtcattggctggactcttatccgatcataagtcgaacgtggaaggtatcaactttattatcaagtcatcttatgtttttaagagatatctatctatttacggttttggggtgacattcaaagatctgagaccaaattcgacgttcactaataaattggaggccatcaacgtagaaaaaatagaacttatcaaagaagcatacgccaaatatctcaacgatgtaagagacgggaaaatagttccattatctaaagctttagaggcggactatgtggaatccatgttatccaacttgacaaatcttaatatccgagagatagaagaacatatgagacaaacgctgatagatgatccagataataacctcctgaaaatggccaaagcgggttataaagtaaatcctacagaactaatgtatattctaggtacgtatggacaacaaaggattgatggtgaaccagcagagactcgagtattgggtagagtcttaccttactatcttccagactctaaggatccagaaggaagaggttacattcttaattctttaacaaaaggattaacgggttctcaatattacttttcgatgctggttgccagatctcaatctactgatatcgtctgtgaaacatcacgtaccggaacactggctagaaaaatcattaaaaagatggaggatatggtggtcgacggatacggacaagtagttataggtaatacgctcatcaagtacgccgccaattataccaaaattctaggctcagtatgtaaacctgtagatcttatctatccagatgagtccatgacttggtatttggaaattagtgctctgtggaataaaataaaacagggattcgtttactctcagaaacagaaacttgcaaagaagacattggcgccgtttaatttcctagtattcgtcaaacccaccactgaggataatgctattaaggttaaggatctgtacgatatgattcataacgtcattgatgatgtgagagagaaatacttctttacggtatctaatatagattttatggagtatatattcttgacgcatcttaatccttctagaattagaattacaaaagaaacggctatcactatctttgaaaagttctatgaaaaactcaattatactctaggtggtggaactcctattggaattatttctgcacaggtattgtctgagaagtttacacaacaagccctgtccagttttcacactactgaaaaaagtggtgccgtcaaacaaaaacttggtttcaacgagtttaataacttgactaatttgagtaagaataagaccgaaattatcactctggtatccgatgatatctctaaacttcaatctgttaagattaatttcgaatttgtatgtttgggagaattaaatccagacatcactcttcgaaaagaaacagataaatatgtagtagatataatagttaatagattatacatcaagagagcagaaataaccgaattagttgtcgaatatatgattgaacgatttatctcctttagcgtcattgtaaaggaatggggtatggagacattcattgaggacgaggataatattagatttactgtctacctaaatttcgttgaaccggaagaattgaatcttagtaagtttatgatggttcttccgggtgccgccaacaagggcaagattagtaaattcaagattcctatctctgattatacgggttatgacgacttcaatcaaacaaaaaagctcaataagatgactgtagaactcatgaatctaaaagaattgggttctttcgatttggaaaacgtcaacgtgtatcctggagtatggaatacatacgatatcttcggtatcgaggccgctcgtgaatacttgtgcgaagccatgttaaacacctatggagaagggttcgattatctgtatcagccttgtgatcttctcgctagtttactatgtgctagttacgaaccagaatcagttaataaattcaagttcggtgcagctagtactcttaagagagctacgttcggagacaataaagcattgttaaacgcggctcttcataaaaagtcagaacctattaacgataatagtagctgccacttttttagcaaggtccctaatataggaactggatattacaaatactttatcgacttgggtcttctcatgagaatggaaaggaaactatctgataagatatcttctcaaaagatcaaggaaatggaagaaacagaagacttttaattcttatcaataacatatttttctatgatctgtcttttaaacgatggattttccacaaatgcgcctctcaagtccctcatagaatgatacacgtataaaaaatatagcataggcaatgactccttatttttagacattagatatgccaaaatcatagccccgcttctatttactcccgcagcacaatgaaccaacacgggctcgtttcgttgatcacatttagataaaaaggcggttacgtcgtcaaaatatttactaatatcggtagttgtatcatctaccaacggtatatgaataatattaatattagagttaggtaatgtatatttatccatcgtcaaatttaaaacatatttgaacttaacttcagatgatggtgcatccatagcatttttataatttcccaaatacacattattggttacccttgtcattatagtgggagatttggctttgtgcatatctccagttgaacgtagtagtaagtatttatacaaacttttcttatccatttataacgtacaaatggataaaactactttatcggtaaacgcgtgtaatttagaatacgttagagaaaaggctatagtaggcgtacaagcagccaaaacatcaacacttatattctttgttattatattggcaattagtgcgctattactctggtttcagacgtctgataatccagtctttaatgaattaacgagatatatgcgaattaaaaatacggttaacgattggaaatcattaacggatagcaaaacaaaattagaaagtgatagaggtagacttctagccgctggtaaggatgatatattcgacttcaaatgtgtggatttcggcgcctattttatagctatgcgattggataagaaaacatatctgccgcaagctattaggcgaggtactggagacgcgtggatggttaaaaaggcggcaaaggtcgatccatctgctcaacaattttgtcagtatttgataaaacacaagtctaataatgttattacttgtggtaatgagatgttaaatgaattaggttatagcggttattttatgtcaccgcattggtgttccgattttagtaatatggaatagtgttagataaatgcggtaacgaatgttcctgtaaggaaccataacagtttagatttaacgttaaagatgagcataaacataataaacaaaattacaatcaaacctataacattaatatcaaacaatccaaaaaatgaaatcagtggagtagtaaacgcgtacataactcctggataacgtttagcagctgccgttcctattctagaccaaaaattcggtttcatgttttcgaagcggtgttctgcaacaagtcggggatcgtgttctacatatttggcggcgttatccagtatctgcctattgatcttcatttcgttttcgattctggctatttcaaaataaaatcccgatgatagacctccagactttataatttcatctacgatgttcagcgccgtagtaactctaataatataggctgataagctaacatcataccctcctgtatatgtgaatatggcatgatttttgtccattacaagctcggttttaactttattgcctgtaataatttctctcatctgtaggatatctatttttttgtcatgcattgccttcaagacgggacgaagaaacgtaatatcctcaataacgttatcgttttctacaataactacatattctacctttttattttctaactcggtaaaaaaattagaatcccatagggctaaatgtctagcgatatttcttttcgtttcctctgtacacatagtgttacaaaaccctgaaaagaagtgagtatacttgtcatcatttctaatgtttcctccagtccactgtataaacgcataatccttgtaatgatctggatcatccttgactaccacaacatttcttttttctggcataacttcgttgtcctttacatcatcgaacttctgatcattaatatgctcatgaacattaggaaatgtttctgatggaggtctatcaataactggcacaacaataacaggagttttcaccgccgccatttagttattgaaattaatcatatacaactctttaatacgagttatattttcgtctatccattgtttcacatttacatatttcgacaaaaagatataaaatgcgtattccaatgcttctctgtttaatgaattactaaaatatacaaacacgtcactgtctggcaataaatgatatcttagaatattgtaacaatttattttgtattgcacatgttcgtgatctatgagttcttcttcgaatggcataggatctccgaatctgaaaacgtataaataggagttagaataataatatttgagagtattggtaatatataaactctttagcggtataattagtttttttctctcaatttctatttttagatgtgatggaaaaatgactaattttgtagcattagtatcatgaactctaatcaaaatcttaatatcttcgtcacacgttagctctttgaagtttttaagagatgcatcagttggttctacagatggagtaggtgcaacaattttttgttctacacatgtatgtactggagccattgttttaactataatggtgcttgtatcgaaaaactttaatgcagatagcggaagctcttcgccgcgactttctacatcgtaattgggttctaacgccgatctctgaatggatactagttttctaagttctaatgtgattctctgaaaatgtaaatccaattcctccggcattatagatgtgtatacatcggtaaataaaactatagtatccaacgatcccttctcgcaaattctagtcttaaccaaaaaatcgtatataaccacggagatggcgtatttaagagtggattcttctaccgttttgttcttggatgtcatataggaaactataaagtccgcactactgttaagaatgattactaacgcaactatatagttcaaattaagcattttggaaacataaaataactctgtagacgatacttgactttcgaataagtttgcagacaaacgaagaaagaacagacctctcttaatttcagaagaaaactttttttcgtattcctgacgtctagagtttatatcaataagaaagttaagaattagtcggttaatgttgtatttcattacccaagtttgagatttcataatattatcaaaagacatgataatattaaagataaagcgctgactatgaacgaaatagctatatggttcgctcaagaatatagtcttgttaaacgtggaaacgataactgtatttttaatcacgtcagcggcatctaaattaaatataggtatatttattccacacactctacaatatgccacaccatcttcataataaataaattcgttagcaaaattattaattttagtgaaatagttagcgtcaactttcatagcttccttcaatctaatttgatgctcacacggtgcgaattccactctaacatcccttttccatgcctcaggttcatcgatctctataatatctagtttcttgcgtttcacaaacacgggctcgtctctcgcgatgagatctgtatagtaactatgtaaatgataactagatagaaagatgtagctatatagatgacgatcctttaagagaggtataataactttaccccaatcagataaactattgttatggtcttcggaaaaagaatttttataaatttttccagtattttccaaatatacgtacttgacatctaaaaaatccttaatgataataggaatggataatccgtctattttataaagaaatacatatcgcacattatacttttttttggaaatgggaataccgatgtgtctacataaatatgcaaagtctaaatattttttagagaatcttagttggtccaaattcttttccaagtacggtaatagatttttcatattgaacggtatcttcttaatctctggttctagttccgcattaaatgatgaaactaagtcactatttttataactaacgattacatcacctctaacatcatcatttaccagaatactgatcttcttttgtcgtaaatacatgtctaatgtgttaaaaaaaagatcatacaagttatacgtcatttcatctgtggtattcttgtcattgaaggataaactcgtactaatctcttctttaacagcctgttcaaatttatatcctatatacgaaaaaatagcaaccagtgtttgatcatccgcgtcaatattctgttctatcgtagtgtataacaatcgtatatcttcttctgtgatagtcgatacgttataaaggttgataacgaaaatatttttatttcgtgaaataaagtcatcgtaggattttggacttatattcgcgtctagtagatatgcttttatttttggaatgatctcaattagaatagtctctttagagtccatttaaagttacaaacaactaggaaattggtttatgatgtataatttttttagtttttatagattctttattctatacttaaaaaatgaaaataaatacaaaggttcttgagggttgtgttaaattgaaagcgagaaataatcataaattatttcattatcgcgatatccgttaagtttgtatcgtaatggcgtggtcaattacaaataaagcggatactagtagcttcacaaagatggctgaaatcagagctcatctaaaaaatagcgctgaaaataaagataaaaacgaggatattttcccggaagatgtaataattccatctactaagcccaaaaccaaacgagccactactcctcgtaaaccagcggctactaaaagatcaaccaaaaaggaggaagtggaagaagaagtagttatagaggaatatcatcaaacaactgaaaaaaattctccatctcctggagtcagcgacattgtagaaagcgtggccgctgtagagctcgatgatagcgacggggatgatgaacctatggtacaagttgaagctggtaaagtaaatcatagtgctagaagcgatctttctgacctaaaggtggctaccgacaatatcgttaaagatcttaagaaaattattactagaatctctgcagtatcgacggttctagaggatgttcaagcagctggtatctctagacaatttacttctatgactaaagctattacaacactatctgatctagtcaccgagggaaaatctaaagttgttcgtaaaaaagttaaaacttgtaagaagtaaatgcgtgcacttttttataaagatggtaaactctttaccgataataattttttaaatcctgtatcagacgataatccagcgtatgaggttttgcaacatgttaaaattcctactcatttaacagatgtagtagtatatgaacaaacgtgggaggaggcgttaactagattaatttttgtgggaagcgattcaaaaggacgtagacaatacttttacggaaaaatgcatgtacagaatcgcaacgctaaaagagatcgtatttttgttagagtatataacgttatgaaacgaattaattgttttataaacaaaaatataaagaaatcgtccacagattccaattatcagttggcggtttttatgttaatggaaactatgttttttattagatttggtaaaatgaaatatcttaaggagaatgaaacagtagggttattaacactaaaaaataaacacatagaaataagtcccgatgaaatagttatcaagtttgtaggaaaggacaaagtttcacatgaatttgttgttcataagtctaatagactatataagccgctattgaaactgacggatgattctagtcccgaagaatttctgttcaacaaactaagtgaacgaaaggtatacgaatgtatcaaacagtttggtattagaatcaaggatctccgaacgtatggagtcaattatacgtttttatataatttttggacaaatgtaaagtccatatctcctcttccatcaccaaaaaagttaatagcgttaactatcaaacaaactgctgaagtggtaggtcatactccatcaatttcaaaaagagcttacatggcaacgactattttagaaatggtaaaggataaaaattttttagatgtagtatctaaaactacgttcgatgaattcctatctatagtcgtagatcacgttaaatcatctacggatggatgatatagatctttacacaaataattacaagaccgataaatggaaatggataagcgtatgaaatctctcgcaatgacagctttcttcggagagctaaacacattagatattatggcattgataatgtctatatttaaacgccatccaaacaataccattttttcagtggataaggatggtcagtttatgattgatttcgaatacgataattataaggcttctcaatatttggatctgaccctcactccgatatctggagatgaatgcaagactcacgcatcgagtatagccgaacaattggcgtgtgtggatattattaaagaggatattagcgaatatatcaaaactactccccgtcttaaacgatttataaaaaaataccgcaatagatcagatactcgtatcagtcgagatacagaaaagcttaaaatagctctagctaaaggcatagattacgaatatataaaagacgcttgttaataagtaaatgaaaaaaaactagtcgtttataataaaacacaatatggatgccaacatagtatcatcttctactattgcaacgtatatagacgctttagcaaagaatgcttcagaattagaacagaggtctaccgcatacgaaataaataatgaattggaactagtatttattaagccgccattaattactttgacaaatgtagtgaatatctctacgattcaggaatcgtttattcgatttaccgttactaataaggaaggtgtcaaaattagaactaagattccattatctaaggtacatggtctagatgtaaaaaatgtacagttagtagatgctatagataacatagtttgggaaaagaaatcattagtgacggaaaatcgtcttcacaaagaatgcttgttgagactatcgacagaggaacgtcatatatttttggattacaagaaatatggatcctctatccgactagaattagtcaatcttattcaagcaaaaacaaaaaactttacgatagactttaagctaaaatattttctaggatccggtgcccaatctaaaagttctttgttgcacgctattaatcatccaaagtcaaggcctaatacatctctggaaatagaattcacacctagagacaatgaaaaagttccatatgatgaactaataaaggaattgacgactctatcacgtcatatatttatggcttctccagagaatgtaattctttctccgcctattaacgcacctataaagacttttatgttgcctaaacaagatatagtaggtctggatctggaaaatctatatgccgtaactaagactgacggcattcctataactatcagagttacatcaaacgggttgtattgttattttacacatcttgggtatattattagatatccagttaagagaataatagattccgaagtagtagtctttggtgaggcagttaaggataagaactggaccgtatatctcattaagctaatagagcctgtgaatgcaatcaatgatagactagaagaaagtaagtatgttgaatctaaactagtggatatttgtgatcggatagtattcaagtcaaagaaatatgaaggtccgtttactacaactagtgaagtcgtcgatatgttatctacatatttaccaaagcaaccagaaggtgttattctgttctattcaaagggacctaaatctaacattgattttaaaattaaaaaggaaaatactatagaccaaactgcaaatgtagtatttaggtacatgtccagtgaaccaattatctttggagaatcgtctatctttgtagagtataagaaatttagcaacgataaaggctttcctaaagaatatggttctggtaagattgtgttatataacggcgttaattatctaaataatatctattgtttggaatatattaatacacataatgaagtgggtattaagtccgtggttgtacctattaagtttatagcagaattcttagttaatggagaaatacttaaacctagaatcgataaaaccatgaaatatattaactcagaagattattatggaaatcaacataatatcatagtcgaacatttaagagatcaaagcatcaaaataggagatatctttaacgaggataaactatcggatgtgggacatcaatacgccaataatgataaatttagattaaatccagaagttagttattttacgaataaacgaactagaggaccgttgggaattttatcaaactacgtcaagactcttcttatttctatgtattgttccaaaacatttttagacgattccaacaaacgaaaggtattggcgattgattttggaaacggtgctgacctggaaaaatacttttatggagagattgcgttattggtagcgacggatccggatgctgatgctatagctagaggaaatgaaagatacaacaaattaaactctggaattaaaaccaagtactacaaatttgactacattcaggaaactattcgatccgatacatttgtctctagtgtcagagaagtattctattttggaaagtttaatatcatcgactggcagtttgctatccattattcttttcatccgagacattatgctaccgtcatgaataacttatccgaactaactgcttctggaggcaaggtattaatcactaccatggacggagacaaattatcaaaattaacagataaaaagacttttataattcataagaatttacctagtagcgaaaactatatgtctgtagaaaaaatagctgatgatagaatagtggtatataatccatcaacaatgtctactccaatgactgaatacattatcaaaaagaacgatatagtcagagtgtttaacgaatacggatttgttcttgtagataacgttgatttcgctacaattatagaacgaagtaaaaagtttattaatggcgcatctacaatggaagatagaccgtctacaaaaaactttttcgaactaaatagaggagccattaaatgtgaaggtttagatgtcgaagacttacttagttactatgttgtttatgtcttttctaagcggtaaataataatatggtatgggttctgatatccccgttctaaatgcattaaataattccaatagagcgatttttgttcctataggaccttccaactgtggatactctgtattgttaatagatatattaatacttttgtcgggtaacagaggttctacgtcttctaaaaataaaagtttgataacatctggcctgttcataaataaaaacttggcgattctatatatactcttattatcaaatctagccattgtcttatagatgtgagctactgtaggtgtaccatttgattttctttctaatactatatatttctctcgaagaagttcttgcacatcatctgggaataaaatactactgttgagtaaatcagttattttttttatatcgatattgatggacatttttatagttaaggataataagtatcccaaagtcgataacgacgataacgaagtatttatacttttaggaaatcacaatgactttatcagatcaaaattaacaaaattaaaggagcatgtatttttttctgaatatattgtgactccagatacatatggatctttatgcgtcgaattaaatgggtctagttttcagcacggtggtagatatatagaggtggaggaatttatagatgctggaagacaagttagatggtgttctacatccaatcatatatctgaagatatacccgaagatatacacactgataaatttgtcatttatgatatatacacttttgacgctttcaagaataaacgattggtattcgtacaggtacctccgtcgttaggagatgatagctatttgactaatccgttattgtctccgtattatcgtaattcagtagccagacaaatggtcaatgatatgatttttaatcaagattcatttttaaaatatttattagaacatctgattagaagccactatagagtttctaaacatataacaatagttagatacaaggataccgaagaattaaatctaacgagaatatgttataatagagataagtttaaggcgtttgtattcgcttggtttaacggcgtttcggaaaatgaaaaggtactagatacgtataaaaaggtatctaatttgatataatgaattcagtgactgtatcacacgcgccatatactattacttatcacgatgattgggaaccagtaatgagtcaattggtagagttttataacgaagtagccagttggctgctacgagacgagacgtcgcctattcctgataagttctttatacagttgaaacaaccgcttagaaataaacgagtatgtgtgtgcggtatagatccgtatccgaaagatggaactggtgtaccgttcgaatcaccaaattttacaaaaaaatcaattaaggagatagcttcatctatatctagattaaccggagtaattgattataaaggttataaccttaatataatagacggggttataccctggaattattacttaagttgtaaattaggagaaacaaaaagtcacgcgatctactgggataagatttccaagttactgctgcagcatataactaaacacgttagtgttctttattgtttgggtaaaacagatttctcgaatatacgggcaaagttagaatccccggtaactaccatagtgggatatcatccagcggctagagaccgtcaattcgagaaagatcgatcatttgaaattatcaacgttttactggaattagacaacaaggtacctataaattgggctcaagggtttatttattaatgctttagtgaaattttaacttgtgttctaaatggatgcggctattagaggtaatgatgttatctttgttcttaagactataggtgtcccgtcagcgtgcagacaaaatgaagatccaagatttgtagaagcatttaaatgcgacgagttagaaagatatattgagaataatccagaatgtacactattcgaaagtcttagggatgaggaagcatactctatagtcagaattttcatggatgtagatttagacgcgtgtctagacgaaatagattatttaacggctattcaagattttattatcgaggtgtcaaactgtgtagctagattcgcgtttacagaatgcggcgccattcatgaaaatgtaataaaatccatgagatctaatttttcattgactaagtctacaaatagagataaaacaagttttcatattatctttttagacacgtataccactatggatacattgatagctatgaaacgaacactattagaattaagtagatcatctgaaaatccactaacaagatcgatagacactgccgtatataggagaaaaacaactcttcgggttgtaggtactaggaaaaatccaaattgcgacactattcatgtaatgcaaccacctcatgataatatagaagattacctattcacttacgtggatatgaacaacaatagttattacttttctctacaacgacgattggaggatttagttcctgataagttatgggaaccagggtttatttcattcgaagacgctataaaaagagtttcaaaaatattcattaattctataataaactttaatgatctcgatgaaaataattttacaacggtaccactggtcatagattacgtaacaccttgtgcattatgtaaaaaacgatcgcataaacatccgcatcaactatcgttggaaaatggtgctattagaatttacaaaactggtaatccacatagttgtaaagttaaaattgttccgttggatggtaataaactgtttaatattgcacaaagaattttagacactaactctgttttattaaccgaacgaggagaccatatagtttggattaataattcatggaaatttaacagcgaagaacccttgataacaaaactaattttgtcaataagacatcaactacctaaggaatattcaagcgaattactctgtccaagaaaacgaaagactgtagaagctaacatacgagacatgttagtagattcagtggagaccgatacctatccggataaacttccgtttaaaaatggtgtattggacctggtagacggaatgttttactctggagatgatgctaaaaaatatatgtgtactgtatcaaccggatttaaatttgacgatacaaagttcgtcgaagacagtccagaaatggaagagttaatgaatatcattaacgatatccaaccattaacggatgaaaataagaaaaatagagagctatatgaaaaaacattatctagttgtttatgcggtgctaccaaaggatgtttaacattcttttttggagaaactgcaactggaaagtcgacaaccaaacgtttgttaaagtctgctatcggtgacctgtttgttgagacgggtcaaacaattttaacagatgtattggataaaggacctaatccatttatcgctaacatgcatttgaaaagatctgtattctgtagcgaactacctgattttgcatgtagtgggtcaaagaaaatcagatctgataatattaaaaagttgacagaaccttgtgtcattggaagaccgtgtttctccaataaaattaataatagaaaccatgcgacaatcattatcgatactaattacaaacctgtttttgataggatagataacgcattaatgagaagaattgccgtcgtgcgattcagaacacacttttctcaaccttctggtagagaggctgctgaaaataatgacgcgtacgataaagtcaaactattagacgaggggttagatggtaaaatacaaaataatagatatagattcgcatttctatacttgttggtgaaatggtacagaaaatatcatgttcctattatgaaactatatcctacacccgaagagattcctgactttgcattctatctcaaaataggtactctgttggtatctagctctgtaaagcatattccattaatgacggacctctccaaaaagggatatatattgtacgataatgtggtcactcttccgttgactactttccaacagaaaatatccaagtattttaattctagactatttggacacgatatagagagcttcatcaatagacataagaaatttgccaatgttagtgatgaatatctgcaatatatattcatagaggatatttcatctccgtaaatatatgctcatatatttatagaagatatcacatatctaaatgaataccggaattatagatttatttgataatcatgttgatagtataccaactatattacctcatcagttagctactctagattatctagttagaactatcatagatgagaacagaagcgtgttattgttccatattatgggatcaggtaaaacaataatcgctttgttgttcgccttggtagcttccagatttaaaaaggtttacattctagtgccgaacatcaacatcttaaaaattttcaattataatatgggtgtagctatgaacttgtttaatgacgaattcatagctgagaatatctttattcattccacaacaagtttttattctcttaattataacgataacgtcattaattataacggattatctcgctacaataactctatttttatcgttgatgaggcacataatatctttgggaataatactggagaacttatgaccgtgataaaaaataaaaacaagattccttttctactattgtctggatctcccattactaacacacctaatactctgggtcatattatagatttaatgtccgaagagacgatagattttggtgaaattattagtcgtggtaagaaagtaattcagacacttcttaacgaacgcggtgtgaatgtacttaaggatttgcttaaaggaagaatatcatattacgaaatgcctgataaagatctaccaacgataagatatcacggacgtaagtttctagatactagagtagtatattgtcacatgtctaaacttcaagagagagattatatgattactagacgacagctatgttatcatgaaatgtttgataaaaatatgtataacgtgtcaatggcagtattgggacaacttaatctgatgaataatttagatactttatttcaggaacaggataaggaattgtacccaaatctgaaaataaataatggcgtgttatacggagaagaattggtaacgttaaacattagttccaaatttaaatactttattaatcggatacagacactcaacggaaaacattttatatacttttctaattctacatatggcggattggtaattaaatatatcatgctcagtaatggatattctgaatataatggttctcagggaactaatccacatatgataaacggcaaaccaaaaacatttgctatcgttactagtaaaatgaaatcgtctttagaggatctattagatgtgtataattctcctgaaaacgatgatggtagtcaattgatgtttttgttttcatcaaacattatgtccgaatcctatactctaaaagaggtaaggcatatttggtttatgactatcccagatactttttctcaatacaaccaaattcttggacgatctattagaaaattctcttacgccgatatttctgaaccagttaatgtatatcttttagccgccgtatattccgatttcaatgacgaagtgacgtcattaaacgattacacacaggatgaattaattaatgttttaccatttgacatcaaaaagctgttatatctaaaatttaagacgaaagaaacgaatagaatatactctattcttcaagagatgtctgaaacgtattctcttccaccacatccatcaattgtaaaagttttattgggagaattggtcagacaatttttttataataattctcgtattaagtataacgataccaagttacttaaaatggttacatcagttataaaaaataaagaagacgctaggaattacatagatgatattgtaaacggtcacttctttgtatcgaataaagtatttgataaatctcttttatacaaatacgaaaacgatattattacagtaccgtttagactttcctacgaaccatttgtttggggagttaactttcgtaaagaatataacgtggtatcttctccataaaactgatgagatatataaagaaataaatgtcgagctttgttaccaatggataccttccagttacattggagccacacgagctgacgttagacataaaaactaatattaggaatgccgtatataagacgtatctccatagagaaattagtggtaaaatggccaagaaaatagaaattcgtgaagacgtggaattacctctcggcgaaatagttaataattctgtagttataaacgttccgtgtgtaataacctacgcgtattatcacgttggggatatagttagaggaacattaaacatcgaagatgaatcaaatgtaactattcaatgtggagatttaatctgtaaactaagtagagattcgggtactgtatcatttagcgattcaaagtactgcttttttcgaaatggtaatgcgtatgacaatggcagcgaagtcactgccgttctaatggaggctcaacaaggtatcgaatctagttttgtttttctcgcgaatatcgtcgactcataagaaagagaatagcggtaagtataaacacgaatactatggcaataattgcgaatgttttattcccttcgatatatttttgataatatgaaaaacatgtctctctcaaatcggacaaccatctcataaaatagttatctcgcgctggcgaggtggttgccgctcgtataatctccccagaataatatacttgcgtgtcgtcgttcaatttatacggatttctatagttctctgttatataatgcggttttccatcatgattagacgacgacaatagtgttctaaatttagatagttgatcagaatgaatgtttattggcgttggaaaaattatccatgctgcgtctgcagagtggttgatagttgttcctagatatgtaaaataatccaacgtactaggtagcaaattgtctagataaaatactgaatcaaacggcgcagacgtattagcggatctaatggaatccaattgattgactatcttttgaaaatatacatttttatgatccgatacttgtaagaatatagaaataatgataagtccatcatcgtgtttttttgcctcttcataagaactatattttttcttattccaatgaacaagattaatctctccagagtatttgtacacatctatcaagtgattggatccataatcgtcttcctttccccaatatatatgtagtgatgataacacatattcattggggagaaaccctccacttatatatcctcctttaaaattaatccttactagttttccagtgttctggatagtggttggtttcgactcattataatgtatgtctaacggcttcaatcgcgcgttagaaattgcttttttagtttctatattaataggagatagttgttgcggcatagtaaaaatgaaatgataactgtttaaaaatagctcttagtatgggaattacaatggatgaggaagtgatatttgaaactcctagagaattaatatctattaaacgaataaaagatattccaagatcaaaagacacgcatgtgtttgctgcgtgtataacaagtgacggatatccgttaataggagctagaagaacttcattcgcgttccaggcgatattatctcaacaaaattcagattctatctttagagtatccactaaactattacggtttatgtactacaatgaactaagagaaatctttagacggttgagaaaaggttctatcaacaatatcgatcctcactttgaagagttaatattattgggtggtaaactagataaaaaggaatctattaaagattgtttaagaagagaattaaaagaggaaagtgatgaacgtataacagtaaaagaatttggaaatgtaattctaaaacttacaacacgggataaattatttaataaagtatatataggttattgcatggcgtgttttattaatcaatcgttggaggatttatcgcatactagtatttacaatgtagaaattagaaagattaaatcattaaatgattgtattaacgacgataaatacgaatatctgtcttatatttataatatgctagttaatagtaaatgaacttttacagatctagtataattagtcagattattaagtataatagacgactagctaagtctattatttgcaaggatgactctcaaattattacactcacggcattcgttaaccaatgcctatggtgtcataaacgagtatccgtgtccgctattttattaactactgataacaaaatattagtatgtaacagacgagatagttttctctattctgaaataattagaactagaaacatgtttagaaagaaacgattatttctgaattattccaattatttgtccaaacaggaaagaagtatactatcgtcatttttttctctatatccagctactgctgataatgatagaatagacgctatttatccgggtggcatacccaaaaggggtgagaatgttccagagtgtctatccagggaaatcaaagaagaagttaatatagacaattcttttgtattcatagacactcggttttttattcatggtatcatagaagataccattatcaacaaattttttgaggtaattttctttgtcggaagaatatctctaacgagtgatcaaattattgatacctttaaaagtaatcatgaaatcaaggatctaatatttttagatccgaattcaggtaatggactccaatacgaaattgcaaaatatgctctagatactgcaaaacttaaatgttacggccatagaggatgttattatgaatcattaaaaaaattaactgaggatgattgattagaaaatataaattaatttaccatcgtgtatttttataacgggattgtccggcatatcatgtagatagttaccgtctacatcgtatactcgaccatctacgcctttaaatcctctatttattgacattaatctattagaattggaataccaaatattagtaccctcaattagtttattggtaatattttttttagacgatagatcgatggctcttgaaaccaaggttttccaaccggactcattgtcgatcggtgagaagtctttttcattagcatgaatccattctaatgatgtatgtttaaacactctaaacaattggacaaattcttttgatttgctttgaatgatttcaaataggtcttcgtctacagtaggcataccattagataatctagccattataaagtgcacgtttacatatctacgttctggaggagtaagaacgtgactattgagacgaatggctcttcctactatctgacgaagagacgcctcgttccatgtcatatctaaaatgaagatatcattaattgagaaaaaactaataccctcgcctccactagaagagaatacgcatgttttaatgcattctccgttagtgtttgattcttggttaaactcagccaccgccttgattctagtatcttttgttctagatgagaactctatattagagataccaaagactttgaaatatagtaataagatttctattcctgactgattaacaaatggttcaaagactagacatttaccatgggatgctaatattcccaaacatacatctataaatttgacgcttttctcttttaattcagtaaatagagagatatcagccgcactagcatcccctttcaatagttctccctttttaaaggtatttaatgcggatttagaaaactctctatctcttaatgaatttttaaaatcattatatagtgttgctatctcttgcgcgtattcgccgggatcacgattttgtctttcaggaaagctatcgaacgtaaacgtagtagccatacgtctcagaattctaaatgatgatataccagtttttatttctgcgagtttagccttttgataaatctcttcttgcttttttgacatattaacgtatcgcattaatactgttttcttagcgaatgatgcagacccttctacgttatcaaaaatagaaaactcgttattaactatgtacgaacataggcctcctagtttggagactaattctttttcatcgactagacgtttattctcaaatagtgattggtgttgtaaggatcctggtcgtagtaagttaaccaacatggtgaattcttgcacactattgacgataggtgtagccgataaacaaatcatcttatggttttttaatgcgatggtcttggataaaaaattatatactgaacgagtaggacggatcttaccatcttctttgattaatgatttagaaatgaagttatgacattcatcaataatgacgcatattctactcttggaattaatagttttgatattagtaaaaaatttatttctaaaattttgatcatcgtaattaataaaaatacaatccttcgttatctctggagcgtatctgagtatagtgttcatccaaggatcttctatcaaagcctttttcaccaataagataatagcccaattcgtataaatatccttaagatgtttgagaatatatacagtagtcattgttttaccgacacccgtttcatggaacaataaaagagaatgcatactgtctaatcctaagaaaactcttgctacaaaatgttgataatccttgaggcgtactacgtccgaccccatcatttcaacgggcatattagtagttctgcgtaaggcataatcgatataggccgcgtgtgatttactcatttatgagtgataagtaataactatgttttaaaaatcacagcagtagtttaactagtcttctctgatgtttgttttcgatactttttgaatcagaagtcatactagaataaagcaacgagtgaacgtaatagagagcttcgtatactctattcgaaaactctaagaacttattaatgaattccgtatccactggattgtttaaaatactaaattgaacactgttcacatccttccaagaagaagacttagtgacggacttaacatgagacataaataaatccaaattttttttacaaacatcactagccaccataatggcgctatctttcaaccagctatcgcttacgcattttagcagtctaacatttttaaagagactacaatatattctcatagtatcgattacacctctaccgaataaagttggaagtttaataatacaatatttttcgtttacaaaatcaaataatggtcgaaacacgtcgaaggttaacatcttataatcgctaatgtatagattgttttcagtgagatgattattagatttaatagcatctcgttcacgtttgaacagtttattgcgtgcgctgaggtcggcaactacggcgtccgctttagtactcctcccataatactttacgctattaatctttaaaatttcatagactttatctagatcgctttctggtaacatgatatcatgtgtaaaaagttttaacatgtcggtcggcattctatttagatcattaactctagaaatctgaagaaagtaattagctccgtattccagactaggtaatgggcttttacctagagacagattaagttctggcaatgtttcataaaatggaagaaggacatgcgttccctcccggatattttttacaatttcatccatttacaactctatagtttgttttcattattattagttattatctcccataatcttggtaatacttaccccttgatcgtaagataccttatacaggtcattacatacaactaccaattgtttttgtacataatagattggatggttgacatccatggtggaataaactactcgaacagatagtttatctttccccctagatacattggccgtaatagttgtcggcctaaagaatatctttggtgtaaagttaaaagttagggttcttgttccattattgctttttgtcagtagttcattataaattctcgagatgggtccgttctctgaatatagaacatcatttccaaatctaacttctagtctagaaataatatcggtcttattcttaaaatctattcccttgatgaagggatcgttaatgaacaaatccttggcctttgattcggctgatctattatctccgttatagacgttacgttgactagtccaaagacttacaggaatagatgtatcgatgatgttgatactatgtgatatgtgagcaaagattgttctcttagtggcatcactatatgttccagtaatggcggaaaactttttagaaatgttatatataaaagaattttttcgtgttccaaacattagcagattagtatgaagataaacactcatattatcaggaacattatcaatttttacatacacatcagcatcttgaatagaaacgataccatcttctggaacctcaacaatctcggcagactccggataaccagtcggtggaccatcgctaacaataactagatcatccaacaatctactcacatatgcatctatataatctttttcatcttgtgagtaccctggatacgaaataaatttattatccgtatttccataataaggtttagtataaacagagagcgatgttgccgcatgaacttcagttacagtcgccgttggttggtttatttgacctattactctcctaggtttctctataaacgatggtttaatttgtacattcttaaccatatatccaataaagctcaattcaggaacataaacaaattctttgttgaacgtttcaaagtcgaacgaagagtcacgaataacgatatcggatactggattgaaggttaccgttacggtaatttttgaatcggatagtttaagactgctgaatgtatcttccacatcaaacggagttttaatataaacgtatactgtagatggttctttaatagtgtcattaggagttaggccaatagaaatatcattaagttcactagaatatccagagtgtttcaaagcaattgtattattgatacaattattatataattcttcgccctcaatttcccaaataacaccgttacacgaagagatagatacgtgattaatacatttatatccaacatatggtacgtaaccgaatcttcccatacctttaacttctggaagttccaaactcagaaccaaatgattaagcgcagtaatatactgatccctaatttcgaagctagcgatagcctgattgtctggaccatcgtttgtcataactccggatagagaaatatattgcggcatatataaagttggaatttgactatcgactgcgaagacattagaccgtttaatagagtcatccccaccgatcaaagaattaatgatagtattattcattttctatttaaaatggaaaaagcttacaataaactccgtagagaaatatctataatttgtgagttttccttaaagtaacagcttccgtaaacgccgtctttatctcttagtaagtttattgtatttataaccttttccttatcttcatagaatactaaaggcaacaaagaaatttttggttcttctctaagagctacgtgagacttaaccatagaagccaacgaatccctacatattttagaacagaaataccctacttcaccacccttgtatgtctcaatactaataggtctaaaaaccaaatcttgattacaaaaccaacacttatcaattacactatttgtcttaatagacacatctgccatagatttataatactttggtagtatacaagcgagtgcttcttctttagcgggcttaaagactgctttaggtgctgaaataaccacatctggaaggcttactcgcttagccatttaattacggaactatttttttatacttctaatgagcaagtagaaaacctctcatctacaaaaacatactcgtgtccataatcctctaccatagttacacgttttttagatctcatatgtgctaaaaagttttcccatactaattggttactattatttttcgtataatttttaacagtttgaggttttagatttttagttacagaagtgatatcgaatattttatccaaaaagaatgaataattaattgtcttagaaggagtgttttcttggcaaaagaataccaagtgcttaaatatttctactacttcattaatcttttctgtactcagattcagtttctcatcttttacttgattgattatttcaaagactaacttataatcctttttatttattctctcgttagccttaagaaaactagatacaaaatttgcatctacatcatccgtggatatttgatttttttccatgatatccaagagttccgagataatttctccagaacattgatgagacaataatctccgcaatacatttctcaaatgaataagtttattagacacgtggaagtttgactttttttgtacctttgtacatttttgaaataccgactcgcaaaaaatacaatattcatatccttgttcagatactataccgttgtgtctacaaccgctacataatcgtagattcatgttaacactctacgtatctcgtcgtccaatattttatataaaaacattttatttctagacgttgccagaaaatcctgtaatacttttagttttttgggctgtgaataaagtatcgccctaatatggttaccgtcctccgccaatatagtagttaaattatccgcacatgcaaaagaacaccgcttaggcggattcagtacaatgttatatttttcgtaccaactcatttaaatatcataatctaaaatagttctgtaatatgtctagcgctaatatattgatcataatcctgtgcataaattaagatacaacaatgtctcgaaatcatcgacatggcttcttccatagttagaagatcgtcgtcaaagttagcaacgtgattcatcaacatttgctgttttgaggcagcaaatactgaaccgtcgccattcaaccattcataaaaaccatcgtctgaatccattgataatttcttgtactggtttttgagagctcgcatcaatctagcatttctagctcccggattgaaaacagaaagaggatcgtacatccagggtccattttctgtaaatagaatcgtataatgtcccttcaagaagatatcagacgatccacaatcaaagaattggtctccgagtttgtaacaaactgcggactttaacctatacatgataccgtttagcataatttctggtgatacgtcaatcggagtatcatctattagagatctaaagccggtgtaacattctccaccaaacatattcttattctgacgtcgttctacataaaacatcattgctccattaacgataacaggggaatgaacagcactacccatcacattagttcccaatggatcaatgtgtgtaactccagaacatcttccatagcctatgttaggaggagcgaacaccactcttccactattgccatcgaatgccatagaataaatatccttggaattgatagaaatcggactgtcggatgttgtgatcatcttcataggattaacaacgatgtatggtgccgcctgaagtttcatatcgtaactgatgccgttcataggtctagccacagaaaccaacgtaggtctaaatccaactatagacaaaatagaagccaatatctgttcctcatctgtcataacttgagagcatccagtatgaataatcttcattagatggggatctaccgcatcatcatcgttacaataaaaaattcccattctaatgttcataattgcttttctaatcatggtatgcatgtttgctctctgaatctctgtggaaattagatctgatacacctgtaatcactatcggattatcctccgtaagacgattaaccaacaacatataattataagactttacttttctaaattcataaagttgctggattaggctataggtgtctccatgtacatacgcgttctcgagcgcaggaagtttaataccgaatagtgccatcagaataggatgaatatagtaattagtttctggttttctataaataaaagacaaatcttgtgaactagacatatcggtaaaatgcatggattggaatcgtgtagtcgacagaagaatatgatgattagatggagagtatattttatctaactctttgagttggtcaccgattctaggactagctcgagaatgaataagtactaaaggatgagtacatttcacagaaacactagcattgttcaatgtgctctttacatgggtaaggagttgaaatagctcgtttctatttgttctgacaatatttagtttattcataatgttaagcatatcctgaatagtaaagttagatgtgtcatacttgttagtagttagatatttagcaattgcattcccatcatttctcaatctcgtactccaatcatgcgtggatgctacttcgtcgatggaaaccatacaatcctttttgataggctgttgagattgattatttcctgcacgtttaggtttggtacgttgatttctagcccctgcggatataaagtcatcgtctacaatttgggacaatgaattgcatacactacaagacaaagatttatcagaagtgtgaatatgatcttcatctaccaaagaaagagtttgattagtataactagattttagtcctgcgttagatgttaaaaaaacatcgctattgaccacggcttccattatttatattcgtagtttttactcgaaagcgtgattttaatatccaatcttattacttttggaatcgttcaaaacctttgactagttgtagaatttgatctattgccctacgcgtatactcccttgcatcatatacgttcgtcaccagatcgtttgtttcggcctgaagttggtgcatatctttttcaacactcgacatgagatccttaagggccatatcgtctagattttgttgagatgctgctcctggatttggattttgttgtgctgttgtacatactgtaccaccagtaggtgtaggagtacatacagtggccacaataggaggttgaggaggtgtaaccgttggagtagtacaagaaatatttccatccgattgttgtgtacatgtagttgttggtaacgtctgagaaggttgggtagatggcggtgtcgtcgtcttttgatctttattaaatttagagataatatcctgaacagcattgctcggcgtcaacgctggaaggagtgaactcgccggcgcatcagtatctgcagacagccaatcaaaaagattagacatatcagatgatgtattagtttgttgtcgtggttttggtgtaggagcagtactactaggtagaagaataggagccgatgtaggtgtcggaaccggctgtggagttatatgaatagttggttgtagcggttggataggctgtctgctggcggccatcatattatctctagctagttgttctcgcaactgtctttgataatacgactcttgagactttagtcctatttcaatcgcttcatcctttttcgtatccggatccttttcttcagaataatagattgacgactttggtgtagaggattctgccagcccctgtgagaacttgttaaagaagtccatttaaggctttaaaattgaattgcgattataagattaaatggcagacacagacgatattatcgactatgaatccgatgatctcactgaatacgaggatgatgaagaagaggaagaagatggagagtcactagaaactagtgatatagatcccaaatcttcttataagattgtagaatcagcatccactcatatagaagatgcgcattccaatcttaaacatatagggaatcatatatctgctcttaaacgacgctatactagacgtataagtctatttgaaatagcgggtataatagcagaaagctataacttgcttcaacgaggaagattacctctagtttcagaattttctgacgaaacgatgaagcaaaatatgctacatgtaattatacaagagatagaggagggttcttgtcctatagtcatcgaaaagaacggagaattgttgtcggtaaacgattttgacaaagatggtctaaaattccatctagactatattatcaaaatttggaaacttcaaaaacgatattagaatttatacgaatatcgttctctaaatgtcacaatcaagtctcgcatgttcagcaatttattgtcgtactttatatcgtgttcattaacgatatcttgcaaaatagtaatgattctatcttccttcgatagatattcttcagagattattgtcttatattctttcttgttatcagatatgaatttgataagactttgaacattattgatacccgtctgtttaattttttctacagatattttagttttggcagattctatcgtatctgtcaatagacatccaacatcgacattcgacgtcaattgtctataaatcaacgtataaattttagaaataacattagcgaattgttgtgcattgatgtcgttattctgaaacagtatgattttaggtagcattttcttaacaaagagaacgtatttattgttactcagttgaacagatgatatatccagattactaacgcatctgattccgtataccaaactttcagaagaaatggtatacaattgtttgtattcattcaatgtctctttttcagaaattagtttagagtcgaatactgcaataattttcaagagatagttttcatcagataagattttatttagtgtagatatgataaaactattgttttgttggagaacttgatacgccgcgttctctgtagtcgacgctctcaaatgggaaacgatctccattatttttttggaatcggatactatatcttcggtatcttgacgcagtctagtatacatagagttaagagagattagagtttgtacattaagcaacatgtctctaaatgtggctacaaacttttccttttccacatcatctagtttattatataccgatttcacaacggcaccagatttaaggaaccagaatgaaaaactctgataactacaatatttcatcatagttacgattttatcatcttctatagttggtgtaatagcgcatacctttttctccaagactggaaccaacgtcataaaaatgtttaaatcaaaatccatatcaacatctgatgcgctaagaccagtctcgcgttcaagattatctttactaatggtgacgaactcatcgtatagaactctaagtttgtccattatttatttacagatttagttgtttaatttatttgtgctcttccagagttgggatagtatttttctaacgtcggtattatattattaggatctacgttcatatgtatcataatattaatcatccacgttttgataaatctatctttagcttctgaaataacgtatttaaacaaaggagaaaaatatttagctacggcatcagacgcaataacattttttgtaaatgtaacgtatttagacgacagatcttcgttaaaaagttttccatctatgtagaatccatcagttgttaacaccattcccgcgtcagattgaataggagtttgaatagtttgttttggaaatagatccttcaataacttatagttgggtgggaaaaaatcgattttatcactagactctttcttttttactatcattacctcatgaactatttcttgaatgagtatatgtattttctttcctatatcggacgcgttcattggaaaatataccatgtcgttaactataagaatatttttatcctcgtttacaaactgaataatatcagatgtagttcgtaaacgaactatatcatcaccagcacaacatctaactatatgatatccactagtttcctttagtcgtttattatcttgttccatattagcagtcattccatcatttaagaaggcgtcaaagataatagggagaaatgacattttggattctgttacaactttaccaaaattaaggatatacggacttactatctttttctcaacgtcaatttgatgaacacacgatgaaaatgtacttcgatgagattgatcatgtagaaaacaacaagggatacaatatttccgcatatcatgaaatatattaagaaatcccaccttattatatttccccaaaggatccatgcacgtaaacattatgccgttatcattaataaagacttctttctcatcggatctgtaaaagttgttactgatttttttcattccaggatctagataattaataatgatgggttttctattcttattctttgtattttggcatatcctagaccagtaaacagtttccactttggtaaaatcagcagacttttgaacgctattaaacatggcattaatggcaataactaaaaatgtaaaatatttttctatgttaggaatatggtttttcactttaatagatatatggtttttggccaaaatgatagatatttttttatccgaggatagtaaaatattattagtcgccgtctctataaaaatgaagctagtctcgatatccaattttattctagaattgataggagtcgccaaatgtaccttatacgttatatctcccttgatgcgttccatttgtgtatctatatcggacacaagatctgtaaatagttttacgttattaatcatcacggtatcgccgtcgctagataatgctaatgtaccatccaagtcccaaatggagagatttaactgttcatcgtttagaataaaatgattaccggtcatattaataaagtgttcatcgtatctagataacaacgacttataattaatgtccaagtcttgaactcgctgaatgatcttttttaacccagttagttttagattggtacgaaatatattgttaaactttgattctacagtaatgtccaaatctagttgtggaaatacttccatcaacattgtttcaaacttgataatattattatctacatcttcatacgatccaaattccggaatagatgtatcacatgctcttgccacccagataaccaaaaagtcacacgctccaggatatacattgtataaaaagctatcgtttttaagtagggtttttttctgcgtgtatacgaagggattaaaaatagtattatcaacgtaactatattccaaattattcttatgagaatagataataatatcgtccttaatatctaacaaatttcctaaatatccctttaattgagtcattcgaagcgtcaatagaatatgtctcttaactatttccggctgttgtatatttaaatgacttcgtaaaaaataatatatgggcgacttctcatctatgtaatcatatggagtgagatatagggctcgttctacctcctgccccttacccacctgtaataccaattgcggacttactatatatcgcatatttatatcgtggggtaaagtgaaaatctactaccgatgatgtaagtcttacaatgttcgaaccagtaccagatcttaatttggaggcctccgtagaactaggggaggtaaatatagatcaaacaacacctatgataaaggaaaatagcggttttatatcccgtagtagacgtctattcgcccatagatctaaggatgatgagagaaaactagcactacgattctttttacaaagactttattttttagatcatagagagattcattatttgttcagatgcgttgacgctgtaaaagacgtcactattaccaaaaaaaataacattatcgtggcgccttatatagcacttttaactatcgcatcaaaaggatgcaaacttacagaaacaatgattgaagcattctttccagaactatataatgaacatagtaagaaatttaaattcaactctcaagtatccatcatccaagaaaaactcggataccagtttggaaactatcacgtttatgattttgaaccgtattactctacagtagctctggctattcgagatgaacattcatctggcatttttaatatccgtcaagagagttatctggtaagttcattatctgaaataacatatagattttatctaattaatctaaaatctgatcttgttcaatggagtgctagtacgggcgctgtaattaatcaaatggtaaatactgtattgattacagtgtatgaaaagttacaactggtcatagaaaatgattcacaatttacatgttcattggctgtggaatcagaacttccaataaaattacttaaagatagaaatgaattatttacaaaattcatcaacgagttaaaaaagaccagttcattcaagataagcaaacgcgataaggatacgctactaaaatattttacttaggactggagttagaatttatagacgactcatttcgtttatcattattactaccatcattattagtattcttcttgttatcttgttcagaaatatacagcaatgctatgcctaatactaaatacattatcatgcttgcaatggctctaacaacgacgaaccaaaatgaatttggtcgtagcttttgttcacaaaaatacataaagaaatgtctacataaatctatggcgccattggctacttgaaatagcgccagtcctcctacagattttaatatagctgtataacatgacatttattcatcatcaaaagagacagagtcaccatctgtcatatttagattttttttcatgtgttcaaagtatcctctactcatttcattataatagtttatcatacttagaattttaggacggatcaatgagtaagacttgactagatcgtcagtagtaatttgtgcatcgtctattctgcatccgcttcgtcgaataatgtatagcatcgctttgagattctccatagctatcaagtctttatacaatgacatggaaatatctgtgaatactttatacttctccaacatcgatgccttaacatcatcgcctactttagcattgaaaatacgttctattgtgtagatggatgtagcaagatttttaaacaacaatgccatcttacacgatgattgcctcaagtctccaatcgtttgtttagaacgattagctacagagttcaacgcttggctgactagcatattattatctttagaaattgtattcttcaatgaagcgtttatcatatctgtgatttcgttagtcatattacagtctgactgggttgtaatgttatccaacatatcacctatggatacggtacacgtaccagcatttgtaataatcctatctaagatgttgtatggcattgcgcagaaaatatcttctcctgtaatatctccactctcgataaatctactcagattattcttaaatgccttattctctggagaaaagatatcagtgtccatcatttcattaatagtatacgcagaaaagataccacgagtatcaattctatccaagatacttatcggttccgagtcacagataatggtttcctctccttcgggagatcctgcatagaaatatctaggacaatagtttctatactgtctgtaactctgataatctctaaagtcactaactgataccatgaaattgagaagatcaaacgctgaagtaatcaatttttctgcctcgtttttactacaactagttttcatcaatgtagtgacgatgtattgtttagttactcttggtctaatactgatgatagagatattattacttcccataatggatcttctagtagtcaccttaaagcccattgatgcaaatagcagatagataaagtcttggtatgactcctttctaatatagtacggactacctttgtcacccaactttatacccacataagccataacaacctctttaatagccgtttcatgaggtttatcagccatgagcctgagtagttggaagaatctcatgaatcccgtctcagaaagtcctatatgcatgatagatttatctttcctgggaaactctcgtatagtcatagatgaaatactcttcaaagtttctgaaataagattagtaacagtcttacctccgactactctgggtaacaaacatactctaataggtgttttctctgcggagataatatcagaaaggatagagcaataagtagtattattgtgattataaagaccgaatacataacaggtagaatttataaacatcatgtcctgaaggtttttagacttgtattcctcgtaatccataccgtcccaaaacatggatttggtaactttgatagccgtagatctttgttccttcgccaacaggttaaagaaattaataaagaatttgttgtttctatttatgtccacaaattgcacgtttggaagcgtaactgttacgttcactgcagcattttgaggatcgcgagtatgaagtacgatgttattgtttactggtatatctggaaagaaatctaccagtctaggaataagagattgatatcgcatagaaatagtaaagtttataatctcatcatcgaagagcattttgttaccattgtaataaatatccactctgtcatatgtataaatgaagtactgttcaaacatgatgagatgtttatatgttggcatagtagtgagatcgacgtttggtaatggcaatgtattaagattaactccataatgtctagcagcatctgcgatgttataagtgtcgtcaaagcggggtcgatcttgtgctgttatatattgtctaacacctataagattatcaaaatcttgtctgcttaatacaccgttaacaatttttgccttgaattcttttattggtgcattaataacatccttatagaggatgttaaacaaataagtgttatcaaagttaagatctggatatttcttttctgctagaacatccattgagtcggagccatctggtttaatataaccaccgataaatctagctctgtattctgtatccgtcaatctaatattaagaaggtgttgagtgaaaggtggaagatcgtaaaagctgtgagtattaatgataggattagtttccgaactaatgttaattggggtattaataatatctatatttccagcgttaagtgtaacattaaacagttttaattcacgtgacgtggtatcaattaaataattaatgcccaatttggatatagcagcctgaagctcatcttgtttagttacggatcctaatgagttattaagcaatatatcgaacggatgaacgaaggttgttttaagttggtcacatactttgtaatctagacatagatgcggaagaacggtagaaactatacgaaataaatattcagagtcctctaattgatcaagagtaactattgacttaataggcatcatttatttagtattaaatgacgaccgtaccagtgacggatatacaaaacgatttaattacagagttttcagaagataattatccatctaacaaaaattatgaaataactcttcgtcaaatgtctattctaactcacgttaacaacgtggtagatagagaacataatgccgccgtagtgtcatctccagaggaaatatcctcacaacttaatgaagatctatttccagatgatgattcaccggccactattatcgaacgagtacaacctcatactactattattgacgatactccacctcctacttttcgtagagagttattaatatcggaacaacgtcaacaacgagaaaaaagatttaatattacagtatcgaaaaatgctgaagcaataatggaatctagatctatgataacttctatgccaacacaaacaccatccttgggagtagtttatgataaagataaaagaattcagatgttagaggatgaagtggttaatcttagaaatcaacgatctaatacaaaatcatctgataatttagataattttaccaaaatactatttggtaagactccgtataaatcaacagaagttaataagcgtatagccatcgttaattatgcaaatttgaacgggtcccccttatcagttgaggacttggatgtttgttcggaggatgaaatagatagaatctataaaacgattaaacaatatcacgaaagtagaaaacgaaaaattatcgtcactaacgtgattattattgtcataaacattatcgagcaggcattgctaaaactcggatttgaagaaatcaaaggactgagtaccgatatcacttcagaaattatcgatgtggagatcggagatgactgcgatgctgtagcatctaaactaggaatcggtaacagtccggttcttaatattgtattgtttatactcaagatattcgttaaacgaattaaaattatttaatttaatacattcccatatccagacaacaatcgtctggattaatctgttcctgtcgtctcataccggacgacatattaatctttttattagtaggcatctttttagatggtttctttttcccagcattaactgagtcgatacctagaagatcgtgattgatctctccgaccattccacgaacttctaattggccgtctctgacggtaccataaactattttaccagcattagtaacagcttggacaatctgaccatccattgcgttgaatgatgtagttgctgttgttctacgtttaggagcaccagaagtatttttggagcccttggaggctgatgtagaagaagacgaggattttgatttacatgtaatacattttgtactctttgattttgtatcacatgcgccggcagtcacatttgtttgagaattaagattattgttgcctcctttgacggctgcatctccaccgatttgcgctagtagatttttaagctgtggtgtaatcttattaactgtttcgatataatcatcgtaactgcttctaacggctaaattttttttatccgccatttagaagctaaaaatatttttatttatgcagaagatttaactagattatacaatgaactaatatgatccttttccagattatttacaaacttggtattttttggttctggaggaggcgaatttaaattcggacttggattcggattttgtgagttcttgatcttattatacatcgagtataggatggcgacggtaactgctacgcaaataccgatcaacaaaagaataccaatcatttattgacaataacttcactattgatcaagtatgcaatatatcatcttttcactaaataagtagtaataatgattcaacaatgtcgagatatatggacgataataatttagttcatggaaatatcgctatgattggtatgaatgactccgctaactctgtggggtgcgcagtgctttccccacatagaataaattagcattccgactgtgataataataccaagtataaacgccataatactcaatactttccatgtacgagtgggactggtagacttactaaagtcaataaaggcgaagatacacgaaagaatcaaaagaatgattccagcgattagcacgccggaaaaataatttccaatcataagcatcatgtccatttaactaataaaaattttaaatcgccgaatgaacaaagtggaatataaaccatataaaaacaatagtttgtactgcaaaaataatatctatttttgttttcgaagatatggtaaaattaaatagtagtacacagcatgttataactaacagcagcaacggctcgtaattacttatcatttactagacgaaaaggtggtgggatattttcttgctcaaataatacgaatatatcacccatccattttatgcgatgtttatatactctaatctttaatagatctatagacgacgggtttaccaacaatatagattttatcgattcatctaatttaaacccttccttaaacgtgaatgatctattatctggcataacgatgactctacctgatgaatcggacaatgtactgggccatgtagaataaattatcaacgaattatcgtctacgaacatttatatcatttgttttaattttaggacgcgaataaatggatataaaatagaaaataacagatattacaaccaatgttatggccgcgcccaaccaggtaggcagttttattttatcttttactacaggttctcctggatgtacgtcaccaacggcggacgtagttctagtacaattagacgtaagttctgcttgggaattttttaacgctaaagagttaacgttaatcgtgcacccaacgtatttacatctagttctttgaacatcttgattataatataaccattttctatctctagattcgtcggtgcactcatgtaaccaacataccctaggtcctaaatatttatctccggaattagattttggataattcgcgcaccaacaatttctatttcctttatgatcgttacaaaagacgtataatgccgtatccccaaaagtaaaataatcaggacgaataattctaataaactcagaacaatatctcgcatccatatgtttggagcaaatatcggaataagtagacatagccggtttccgttttgcacgtaaccattctaaacaattggggtttccaggatcgtttctacaaaatccagtcatgaaatcatcacaatgttctgtcttgtaattattattaaatatttttggacagtgtttggtatttgtcttagaacaacattttgccacgctatcactatcgcccaggagataatccttttttataaaatgacatcgttgcccggatgctatataatcagtggcgtgttttaaatccttaatatattcaggagttacctcgttctgataatagattaatgatccaggacgaaatttgaaagaactacatggttctccatgaattaatacatattgtttagcaaattcaggaactataaaactactacaatgatctatcgacataccatctatcaaacaaaacttgggtttaatttctcccggagatgtttcataatagtacgtataactttcttctgcaaacttaacagctctattatattcaggataattaaaacctaattccatatatttgtctcgtatatctgctattcctggtgctattttaattctattaagagtaacggctgcccccattcttaataatcgtcagtatttaaactgttaaatgttggtatatcaacatctaccttatttcccgcagtataaggtttgttgcaggtatactgttcaggaatggttacatttatacttcttctatagtcctgtctttcgatgttcatcacatatgcaaagaacagaataaacaaaataatgtaagaaataatattaaatatctgtgaattcgtaaatacattgattgccataataattacagcagctacaatacatacaatagacattcccacagtgttgccattacctccacgatacatttgagttactaagcaataggtaataactaagctagtaagaggcaatagaaaagatgagataaatatcatcaatatagagattagaggagggctatatagagccaagacgaacaaaatcaaaccgagtaacgttctaacatcattatttttgaagattcccaaataatcattcattcctccataatcgttttgcattatacctccatctttaggcataaacgattgctgctgttcctctgtaaataaatctttatcaagcactccagcacccgcagagaagtcgtcaagcatattgtaatatcttaaataactcatttatatattaaaaaatgtcactattaaagatggagtataatctttatgccgaactaaaaaaaatgacttgtggtcaacccctaagtctttttaacgaagacggggatttcgtagaagttgaaccgggatcatcctttaagtttctgatacctaagggattttacgcctctccttccgtaaagacgagtctagtattcgagacattaacaacgaccgataataaaatcactagtatcaatccaacaaatgcgccaaagttatatcctcttcaacgcaaagtcgtatctgaagtagtttctaatatgaggaaaatgatcgaatcaaaacgtcctctatacattactcttcacttggcgtgtggatttggtaagactattaccacgtgttatcttatggctacacacggtagaaaaaccgtcatttgcgtacccaataaaatgttaatacatcaatggaagacacaggtagaggcagtcggattggaacataagatatctatagatggagtaagtagtctattaaaggaactaaagactcaaagtccggatgtattaatagtagtcagtagacatctgacaaacgatgccttttgtaaatatatcaataagcattatgatttgttcatcttggatgaatcacatacgtataatctgatgaacaatacagcagttacaagatttttagcgtattatcctccgatgatgtgttattttttaactgctacacctagaccagctaaccgaatttattgtaacagtattattaatattgccaagttatccgatctaaaaaaaactatctatgcggtagatagtttttttgagccatattccacagacaatattagacatatggtaaaacgactagatggaccatctaataaatatcatatatatactgagaagttattatctgtagacgagcctagaaatcaacttattcttgataccctggtagaagaattcaagtcaggaactattaatcgaattttagttattactaaactacgtgaacatatggtattcttctacaaacgattattagattttttcggatcagaggttgtatttataggagacgcccaaaatagacgtactccagatatggtcaaatcaatcaaggaactaaatagatttatattcgtatccaccttattttattccggtactggtttagatattcctagtttggattcgttgttcatttgctcggcagtaatcaacaatatgcaaatagagcaattactagggagggtatgtcgagaaacagaactattagataggacggtatatgtatttcctaacacatccatcaaagaaataaagtacatgataggaaatttcatgcaacgaattattagtctgtctgtagataaactaggatttaaacaaaaaagttatcggaaacatcaagaatccgatcccacttctgtatgtacaacatcctccagagaagaacgtgtattaaatagaatatttaactcgcaaaatcgttaagaagtttaagcgacgatccgcatgctgcgcaggccagtgtattacccctcatagtattaatataatccaatgatacttttgtgatgtcggaaatcttaaccaatttagactgacaggcagaacacgtcatgcaatcatcatcgtcatcgataactgtagtcttgggcttctttttgcggctcttcattccggaacgcacattggtgctatccatttaggtagtaaaaaataagtcagaatatgccctatagcacgatcgtgcaaaacctggtatatcgtctctatctttatcacaatatagtgtatcgacatttttattattattgacctcgtttatcttggaacatggaatgggaacatttttgttatcaacggccatctttgccttaattccagatgttgtaaaattataactaaacagtctatcatcgacacaaatgaaattcttgtttagacgtttgtagtttacgtatgcggctcgttcgcgtctcattttttcagatattgcaggtactataatattaaaaataagaatgaaataacataggattaaaaataaagttatcatgacttctagcgctgatttaactaacttaaaagaattacttagtctgtacaaaagtttgaaattttcagattctgcggctatagaaaagtataattctttggtagaatggggaacatctacttactggaaaataggcgtgcaaaaggtagctaatgtcgagacgtcaatatctgattattatgatgaggtaaaaaataaaccgtttaatattgatccgggatattacattttcttaccggtatattttggaagcgtctttatttattcgaagggtaaaaatatggtagaacttggatctggaaactcttttcaaataccagatgatatgcgaagtgcgtgtaacaaagtattagacagcgataacggaatagactttctgagatttgttttgttaaacaatagatggataatggaagatgctatatcaaaatatcagtctccagttaatatatttaaactagctagtgagtacggattaaacatacccaaatatttagaaattgaaatagaggaagacacattatttgacgacgagttatactctattatagaacgctctttcgatgataaatttccaaaaatatccatatcgtatattaagttgggagaacttagacggcaagttgtagactttttcaaattctcgttcatgtatattgagtccatcaaggtagatcgtataggagataatatttttattcctagcgttataacaaaatcaggaaaaaagatattagtaaaagatgtagaccatttaatacgatccaaggttagagaacatacatttgtaaaagtaaaaaagaaaaacacattttccattttatacgactatgatggaaacggaacagaaactagaggagaagtaataaaacgaattatagacactataggacgagactattatgttaacggaaagtatttctctaaggttggtagtgcaggcttaaagcaattgactaataaattagatattaatgagtgcgcaactgtcgatgagttagttgatgagattaataaatccggaactgtaaaacgaaaaataaaaaaccaatcagcatttgatttaagcagagaatgtttgggatatccagaagcggattttataacgttagttaataacatgcggttcaaaatagaaaattgtaaggttgtaaatttcaatattgaaaatactaattgtttaaataacccgagtattgaaactatatatggaaactttaaccagttcgtctcaatctttaatatcgtcaccgatgtcaaaaaaagattattcgagtgaaataatatgcgcctttgatataggtgcaaaaaatcctgccagaactgttttagaagtcaaggataactccgttagggtattggatatatcaaaattagactggagttctgattgggaaaggcgcatagctaaagatttgtcacaatatgaatacactacagttcttctagaacgtcagcctagaaggtcgccgtacgtcaaatttatctattttattaaaggctttttatatcatacatcggctgccaaagttatttgcgtctcgcctgtcatgtctggtaattcatatagagatcgaaaaaagagatcggtcgaagcatttcttgattggatggacacattcggattgcgagactccgttccggatagacgcaaattagacgatgtagcggatagtttcaatttggctatgagatacgtattagataaatggaatactaattatacaccttataataggtgtaaatctagaaattacataaaaaaaatgtaataacgttagtaacgccattatggataatctatttacctttctacatgaaatagaagatagatatgccagaactatttttaactttcatctaataagttgcgatgaaataggagatatatatggtcttatgaaagaacgcatttcctcagaggatatgtttgataatatagtgtataataaagatatacatcatgccattaagaaactagtgtattgcgacatccaacttactaaacacattattaatcagaatacgtatccggtatttaacgattcttcacaagtgaaatgttgtcattatttcgacataaactcagataatagcaatattagctctcgtacagtagagatatttgagagggaaaagtcatctcttgtatcatatattaaaactaccaataagaagagaaaggtcaattacggcgaaataaagaaaactgttcatggaggcactaatgcaaattacttttccggtaaaaagtctgacgagtatctgagtactacagttagatccaacattaatcaaccttggatcaaaaccatctctaagaggatgagagttgatatcattaatcactctatagtaacgcgtggaaaaagctctatattacaaactatagaaattatttttactaatagaacatgtgtgaaaatattcaaggattctactatgcacattattctatccaaggacaaggatgaaaaggggtgtatacacatgattgacaaattattctatgtctattataatttatttctgttgttcgaggatatcatccaaaacgagtactttaaagaagtagctaatgttgtaaaccacgtacttacggctacggcattagatgagaaattattcctaattaagaaaatggctgaacacgatgtttatggagttagcaatttcaaaatagggatgtttaacctgacatttattaagtcgttggatcataccgttttcccctctctgttagatgaggatagcaaaataaagttttttaaggggaaaaagctcaatattgtagcattacgatctctggaggattgtataaattacgtgactaaatccgagaatatgatagaaatgatgaaggaaagatcgactattttaaatagcatagatatagaaacggaatcggtagatcgtctaaaagaattgcttctaaaatgaaaaaaaacactgattcagaaatggatcaacgactcggatataagtttttggtgcctgatcctaaagccggagttttttatagaccgttacatttccaatatgtatcgtattctaattttatattgcatcgattgcatgaaatcttgaccgtcaagcggccactcttatcgtttaagaataatacagaacgaattatgatagaaattagcaatgttaaagtgactcctccagattactcacctataatcgcgagtattaaaggtaagagttatgacgcattagccacgttcactgtaaatatctttaaagaggtaatgaccaaagagggtatatccatcactaaaataagtagttatgagggaaaagattctcatttgataaaaattccgctactaataggatacgggaataaaaatccacttgatacagccaagtatcttgttcctaatgtcataggtggagtctttatcaataaacaatctgtcgaaaaagtaggaattaatctagtagaaaagattacaacatggccaaaatttagggttgttaagccaaactcattcactttctcgttttcctccgtatcccctcctaatgtattaccgacaagatatcgccattacaagatatctctggatatatcacaattggaagcgtcgaatatatcatcgacaaagacatttataacggtcaatattgttttgctgtctcaatatttatctagagtgagtctagaattcattagacgtagcttatcatacgatatgcctccagaagttgtctatctagtaaacgcgataatagatagtgctaaacgaattactgaatctattactgactttaatattgatacatacattaatgacctggtggaagctgaacacattaaacaaaaatctcagttaacgatcaacgagttcaaatatgaaatgctgcataactttttacctcatatgaactatacacccgatcaactaaagggattttatatgatatctttactaagaaagtttctctactgtatctaccacacttctagatatccagatagagattcgatggtttgtcatcgtatactaacatacggcaaatattttgagacgttggcacatgatgaattagagaattacataggcaacatccgaaacgatatcatgaacaatcacaagaacagaggcacttacgcggtaaacattcatgtactaacaactcctggacttaatcatgcattttctagtctattgagtggaaagttcaaaaagtcagacggtagttatcgaacacatcctcactattcatggatgcagaatatttctattcctaggagtgttggattttatccggatcaagtaaagatttcaaagatgttttctgtcagaaaataccatccaagtcaatatctttacttttgttcatcagacgttccggaaagaggtcctcaggtaggtttagtatctcaattgtctgtcttgagttccattacaaatatactaacgtctgagtatttggatttggaaaagaaaatttgtgagtatatcagatcatattataaagatgatataagttactttgaaacaggatttccaatcactatagaaaatgctctagtcgcatctcttaatccaaatatgatatgtgattttgtaactgactttagacgtagaaaacggatgggattcttcggtaacttggaggtaggtattactttagttagggatcacatgaatgaaattcgcattaatattggagcgggaagattagtcagaccattcttggttgtggataacggagagctcatgatggatgtgtgtccggagttagaaagcagattagacgacatgacattctctgacattcagaaagagtttccgcatgtcatcgaaatggtagatatagaacaatttacttttagtaacgtatgtgaatcggttcaaaaatttagaatgatgtcaaaggatgaaagaaagcaatacgatttatgtgactttcctgccgaatttagagatggatatgtggcatcttcattagtgggaatcaatcacaattctggacccagagctattcttggatgtgctcaagctaaacaagctatctcttgtctgagctcggatatacgaaataaaatagacaatggaattcatttgatgtatccagagaggccaatcgtgattagtaaggctttagaaacttcaaagattgcggctaattgcttcggccaacatgttactatagcattaatgtcgtacaaaggtatcaatcaagaggatggaattatcatcaaaaaacaatttattcagagaggcggtctcgatattgttacagccaagaaacatcaagtagaaattccattggaaaactttaataacaaagaaagagataggtctaacgcctattcaaaattagaaagtaatggattagttagactgaatgctttcttggaatccggagacgctatggcacgaaatatctcatcaagaactcttgaagatgattttgctagagataatcagattagcttcgatgtttccgagaaatataccgatatgtacaaatctcgcgttgaacgagtacaagtagaacttactgacaaagttaaggtacgagtattaaccatgaaagaaagaagacccattctaggagacaaatttaccactagaacgagtcaaaagggaacagtcgcgtatgtcgcggatgaaacggaacttccatacgacgaaaatggtatcacaccagatgtcattattaattctacatccatcttctctagaaaaactatatctatgttgatagaggttattttaacagccgcatattctgctaagccgtacaacaataagggagaaaaccgacctgtctgttttcctagtagtaacgaaacatccatcgatacatatatgcaattcgctaaacaatgttatgagcattcaaatccgaaattgtctgatgaagaattatcggataaaatcttttgtgaaaagattctctatgatcctgaaacggataagccttatgcatccaaagtattttttggaccaatttattacttgcgtctgagacatttaactcaggacaaggcaaccgttagatgtagaggtaaaaagacgaagctcattagacaggcgaatgagggacgaaaacgtggaggaggtatcaagttcggagaaatggagagagactgtttaatagcgcatggtgcagccaatactattacagaagttttgaaagattcggaagaagattatcaagatgtgtatgtttgtgaaaattgtggagacatagcagcacaaatcaagggtattaatacatgtcttagatgttcaaaacttaatctctctcctctcttaacaaaaattgataccacacacgtatctaaagtatttcttactcaaatgaacgccagaggcgtaaaagtcaaattagatttcgaacgaagacctccttcgttttataaaccattagataaagttgatctcaaaccgtcttttctggtctaatattgtttagtagatacttatcaacatcatcaagattatcaagattatcaagattatcaagataagctaattcactaaacacattatcgatttcggtatcgttactcgcagaataaagttcgttatgatcctgatattcggaaatctgtggagtttcaggttttggtggatgtgtaacagctacttgagataccgaagtctgatattcagaaagctgtggatgttctggttcggcatccaccgatggtgttacaccactactaattggttcagtaacgtctgtggacgatggaggcaccacttctacaggttctggttctttatcctcagtcatcaacggagctacttcaatgcgaggaaatgtataatttggtaatggtttctcatgtggatctgaagaagaggtaagatatctactagaaagataccgatcacgttctagttctcttttgtagaacttaactttttctttctcagcatctagttgatattccaacctcttcacgttactacgttcagatttcaattcacgttcgcatgggttacctccgcagtttttacgagcgatttcacgttcagccttcatgcgtctctccctctctctatcgagtttatcagagcagtctttctgaaggcgatcgaactccataaatttctccaacgctttgattgtttccatagatttccgaagttcagcttttaggactgtgattctttttctttcgaattcacagctggatgtacaaccgtttccattaccgccatctctaagtttcttttctagatcggcaacatttcatccccatgccttttacattcctcgagtctactgtcgtcgaaatatcgttccagctccttttcgacatcaataactttagcacgttgtctctcaagctctcttttgtagttatctgattccctggcacgtttaagatcttcatgcaattgagtcagctcttaacacaatctcttgcttcttcgtcatagtacgcgcaatcactgtgagatccattgttaccacgtctacactcggcgagctcgcgtttaagagattcaatttcccgtttgtattggtccatgtttccattgctaccaccattagatttacaggctgctagttgtcgttcgagatcagaaatacgggttttcttggaattgatttcgtcgatgtacttggcatcgaaacacttattaagttctttttccaattctacgattttatttctttcgcgagtcaattccctcctgtagtaactatctgttttgtcagattcacgctctctacgtagactttcttgcaagttactaatttgttccctagcacgtccgagtttagttttatatgctgaatagagttctgattcatcctttgagcagatctctagcgatcgtttaagattcctgattctagtctttagcctatttacctcctcagaagatgttccgttaccgttgcgtttacactcgttaagctgtctatcaagatccatgattctatctctaagacgttgcatctctctttccatatcagcattgctttcattattacgtctgcagtcactcaactgtctttcaatatctgagattctatctctaagacgtcgcatctctctctgtttcggcattggtttcattattacgtctacagtcgttcaactgtctttcaagatctgatattctagattggagtctgctaatctctgtagcattttcacggcattcactcagttgtctttcaagatctgaaattttagattggagtctgctaatctctgtaagatttcctcctccgctctcgatgcagtcggtcaacttattctctagttctctaatacgcgaacgcagtgcatcaacttcttgcgtgtcttcctggttgcgtgtacattcatcgagtctagattcgagatctctaacgcgtcgtcgttcttcctcaagttctctgcgtactacagaaagcgtgtccctatcttgttgatatttagcaatttctgattctagagtactgattttgcttacgtagttactaatatttgtcttggccttatcaagatcctccttgtatttgtcgcattccttgatatccctacgaagtctggacagttcccattcgacattacgacgtttatcgatttcagctcggagatcgtcatcgcgttgttttagccacatacgactgagttcaagttctcgttgacaagatccatctacttttccattcctaatagtatccagttccttttctagttctgaacgcatttctcgttccctatcaagcgattctctcaattctcggatagtcttcttatcaatttctaataaatctgaaccatcatctgtcccattttgaatatccctgtgttctttgatctcttttgtaagtcggtcgattctttcggttttataaacagaatccctttccaaagtcctaatcttactgagtttatcactaagttctgcattcaattcggtgagttttctcttggcttcttccaactctgttttaaactctccactatttccgcattcttcctcgcatttatctaaccattcaattagtttattaataactagttggtaatcagcgattcctatagccgttcttgtaattgtgggaacataattaggatcttctaatggattgtatggcttgatagcatcatctttatcattattagggggatggacaaccttaattggttggtcctcatctcctccagtagcgtgtggttcttcaatagccgtgttagtaataggcttaggcaaatgcttgtcgtacgcgggcacttcctcatccatcaagtatttataatcgggttctacgtctgaatattcttttctaagagacgcaacttctggagttagtagaagaactctgtttctatatctatcaacgctggaatcaatactcaagttaaggatagcgaatacctcatcgtcatcatccgtatcctctgaaacgccatcatatgacatttcatgaagtctaacgtattgataaacagaatcagatttagtattaaacagatccttaacctttttagtaaatgcatatgtatattttagatctccagatttcataatatggtcgcatgccttaaatgtcagtgcttccataatatagtctggaacactaattggtgatgaaaaagataccggaccatatgctacgttgataaataactctgagccactaactagataatgattaatgttaaggaagaggaaatattcagtgtataggtatgtcttggcgtcatatcttgtactaaacacgctaaacagtttgttaatgtgatcaatttccaatagattaattagagcagcaggaataccaacaaacatattaccacatccgtattttctatgaatatcacatatcatgttaaaaaatcttgatagaagagcgaatatctcgtctgacttaatgagtcgtagttcagcagcaacataagtcataactgtaaatagaacatactttcctgtagtgttgattctagactccacatcaacaccattattaaaaatagttttatatacatctttaatctgctctccgttaatcgtcgaacgttctagtatacggaaacactttgatttcttatctgtagttaatgacttagtgatatcacgaagaatattacgaattacatttcttgtttttcttgagagacctgattcagaactcaactcatcgttccatagtttttttacctcagtggcgaaatctttggagtgcttggtacatttttcaataaggttcgtgacctccatttattataaaaaaattttattcaaaacttaactacaatcgggtaattataaaatcgtagatctcccatgtggtggaatactaccatctatcgcatgtggatggacagtaggtaatggccatgggaacagtaatgtttgcatatttatctttcttgccagtattactgcatattgtcccaatgtttcgatgtgatgttctaacctatcaactgccgctgtatcacaacaatagtgtccgatgaaattaagattatgatccaatgtgtttaatatatgattatcaagtcttatacgatccgcgtcttttttgacaggatcaggttcttctacaggaagaagtttcggcctcttatgatattcatgtctgggaaacggtggtctagggtgaggctccggtatcggagtgggttttggattataatcatcatcgtctatgacatcatcttcgacttcgatatttattttgctatcttgatgatgtcctgtatcagttgcattttcagcactcgactgaatattagcgcattcattgtttattattaccatatttctaaacccaaaatgtatatgttgaacatcagtactatcgttgatgagtcttatagcatgaattcgcttatcgttatcgggtttagcttctgtcaccttagcaattccttttttattaaactctacataatcatatccatttctattgtttgttctaatataaacgagtatagcatcattgctaaatttttcaatagtatcgaaaacagaatatcctaaaccatataatatatattcaggaacactcaaactaaatgtccaggattctcctaaatacgtaaactttaatagtgcgaaatcattcaaaaatctaccacttatagatagatagtacataaatgcgtatagtagtctacctatctctttattatgaaaaccggcattacgatcatatatgtcgtgatatacctgtgatccgtttacgttaaaccataaatacatgggtgatcctataaacatgaatttatttctaattctcagagctatagttaattgaccgtgtaatatttgcttacatgcatacttgatacgctcattaataagatttttatcattgctcgttatctcagaatcgtatatataaggagtaccatcgtgattcttaccagatattatacaaaatactatatataaaatatattgaccaacgttagtaatcatataaatgtttaacgttttaaattttgtattcaatgatccattatcatacgctagcatggtcttatgatattcattctttaaaatataatattgtgttagccattgcattggggctcctaatggagattttttattctcatccattttaggataggctttcataaagtccctaataacttcgtgaataatgtttctatgttttctactgatgcatgtatttgcttcgatttttttatcccatgtttcatctatcatagatttaaacgcagtaatgctcgcaacattaacatcttgaaccgttggtacaattccgttccataaatttataatgttcgccatttatataactcattttttgaatatacttttaattaacaaaagagttaagttactcatatggacgccgtccagtctgaacatcaatctttttagccagagatatcatagccgctcttagagtttcagcgtgattttccaacctaaatagaacttcatcgttgcgtttacaacacttttctatttgttcaaactttgttgttacattagtaatctttttttccaaattagttagccgttgtttgagagtttcctcattgtcgtcttcatcggctttaacaattgcttcgcgtttagcctctggctttttagcagcctttgtagaaaaaaattcagttgctggaattgcaagatcgtcatctccggggaaaagagttccgtccatttaaagtacagattttagaaactgacactctgcgttatttatatttggtacaacacatggattataaatattgatgttaataacatcagaaaatgtaaagtctatacattgttgcatcgtgttaaattttctaatggatctagtattattgggtccaacttctgcctgaaatccaaatatggaagcggatacaaaaccgtttcctggataaaccacacatctccacttttgctttacatcagaaattgtgtcattgacatcttgaactctcctatctaatgccggtgttccacctatagattttgaatattcgaatgctgcatgagtagcattaaattccttaatattgccataattttcatatattgagtaaccctggataaaaagtaaacacaccgcagccgtcgctaccacaataaaaaaaattgatagagagttcatttataatctattagaagctgacaaaatttttttacacgcatcagacaatgctttaataaatagttcaacatctacttttgtcatatcgaaccgatggtatgattctaacctagaattacatccgaaaaagttgactatgttcatagtcattaagtcattaacaaacaacattccagactctggattataagacgatactgtttcgtcacaattacctaccttaatcatgtgattatgaatattggctattagagcaccttctaagaaatctataatatctttgaaacacgatttaaaatcaaaccacgaatatacttctacgaagaaagttagtttacccataggagaaataactataaatggagatctaaatacaaaatccggatctatgatagttttaacattattatattctctattaaatacctccacatctaaaaatgttaattttgaaactatgtcttcgtttattaccgtacctgaactaaacgctataagctctattgtttgagaactctttaaacgatattcttgaaatacatgtaacaaagtttcctttaactcggtcggtttatctaccatagttacagaatttgtatccttatctataatataataatcaaaatcgtataaagttatataattatcgcgttcagattgtgatcttttcaaatagactaaaaaccccatttctctagtaagtatcttatgtatatgtttgtaaaatatcttcatggtgggaatatgctctaccgcagttagccattcctcattgacagcggtagatgtattagacaaaactattccaatgtttaacaagggccattttacgagattattaaatccttgtttgataaatgtagccaatgagggttcgagttcaacgacgattgaattctcttcccgcggatgctgcatgatgaacgacgggatgttgttcgattgatttggaattctttttcgactttttgtttatattaaatattttaaaatttatagctgatagcaattcatgtactacggataatgtagacgcgtattgcgcatcgatatctttattattagataaatttatcaataaatgtgagaagtttgcctcgttaaggtcttccatttaaatattatataaacatttgtgtttgtatcttattcgtcttttatggaatagttttttactagtaaagctgcaattacacactttgtccgtaaaacataaatataaacaccagcttttatcaatcgttccaaaaagtcgacggcggacatttttaacatggcatctattttaaatacacttaggtttttggaaaaaacatcattttataattgtaacgattcaataactaaagaaaagattaagattaaacataagggaatgtcatttgtattttataagccaaagcattctaccgttgttaaatacttgtctggaggaggtatatatcatgatgatttggttgtattggggaaggtaacaattaatgatctaaagatgatgctattttacatggatttatcatatcatggagtgacaagtagtggagcaatttacaaattgggatcgtctatcgatagactttctctaaataggactattgttacaaaagttaataattatgatgatacattttttgacgacgatgattgatcgctattgcacaattttgtttttttactttctaatatagcgtttagattctttttcatgtgcgaatattgatttactaaaatatcgatgtttaacttttgttctatgacgtccttatcagcggtatcggtacatatacgtaattcaccttcacaaaatacggagtcttcgataataatagccaatcgattattggatctagcggtctgtatcatattcaacatgtttaatatatcctttcgtttcccctttacaggcatcgatcgtagcatattttccgcgtctgagatggaaatgttaaaactacaaaaatgcgtaatgttagcccgtcctaatattggtacgtgtctataagtttggcatagtagaataatagacgtgtttaaatgccttccaaagtttaagaattctattagagtattgcattttgatagtttatcgcctacatcatcaaaaataagtaaaaagtgtgctgattttttatgattttgtgcgacagcaatacatttttctatgttacttttagttcgtatcagattatattctagagattcctgactactaacgaaattaatatgatttggccaaatgtatccatcataatctggattataaacgggtgtaaacaagaatatatgtttatattttttaactagtgtagaaaacagagatagtaaatagatagtttttccagatccagatcctcccgttaaaaccattctaaacggcatttttaataaattttctcttgaaaattgtttttcttggaaacaattcataattatatttacagttactaaattaatttgataataaatcaaaatatggaaaactaaggtcgttagtagggaggagaacaaagaaggcatatcgtgatataaataacatttattatcatgatgacaccagaaaacgacgaagagcagacatctgtgttctccgctactgtttacggagacaaaattcagggaaagaataaacgcaaacgcgtgattggtctatgtattagaatatctatggttatttcactactatctatgattaccatgtccgcgtttctcatagtgcgcctaaatcaatgcatgtctgctaacgaggctgctattactgacgccgctgttgccgttgctgctgcatcatctactcatagaaaggttgcgtctagcactacgcaatatgatcacaaagaaagctgtaatggtttatattaccagggttcttgttatatattacattcagactaccagttattctcggatgctaaagcaaattgcactgcggaatcatcaacactacccaataaatccgatgtcttgattacctggctcattgattatgttgaggatacatggggatctgatggtaatccaattacaaaaactacatccgattatcaagattctgatatatcacaagaagttagaaagtatttttgtgttaaaacaatgaactaatatttatttttgtacattaataaatgaaatcgcttaatagacaaactgtaagtaggtttaagaagttgtcggtgccggccgctataatgatgatactctcaaccattattagtggcataggaacatttctgcattacaaagaagaactgatgcctagtgcttgcgccaatggatggatacaatacgataaacattgttatctagataccaacattaaaatgtctacagataatgcggtttatcagtgtcgtaaattacgagctagattgcctagacctgatactagacatctgagagtattgtttagtattttttataaagattattgggtaagtttaaaaaagaccaataataaatggttagatattaataatgataaagatatagatattagtaaattaacaaattttaaacaactaaacagtacgacggatgctgaagcgtgttatatatacaagtctggaaaactggttgaaacagtatgtaaaagtactcaatctgtactatgtgttaaaaaattctacaagtgacaacaaaaaatgaattaataataagtcgttaacgtacgccgccatggacgccgcgtttgttattactccaatgggtgttgactataacagatacattgtatgatgatctcgatatctcaatcatggactttataggaccatacattataggtaacataaaaactgtccaaatagatgtacgggatataaaatattccgacatgcaaaaatgctactttagctataagggtaaaatagttcctcaggattctaatgatttggctagattcaacatttatagcatttgtgccgcatacagatcaaaaaataccatcatcatagcatgcgactatgatatcatgttagatatagaagataaacatcagccattttatctattcccatctattgatgtttttaacgctacaatcatagaagcgtataacctgtatacagctggagattatcatctaatcatcaatccttcagataatctgaaaatgaaattgtcgtttaattcttcattctgcatatcagacggcaatggatggatcataattgatgggaaatgcaatagtaattttttatcataaaagttgtaaagtaaataataaaacaataaatattgaactagtagtacgtatattgagcaatcagaaatgatgctggtacctcttatcacggtgaccgtagttgcgggaacaatattagtatgttatatattatatatttgtaggaaaaagatacgtactgtctataatgacaataaaattatcatgacaaaattaaaaaagataaagagttctaattccagcaaatctagtaaatcaactgatagcgaatcagactgggaggatcactgtagtgctatggaacaaaacaatgacgtagataatatttctaggaatgagatattggacgatgatagcttcgctggtagtttaatatgggataacgaatccaatgttatggcgcctagcacagaacacatttacgatagtgttgctggaagcacgctgctaataaataatgatcgtaatgaacagactatttatcagaacactacagtagtaattaatgaaacggagactgttaaagtacttaatgaagataccaaacagaatcctaactattcatccaatcctttcgtaaattataataaaaccagtatttgtagcaagtcaaatccgtttattacagaacttaacaataaatttagtgagaataatccgtttagacgagcacatagcgatgattatcttaataagcaagaacaagatcatgaacacgatgatatagaatcatcggtcgtatcattggtgtgattagtttcctttttataaaattgaagtaatatttagtattattgctgccgtcacgttgtacaaatggagatattccctgtattcggcatttctaaaattagcaattttattgctaataatgactgtagatattatatagatacagaacatcaaaaaattatatctgatgagatcaatagacagatggatgaaacggtacttcttaccaacatcttaagcgtagaagttgtaaatgacaatgagatgtaccatcttattcctcatagattatcgacgattatactctgtattagttctgtcggaggatgtgttatctctatagataatgacgtcaatggcaaaaatattctaacctttcccattgatcatgctgtaatcatatccccactgagtaaatgtgtcgtagttagcaagggccctacaaccatactggttgctaaagcggatatacccagcaaacgattggtaacatcgtttacaaacgacatactgtatgtaaacaatctatcactgattaattatttgccgttgtctgtattcattattagacgagtcaccgactatttggatagacacatatgcgatcagatatttgctaataataagtggtattcccttataaccatcgacgataagcaatatcctattccatcaaattgtataggtatgtcttctgccaagtacataaattctagcatcgagcaagatactttaatacatgtttgtaacctcgagcatccattcgacttagtatacaaaaaaatgcagtcgtacaattctgtacctatcaaggaacaaatattgtacggtagaattgataatataaatatgagcattagtatttctgtggattaatagatttctagtatggggatcattaatcatctctaatctctaaatacctcataaaacgaaaaaaaagctattatcaaatactgtacggaatagattcattctcttctctttttatgaaactctgttgtatatctactgataaaactggaagcaaaaaatctgataaaaagaataagatcaagatcaaggattatatggaacacgattattataaaataacaatagttcctggttcctcttccacgtctactagctcgtggtattatacacatgcctagtaatagtctctttgcgttgatggaaagcagactagaaataacaggctaaaatgttcagacaccataatagttcccaacccagataataacagagtaccatcaacacattcctttaaactcaatcccaaacccaaaaccgttaaaatgtatccggccaattgatagtagataatgaggtgtacagcgcatgataatttacacagtaaccaaaatgaaaatactttagtaattataagaaatatagatggtaacgtcatcatcaacaatccaataatatgccggagagtaaacattgacggataaaacaaaaatgctccgcataactctatcatggcaataacacaaccaaatacttgtaagattcctaaattagtagaaaatacaacggatatcgatgtataagtgatctcgagaaataataagaataaagtaatgcccgtaaagataaacatcaacattgtttggtaatcattaaaccaattagtatgacgttgaactaatttcacagtaaattttattccagtattatccccgcatgtataagtacctggtaagatatctttatattccataatcaatgagacatcactatctgataacgaatgaagtctagcactagtatgccatttacttaatattgtcgtcttggaagttttattataagttaaaatatcatggttatccaatttccatctaatatactttgtcggattatctatagtacacggaataatgatggtatcattacatgctgtatactctatggtctttgtagttgttataacaaccaacgtatagaggtatatcaacgatattctaactcttgacattttttatttatttaaaatgatacctttgttatttattttattctattttgctaacggtattgaatggcataagtttgaaacgagtgaagaaataatttctacttacttattagacgacgtattatacacgggtgttaatggggcggtatacacattttcaaataataaactaaacaaaactggtttaactaataataattatataacaacatctataaaagtagaggatgcggataaggatacattagtatgcggaaccaataacggaaatcccaaatgttggaaaatagacggttcagacgacccaaaacatagaggtagaggatacgctccttatcaaaatagcaaagtaacgataatcagtcacaacggatgtgtactatctgacataaacatatcaaaagaaggaattaaacgatggagaagatttgacggaccatgtggttatgatttattcacggcggataacgtaattccaaaagatggtttacgaggagcattcgtcgataaagacggtacttatgacaaagtttacattcttttcactgatactatcggctcaaagagaattgttaaaattccgtatatagcacaaatgtgcctaaacgacgaaggtggtccatcatcgttgtctagtcatagatggtcgacgtttctcaaagtcgaattagaatgtgatatcgacggaagaagttatagataaattattcattctaaaactataaaaacagataatgatacgatactatatgtattcttcgatagtccgcattatgtacctattctatgaataccattaaacaatctttttctacgtcaaaattggaaggatatacaaagcaattgccgtctccagctcctggtatatgtctaccagctggaaaagttgttccacataccacgtttgaagtcatagaaaaatataatgtactagatgatattataaagcctttatctaaccaacctatcttcgaaggaccgtctggtgttaaatggttcgatataaaggagaaggaaaatgaacatcgggaatatagaatatacttcataaaagaaaattctatatattcgttcgatacaaaatctaaacaaactcgtagctcgcaagtcgatgcgcgactattttcagtaatggtaacttcgaaaccgttatttatagcagatatagggataggagtaggaatgccacaaatgaaaaaaatacttaaaatgtaatcttaatcgagtacaccacacgacaatgaacaaacataagacagattatgctggttatgcttgctgcgtaatatgcggtctaattgttggaattatttttacagcgacactattaaaagttgtagaacgtaaattagttcatacaccatcaatagataaaacgataaaagatgcatatattagagaagattgtcctactgactggataagctataataataaatgtatccatttatctactgatcgaaaaaacctgggaggaaggacgtaatgcatgcaaagctctaaatccaaattcggatctaattaagatagagactccaaacgagttaagttttttaagaagccttagacgaggctattgggtaggagaatccgaaatattaaaccagacaaccccatataattttatagctaaaaatgccacgaagaatggaactaaaaaacggaaatatatttgtagtacaacgaatactcccaaactgcattcgtgttacactatataacaattacactacatttttatcataacactacttcggttagatgttttagaaaaaaataaatatcgccgtaccgttcttgtttttataaaaataacaattaacaattatcaaattttttctttaatattttacgtggttgaccattcttggtggtaaaataatctcttagtgttggaatggaatgctgtttaatgtttccgcactcatcgtatattttgacgtatgcagtcacatcgtttacgcaatagtcagactgtagttctatcatgcttcctacatcagaaggaggaacagttttaaagtctcttggttttaatctattgccattagttttcatgaaatcctttgttttatccacttcacattttaaataaatgtccactatacattcttctgttaattttactagatcgtcatgggtcatagaatttataggttccgtagtccatggatccaaactagcaaacttcgcgtatacggtatcgcgattagtgtatacaccaactgtatgaaaattaagaaaacagtttaataaatcaacagaaatatttaatcctccgtttgatacagatgcgccatatttatggatttcggattcacacgttgtttgtctgaggtgttcgtctagtgttgcttctacgtaaacttcgattcccatatattctttattgtcagaatcgcataccgatttatcatcatacactgtttgaaaactaaatggtatacacatcaaaataataaataataacgagtacattctgcaatattgttatcgtaattggaaaattagtgttcgagtgagtcggattatgtgagtactggattgtatattttattttatattttgtaataagaataaaatgctaatgtcaagtttattccaatagatgtcttattaaaaaacatatataataaataacaatggctgaatggcataaaattatcgaggatatctcaaaaaataataagttcgaggatgccgccatcgttgattacaagactacaaagaatgttctagctgctattcctaacagaacatttgccaagattaatccgggtgaaattattcctctcatcactaatcgtaatattctaaaacctcttattggtcagaaatattgtattgtatatactaactctctaatggatgagaacacgtatgctatggagttgcttactgggtacgcccctgtatctccgatcgttatagcgagaactcataccgcacttatatttttgatgggtaagccaacaacatccagacgtgatgtgtatagaacgtgtagagatcacgctacccgtgtacgcgcaactggtaattaaaataaaaagtaatattcatatgtagtgtcaattttaaatgatgatgatgaaatggataatatccatattgacgatgtcaataatgccggtattggcatacagctcatcgatttttagatttcattcagaggatgtggaattatgttatgggcatttgtattttgataggatctataatgtagtaaatataaaatataatccgcatattccatatagatataattttattaatcgcacgttaaccgtagatgaactagacgataatgtcttttttacacatggttattttttaaaacacaaatatggttcacttaatcctagtttgattgtctcattatcaggaaacttaaaatataatgatatacaatgctcagtaaatgtatcgtgtctcattaaaaatttggcaacgagtacatctactatattaacatctaaacataagacttattctctacatcggtccacgtgtattactataataggatacgattctattatatggtataaagatataaatgacaagtataatgacatctatgattttactgcaatatgtatgctaatagcgtctacattgatagtgaccatatacgtgtttaaaaaaataaaaatgaactcttaattatgctatgctattagaaatggataaaatcaaaattacggttgattcaaaaattggtaatgttgttaccatatcgtataacttggaaaagataactattgatgttacacctaaaaagaaaaaagaaaaggatgtattattagcgcaatcagttgctgtcgaagaggcaaaagatgtcaaggtagaagaaaaaaatattatcgatattgaagatgacgatgatatggatgtagaaagcgcataatacgatctataaaaataagtatataataaatactttttatttacggtactcttgtagtggtgataccctactcaattatttttttaaaaaaatacttattctgattcttctagccatttccgtgttcgttcgaatgccacatcgacgttaaagataggggagtagttgaaatctagttctgcattgttggtacgcacctcaaatgtagtgttggatatcttcaacgtatagttgttgagtagtgatggttttctaaatagaattctcttcatatcattcttgcacgcgtacatttttagcatccatcttggaattctagatccttgttctattcccaatggtttcatcaatagaagattaaacatatcgtacgaacacgatggagagtaatcgtagcaaaagtaagcatttcctttaatcttagatcccggatactggatatattttgcagccaacacgtgcatccatgcagcatttcctacatatacccggctatgcaccgcgtcatcatcgactgtacgatacataatgttaccgtgttgcttacattgctcgtaaaagactttcgtcaatttgtctccttctccgtaaattccagtgggtcttaggcaacaagtatacaattttgctccattcatgattacggaattattggctttcataaccagttgctcggccatacgtttactttttgcgtatacatgtcctggtgatatatcataaagggtatgctcatggccgatgaatggatcaccgtgtttattgggtcctattgcttccatgctactagtatagatcaaatacttgattcctaggtccacacaagctgccaatatagtctgtgttccataatagtttactttcatgatttcattatcggtgtattttccaaatacatccactagagcagccgtatgaataatcagatttaccccatctagcgcttctctcaccttatcaaagtcgtttatatcacattgtatatagtttataaccttaactttcgaggttattggttgtggatcttctacaatatctatgactctgatttcttgaacatcatctgcactaattaacagttttactatatacctgcctagaaatccggcaccaccagtaaccgcgtacacggccattgctgccactcataatatcagactacttattctattttactaaataatggctgtttgtataatagaccacgataatatcagaggagttatttactttgaaccagtccatggaaaagataaagttttaggatcagttattggattaaaatccggaacgtatagtttgataattcatcgttacggagatattagtcaaggatgtgattccataggcagtccagaaatatttatcggtaacatctttgtaaacagatatggtgtagcatatgtttatttagatacagatgtaaatatatttacaattattggaaaggcgttatctatttcaaaaaatgatcagagattagcgtgtggagttattggtatttcttacataaatgaaaagataatacattttcttacaattaacgagaatggcgtttgatatatcagttaatgcgtctaaaacaataaatgcattagtttacttttctactcagcaaaataaattagtcatacgtaatgaagttaatgatacacactacactgtcgaatttgatagggacaaagtagttgacacgtttatttcatataatagacataatgacaccatagagataagaggggtgcttccagaggaaactaatattggttgcgcggttaatacgccggttagtatgacttacttgtataataagtatagttttaaactgattttagcagaatatataagacacagaaatactatatccggcaatatttattcggcattgatgacactagatgatttggctattaaacagtatggagacattgatctattatttaatgagaaacttaaagtagactccgattcgggactatttgactttgtcaactttgtaaaggatatgatatgttgtgattctagaatagtagtagctctatctagtctagtatctaaacattgggaattgacaaataaaaagtataggtgtatggcattagccgaacatatatctgatagtattccaatatctgagctatctagactacgatacaatctatgtaagtatctacgcggacacactgagagcatagaggatgaatttgattattttgaagacgatgattcgtctacatgttctgccgtaaccgacagggaaacggatgtataattttttttatagcgtgaaggatatgataaaaaatataattgttgtatttatcccattccaatcaccttatatgattctgtaaaaaaattatactgtaacacaataaaggagtcttatagatgtatagaggtcagatactggtttgataaactgtttattccacataagtatgtttgactttatggttagacccgcatactttaacaaatcactgaaaattggagttaggtattgacctctcagaatcagttgccgttctggaacattaaatgtattttttatgatatactccaacgcatttatgtgggcatacaacaagtcattactaatggagtattccaagagttttagttgtctagtatttaacaagagaagagatttcaacagactgtttatgaactcgaacgccgcctcattgtcgcttatattgatgatgtcgaattctcccaatatcatcactgatgagtagctcatcttgttatcgggatccaagttttctaaagatgtcattaaaccctcgatcatgaatggatttatcatcatcgtttttatgttggacatgagcttagtccgtttgtccacatctatagacgacgatttctgaattatttcatatatccctctctttaactccaggaacttgtcaggatggtctactttaatatgttctcgtctaagagatgaaaatctttggatggttgcacgcgacttttctttaaaggatgacgttgcccaagatcctctcttaaatgaatccatcttatccttggacaagatggacagtctattttccttagatggtttaatatttttgttacccatgatctataaaggtagacctaatcgtctcggatgaccatatatttattttcagttttattatacgcataaattgtaaaaaatatgttaggtttacaaaaatgtctcgtggggcattaatcgtttttgaaggattggacaaatctggaaaaacaacacaatgtatgaacatcatggaatctataccggcaaacacgataaaatatcttaactttcctcagagatccactgtcactggaaagatgatagatgactatctaactcgtaaaaaaacctataatgatcatatagttaatctattattttgtgcaaatagatgggagtttgcatcttttatacaagaacaactagaacagggaattactttaatagttgatagatacgcattttctggagtagcgtatgccgccgctaaaggcgcgtcaatgactctcagtaagagttatgaatctggattgcctaaacccgacttagttatattcttggaatctggtagcaaagaaattaatagaaacgtcggcgaggaaatttatgaagatgttacattccaacaaaaggtattacaagaatataaaaaaatgattgaagaaggagatattcattggcaaattatttcttctgaattcgaggaagatgtaaagaaggagttgattaagaatatagttatagaggctatacacacggttactggaccagtggggcaactgtggatgtaatagtgaaattacattttttataaatagatgttagtacagtgttataaatggatgaagcatattactctggcaacttggaatcagtactcggatacgtgtccgatatgcataccgaactcgcatcaatatctcaattagttattgccaagatagaaactatagataatgatatattaaacaaggacattgtaaattttatcatgtgtagatcaaacttggataatccatttatctctttcctagatactgtatatactattatagatcaagagatctatcagaccgaattgattaattcattagacgacaatgaaattatcgattgtatagttaacaagtttatgagcttttataaggataacctagaaaatatagtagatgctatcattactctaaaatatataatgaataatccagattttaaaactacgtatgccgaagtactcggttccagaatagccgatatagatattaaacaagtgatacgtaagaatatactacaattgtctaatgatatccgcgaacgatatttgtgaaaaatattaaaaaaaaatactttttttattaaatgacgtcgcttcgcgaatttagaaaattatgctgtgatatatatcacgcatcaggatataaagaaaaatctaaattaattagagactttataacagatagggatgataaatatttgatcattaagctattgcttcccggattagacgatagaatttataacatgaacgataaacaaattataaaattatatagtataatatttaaacaatctcaggaagatatgctacaagatttaggatacggatatataggagacactattaggactttcttcaaagagaacacagaaatccgtccacgagataaaagcattttaactttagaagaagtggatagttttttaactacgttatcatccgtaactaaagaatcgcatcaaataaaattattgactgatgtagcatctgtttgtacatgtaatgatttaaaatgtgtagtcatgcttattgataaagatctaaaaattaaagcgggccctcggtacgtacttaacgctattagtcctcatgcctatgatgtgtttagaaaatctaataacttgaaagagataatagaaaatgcatctaaacaaaatctagactctatatctatttctgttatgactccaattaatcccatgttagcggaatcgtgtgattctgtcaataaggcgtttaaaaaatttccatcaggaatgtttgcggaagtcaaatacgatggtgaaagagtacaagttcataaaaataataacgagtttgccttctttagtagaaacatgaaaccagtactctctcataaagtggattatctcaaagaatacataccgaaagcatttaaaaaagctacgtctatcgtattggattctgaaattgttcttgtagacgaacataatgtaccgctaccgtttggaagtttaggaatacacaaaaagaaagaatataaaaactctaacatgtgtttgttcgtgtttgactgtttgtactttgatggattcgatatgacggacattccattgtacgaacgaagatcttttctcaaagatgttatggttgaaatacccaatagaatagtattctcagagttgacgaatattagtaacgagtctcagttaactgacgtattggatgatgcactaacgagaaaattagaaggattggtcttaaaagatattaatggagtatacgaaccgggaaagagaagatggttaaaaataaagcgagactatttgaacgagggttccatggcagattctgccgatttagtagtactaggtgcctactatggtaaaggagcaaagggtggtatcatggcagtctttctaatgggttgttacgacgatgaatccggtaaatggaagacggttaccaagtgttcaggacacgatgataatacgttaagggagttgcaagaccaattaaagatgattaaaattaacaaggatcccaaaaaaattccagagtggttagtagttaataaaatctatattcccgattttgtagtagaggatccgaaacaatctcagatatgggaaatttcaggagcagagtttacatcttccaagtcccataccgcaaatggaatatccattagatttcctagatttactaggataagagaggataaaacgtggaaagaatctactcatctaaacgatttagtaaacttgactaaatcttaatagttacatacaaactgaaaattaaaataacaccatttagttggtggtcgccatggatggtgttattgtatactgtctaaacgcgttagtaaaacatggcgaggaaataaatcatataaaaaatgatttcatgattaaaccatgttgtgaaagagtttgtgaaaaagtcaagaacgttcacattggcggacaatctaaaaacaatacagtgattgcagatttgccatatatggataatgcggtatccgatgtatgcaattcactgtataaaaagaatgtatcaagaatatccagatttgctaatttgataaagatagatgacgatgacaagactcctactggtgtatataattattttaaacctaaagatgttattcctgttatcatatctataggaaaggataaagatgtctgtgaactattaatctcatcagacatatcgtgtgcatgcgtggagttaaattcatatcacgtagccattcttcccatgaatgtttccttttttaccaaaggaaatgcctcgttgattattctcctgtttgatttctctatcgatgcagcacctctcttaagaagtgtaaccgataataatgttattatatctagacaccagcgtctacatgacgagcttccgagttccaattggttcaagttttacataagtataaagtccgactattgttctatattatatatggttgttgatggatctgtgatgcatgcgatagctgataatagaactcacgcaattattagcaaaaatatattagacaatactacaattaacgatgagtgtagatgctgttattttgaaccacagattaggattcttgatagagatgagatgctcaatggatcatcgtgtgatatgaacagacattgtattatgatgaatttacctgatgtaggcgaatttggatctagtatgttggggaaatatgaacctgacatgattaagattgctctttcggtggctggtaatttaataagaaatcgagactacattcccgggagacgaggctatagctactacgtttacggtatagcctctagataatttttttaagcacgaaataaaaaacataattttaaaccaatctatttcatactattttgtgtgatcaccatggacataaagatagatattagtatttctggtgataaatttacggtgactactaggagggaaaatgaagaaagaaaaaaatatctacctctccaaaaagaaaaaactactgatgttatcaaacctgattatcttgagtacgatgacttgttagatagagatgagatgtttactattctagaggaatattttatgtacagaggtctattaggcctcagaataaaatatggacgactctttaacgaaattaaaaaattcgacaatgatgcggaagaacaattcggtactatagaagaactcaagcagaaacttagattaaattctgaagagggagcagataactttatagattatataaaggtacaaaaacaggatatcgtcaaacttactgtatacgattgcatatctatgataggattgtgtgcatgcgtggtagatgtttggagaaatgagaaactgttttctagatggaaatattgtttacgagcgattaaactgtttattaatgatcacatgcttgataagataaaatctatactgcagaatagactagtatatgtggaaatgtcatagaaagttaatgagagcaaaaatatataaggttgtattccatatttgttattttttctgtaatagttaaaaaaatacattcgatggtctatctatcagattattatgtgttataaggtactttttctcataataaactagagtatgagtaagatagtgtttttcaaaacatataaatctaaaattgatggatgagatatacagctattaatttcgaaaatatataaatctaaaattgatggataagatatacagctattaatttcgaaaatatattttaatctgataactttaaacatggatttttgatggtggtttaacgttttaaaaaaagattttgttattgtagtatatgataatattaaaagatggatataaagaatttgctgactgcatgtactattttttacattactacattggctacggcagatatacctactccgccaccaacgggtcatgtgacaagggagaatatcttgataagaggcataatcaatgttgtaatcggtgtccacctggagaatttgccaaggttagatgtaatggtaacgataacacaaaatgtgaacgctgcccacctcatacatataccacaatccccaattattctaatggatgtcatcaatgtagaaaatgcccaaccggatcatttgataaggtaaagtgtaccggaacacagaacagtaaatgttcgtgtcttcctggttggtattgcgctactgattcttcacagactgaagattgttgaaattgtgtaccaaaaaggagatgtccatgcggatactttggtggaatagatgaacaaggaaatcctatttgtaaatcgtgctgtattggtgaatattgcaactacctacgtaattatagacttgatccattttctccatgcaaactatctaaatgtaattaattatgattttgatgataatgttaccatacattatatcgctacttggttagtgtattattcagtatgaagacctattaataattacttatcttttgacgatcttgttataattataatataaaaacttatggcatagtaactcataattgctgacgcgataaattcgtaataatctgttttgttcaaatttttataaggaatctacaggcataaaaataaaaatataatttataatatactcttacagcgcgccatcatgaatagcagcagtaaattaattgctgttattaatggatttagaaatagtggacgattttgtgatattaatatagttattaatgatgaaaggataaacgctcacagactcatcctatctggagcctccgaatatttttccattctgttttccaataattttatcgattctaatgaatacgaagttaatctaagtcatttagattatcaaagtgttaacgatttgatcgattacatttatgggatacctttgagcctaactaacgataacgtgaaatatattctttcaaccgctgattttttacaaattggatctgccattactgagtgcgaaaaatacatacttaaaaatctttgttctagaaactgtatcgatttctacatatacgctgataaatataataacaagaaaatagaatcagcgtcgtttaacacaatattacgaaatattttgagactcatcaacgatgaaaactttaaatacttaacagaggaatcaatgataaaaattttaagcgatgatatgttaaatataaaaaatgaggattttgcaccactaattctcattaaatggttagagagtactcaacaatcatgcaccgtcgagttacttagatgcctcagaatatcattgctttccccacaagttataaaatcactttatagtcatcaactggttagttcaatctacgaatgtataacattcttaaacaatatagcattcttggatgaatcatttcctagataccatagcatcgagttgatatctatcggtataagtaattcgcatgataagatttccataaactgctacaatcataaaaaaaatacatgggaaatgatatcttcacgtagatataggtgtagtttcgcagtggccgtcctggataatattatctatatgatgggtggatatgatcagtccccgtatagaagttcaaaggttatagcgtacaatacatgtacaaattcttggatatatgatataccagagctaaaatatcctcgttctaattgtgggggactggctgatgacgaatacatttattgtataggcggcatacgcgatcaggattcatcgttgacatctagtattgatagatggaagccatcaaaaccatattggcagaagtatgctaaaatgcgcgaaccaaaatgtgatatgggggttgcgatgttaaacggattaatatatgtcatgggtggaatcgttaaaggtgacacgtgtaccgacgcactagagagtttatcagaagatggatggatgaagcatcaacgtcttccaataaaaatgtccaatatgtcgacgattgttcatgatggcaagatttatatatctggaggttacaacaatagtagtgtagttaatgtaatatcgaatctagtccttagctataatccgatatatgatgaatggaccaaattatcatcattaaacattcctagaattaatcccgctctatggtcagcgcataataaattatatgtaggaggaggaatatctgatgatgttcgaactaatacatctgaaacatacgataaagaaaaagattgttggacattggataatggtcacgtgttaccacgcaattatataatgtataaatgcgaaccgattaaacataaatatccattggaaaaaacacagtacacgaatgattttctaaagtatttggaaagttttataggtagttgatagaacaaaatacataattttgtaaaaataaatcactttttatactaatatgacacgattaccaatacttttgttactaatatcattagtatacgctacaccttttcctcagacatctaaaaaaataggtgatgatgcaactctatcatgtaatcgaaataatacaaatgactacgttgttatgagtgcttggtataaggagcccaattccattattcttttagctgctaaaagcgacgtcttgtattttgataattataccaaggataaaatatcttacgactctccatacgatgatctagttacaactatcacaattaaatcattgactgctagagatgccggtacttatgtatgtgcattctttatgacatcaactacaaatgacactgataaagtagattatgaagaatactccacagagttgattgtaaatacagatagtgaatcgactatagacataatactatctggatctacacattcaccagaaactagttctgagaaaccagaggatatagataattttaattgctcgtcggtattcgaaatcgcgactccggaaccaattactgataatgtagaagatcatacagacaccgtcacatacactagtgatagcattaatacagtaagtgcatcatctggagaatccacaacagacgagactccggaaccaattactgataaagaagaagatcatacagtcacagacactgtctcatacactacagtaagtacatcatctggaattgtcactactaaatcaaccaccgatgatgcggatctttatgatacgtacaatgataatgatacagtaccaccaactactgtaggcggtagtacaacctctattagcaattataaaaccaaggactttgtagaaatatttggtattaccgcattaattatattgtcggccgtggcaatattctgtattacatattatatatataataaacgttcacgtaaatacaaaacagagaacaaagtctagatttttgacttacataaatgtctgggatagtaaaatctatcatattgagcggaccatctggttcaggaaagacagccatagccaaaagactatgggaatatatttggatttgtggtgtcccataccactagatttcctcgtcctatggaacgagaaggtgtcgattaccattacgttaacagagaggccatctggaagggaatagccgccggaaactttctagaacatactgagtttttaggaaatatttacggaacttctaaaactgctgtgaatacagcggctattaataatcgtatttgtgtgatggatctaaacatcgatggcgttagaagtcttaaaaatacgtacctaatgccttactcggtgtatataagacctacctctcttaaaatggttgagaccaagcttcgttgtagaaacactgaagcggatgatgagattcatcgtcgtgtgatgttggcaaaaactgacatggatgaggcaggtgaagccggtctattcgacactattatcattgaagatgatgtgaatttagcatatagtaagttaattcagatactacaggaccgtattagaatgtattttaacactaattagagacttaagacttaaaacttgataattaataatataactcgtttttatatgtggctatttcaacgtctaatgtattagttaaatattaaaacttaccacgtaaaacttaaaatttaaaatgatatttcattgacagatagatcacacattatgaactttcaaggacttgtgttaactgacaattgcaaaaatcaatgggtcgttggaccattaataggaaaaggtggattcggtagtatttatactactaatgacaataattatgtagtaaaaatagagcccaaagctaacggatcattatttaccgaacaggcattttatactagagtacttaaaccatccgttatcgaagaatggaaaaaatctcacaatataaagcacgtaggtcttatcacgtgcaaggcatttggtctatacaaatccattaatgtggaatatcgattcttggtaattaatagattaggtgcagatctagatgcggtgatcagagccaataataatagattaccaaaaaggtcggtgatgttgatcggaatcgaaatcttaaataccatacaatttatgcacgagcaaggatattctcacggagatattaaagcgagtaatatagtcttggatcaaatagataagaataaattatatctagtggattacggattggtttctaaattcatgtctaatggcgaacatgttccatttataagaaatccaaataaaatggataacggtactctagaatttacacctatagattcgcataaaggatacgttgtatctagacgtggagatctagaaacacttggatattgtatgattagatggttgggaggtatcttgccatggactaagatatctgaaacaaagaattgtgcattagtaagtgccacaaaacagaaatatgttaacaatactgcgactttgttaatgaccagtttgcaatatgcacctagagaattgctgcaatatattaccatggtaaactctttgacatattttgaggaacccaattacgacgagtttcggcacatattaatgcagggtgtatattattaagtgtggtgtttggtcgatgtaaaatttttgtcgataaaaattaaaaaataacttaatttattattgatctcgtgtgtacaaccgaaatcatggcgatgttttacgcacacgctctcggtgggtacgacgagaatcttcatgcctttcctggaatatcatcgactgttgccaatgatgtcaggaaatattctgttgtgtcagtttataataacaagtatgacattgtaaaagacaaatatatgtggtgttacagtcaggtgaacaagagatatattggagcactgctgcctatgtttgagtgcaatgaatatctacaaattggagatccgatccatgatcaagaaggaaatcaaatctctatcatcacatatcgccacaaaaactactatgctctaagcggaatcgggtacgagagtctagacttgtgtttggaaggagtagggattcatcatcacgtacttgaaacaggaaacgctgtatatggaaaagttcaacatgattattctactatcaaagagaaggccaaagaaatgaatgcactcagttcaggacctatcatcgattaccacgtctggataggagattgtatctgtcaagttactgctgtggacgtacatggaaaggaaattatgagaatgagattcaaaaagggtgcggtgctacagatcccaaatctggtaaaagttaaacttggggagaatgatacagaaaatctttcttctactatatcggcggcaccatcgaggtaaccacctctcaagaagaccgcgtgaataatgtactcatgaaacgtttggaaactatacgccatatgtggtctgttgtatatgatcattttgatattgtgaatggtaaagaatgctgttatgtgcatacgcattcatctaatcaaaatcctataccgagtactgtaaaaacaaatttgtacatgaagactatgggatcatgcattcaaatggattccatggaagctctagagtatcttagcgaactgaaggaatcaggtggatggagtcccagaccagaaatgcaggaatttgaatatccagatggagtggaagacactgaatcaattgagagattggtagaggagttcttcaatagatcagaacttcaggctggtaaattagtcaaatttggtaattctattaattgttaaacatacatctgtttcagctaagcaactaagaacacgtatacggcagcagcttccttttatactctcatcttttaccaacacaaagggtggatatttgttcattggagttgataataatacacacaaagtatttggattcacggtgggttacgactacctcagactgatagagaatgatatagaaaagcatatcaaaagactttgtgttgtgcatttctgtgagaagaaagaggacatcaagtacacgtgtcgattcatcaaggtatataaacctggggatgaggctacctcgacatacgtgtgcgctatcaaagtggaaagatgctgttgtgctgtgtttgcagattggccagaatcatggtatatggatactaatggtatcaagaagtattctccagatgaatgggtgtcacatataaaattttaattaatgtaactatagagaacaaataataggttgtaatatcatatagacaataactaacaattaattagtaactgttatctcttttttaactaaccaactaactatatacctattaatacatcgtaattatagttcttaacatctattaatcattgattcgcttctttaattttttataaactaacattgttaattgaaaagggataacatgttacagaatataaattatatatggatttttttaaaaaggaaatacttgactggagtgtatatttatctcttcattatatagcacgcgtgtgttccaattcttccacatcccatataatacaggattataatctcgttcgaacatacgagaaagtggataaaacaatagttgattttttatctaggttgccaaatttattccatattttagaatatggggaaaatattctacatatttattctatggatgatgctaatacgaatattataattttttttctagatagagtattaaatattaataagaacgggtcatttatacacaatctcaggttatcatcatccattaatataaaagaatatgtatatcaattagttaataatgatcatccagataataggataagactaatgcttgaaaatggacgtagaacaagacattttttgtcctatatatcagatacagttaatatctatatatgtattttaataaatcatggattttatatagatgcagaagacagttacggttgtacattattacatagatgtatatatcactataagaaatcagaatcagaatcatacaatgaattaattaagatattgttaaataatggatccgatgtagataaaaaagatacgtacggaaacacaccttttatcctattatgtaaacacgatatcaacaacgtggaattgtttgagatatgtttagagaatgctaatatagactctgtagactttaatagatatacacctcttcattatgtctcatgtcgtaataaatatgattttgtaaagttattaatttctaaaggagcaaatgttaatgcgcgtaataaattcggaactactccattttattgtggaattatacacggtatctcgcttataaaactatatttggaatcagacacagagttagaaatagataatgaacatatagttcgtcatttaataatttttgatgctgttgaatctttagattatctattatccagaggagttattgatattaactatcgtactatatacaacgaaacatctatttacgacgctgtcagttataatgcgtataatacgttggtctatctattaaacagaaatggtgattttgagacgattactactagtggatgtacatgtatttcggaagcagtcgcaaacaacaacaaaataataatggaagtactattgtctaaacgaccatctttgaaaattatgatacagtctatgatagcaattactaaaaataaacaacataatgcagatttattgaaaatgtgtataaaatatactgcgtgtatgaccgattatgatactcttatagatgtacagtcgctacagcaatataaatggtatattttaaaatgtttcgatgaaatagatatcatgaagagatgttatataaaaaataaaactgtattccaattagttttttgtatcaaagacattaatactttaatgagatatggtaaacatccttctttcgtgaagtgcactagtctcgacgtatacggaagtcgtgtacgtaatatcatagcatctattagatatcgtcagagattaattagtctattatccaagaagctggatgcgggagataaatggtcgtgttttcctaacgaaataaaatataaaatattggaaaactttaacgataacgaactatccacatatctaaaaatcttataaacactattaaaatataaaatctaagtaggataaaatcacactacatcattgtttccttttagtgctcgacagtgtatactatttttaacactcataaataaaaatgaaaacgatttccgttgttacgttgttatgcgtactacctgctgttgtttattcaacatgtactgtacccactatgaataacgctaaattaacgtctaccgaaacatcgtttaatgataaacagaaagttacatttacatgtgatcagggatatcattctttggatccaaatgctgtctgcgaaacagataaatggaaatacgaaaatccatgcaagaaaatgtgcacagtttctgattatgtctctgaattatatgataagccattatacgaagtgaattccaccatgacactaagttgcaacggcgaaacaaaatattttcgttgcgaagaaaaaaatggaaatacttcttggaatgatactgttacgtgtcctaatgcggaatgtcaacctcttcaattagaacacggatcgtgtcaaccagttaaagaaaaatactcatttggggaatatatgactatcaactgtgatgttggatatgaggttattggtgcttcgtacataagttgtacagctaattcttggaatgttattccatcatgtcaacaaaaatgtgatataccgtctctatctaatggattaatttccggatctacattttctatcggtggcgttatacatcttagttgtaaaagtggttttatactaacgggatctccatcatccacatgtatcgacggtaaatggaatcccatactcccaacatgtgtacgatctaacgaaaaatttgatccagtggatgatggtcccgacgatgagacagatttgagcaaactctcgaaagacgttgtacaatatgaacaagaaatagaatcgttagaagcaacttatcatataatcatagtggcgttaacaattatgggcgtcatatttttaatctccgttatagtattagtttgttcctgtgacaaaaataatgaccaatataagttccataaattgctaccgtaaatataaatccgttaaaataattaataatttaataacaaacaagtatcaaaagattaaagacttatagctagaatcaattgagatgtcttcttcagtggatgttgatatctacgatgccgttagagcatttttactcaggcactattataacaagagatttattgtgtatggaagaagtaacgccatattacataatatatacaggctatttacaagatgcgccgttataccgttcgatgatatagtacgtactatgccaaatgaatcacgtgttaaacaatgggtgatggatacacttaatggtataatgatgaatgaacgcgatgtttctgtaagcgttggcaccggaatactattcatggaaatgtttttcgattacaataaaaatagtatcaacaatcaactaatgtatgatataattaatagcgtatctataattctagctaatgagagatatagaagcgcttttaacgacgatggtatatacatccgtagaaatatgattaacaagttgtacggatacgcatctctaactactattggcacgatcgctggaggtgtttgttattatctgttgatgcatctagttagtttgtataaataattatttcaatatactagttaaaattttaagattttaaatgtataaaaaactaataacgtttttatttgtaataggtgcattagcatcctattcgaataatgagtacactccgtttaataaactgagtgtaaaactctatatagatggagtagataatatagaaaattcatatactgatgataataatgaattggtgttaaattttaaagagtacacaatttctattattacagagtcatgcgacgtcggatttgattccatagatatagatgttataaacgactataaaattattgatatgtataccattgactcgtctactattcaacgcagaggtcacacgtgtagaatatctaccaaattatcatgccattatgataagtacccttatattcacaaatatgatggtgatgagcaacaatattctattactgcagagggaaaatgctataaaggaataaaatatgaaataagtatgatcaacgatgatactctattgagaaaacatactcttaaaattggatctacttatatatttgatcgtcatggacatagtaatacatattattcaaaatatgatttttaaaaatttaaaatatattatcacttcagtgacagtagtcaaataacaaacaacaccatgagatatattataattctcgcagttttgttcattaatagtatacacgctaaaataactagttataagtttgaatccgtcaattttgattccaaaattgaatggactggggatggtctatacaatatatcccttaaaaattatggcatcaagacgtggcaaacaatgtatacaaatgtaccagaaggaacatacgacatatccgcatttccaaagaatgatttcgtatctttctgggttaaatttgaacaaggcgattataaagtggaagagtattgtacgggactatgcgtcgaagtaaaaattggaccaccgactgtaacattgactgaatacgacgaccatatcaatttgtacatcgagcatccgtatgctactagaggtagcaaaaagattcctatttacaaacgcggtgacatgtgtgatatctacttgttgtatacggctaacttcacattcggagattctaaagaaccagtaccatatgatatcgatgactacgattgcacgtctacaggttgcagcatagactttgtcacaacagaaaaagtgtgcgtgacagcacagggagccacagaagggtttctcgaaaaaattactccatggagttcgaaagtatgtctgacacctaaaaagagtgtatatacatgcgcaattagatccaaagaagatgttcccaatttcaaggacaaaatggccagagttatcaagagaaaatttaataaacagtctcaatcttatttaactaaatttctcggtagcacatcaaatgatgttaccacttttcttagcatgcttaacttgactaaatattcataactaatttttattaatgatacaaaaacgaaataaaactgcatattatacactggttaacgcccttataggctctaaccattttcaagatgaggtccctgattatagtccttctgttcccctctatcatctactccatgtctattagacgatgtgagaagactgaagaggaaacatggggattgaaaatagggttgtgtataattgccaaagatttctatcccgaaagaactgattgcagtgttcatctcccaactgcaagtgaaggattgataactgaaggcaatggattcagggatatacgaaacaccgataaattataaaaaaagcaatgtgtccgctgtttccgttaataatactattttcgtaactggcggattattcataaataactctaatagcacgatcgtggttaacaatatggaaaaacttgacatttataaagacaaacaatggtcgattatagaaatgcctatggctagggtatatcacggcatcgactcgacatttggaatgttatattttgccggaggtctatccgttaccgaacaatatggtaatttagagaaaaacaacgagatatcttgttacaatcctagaacgaataagtggtttgatatttcatatactatttataagatatccatatcatcattgtgtaaactaaataacgtcttctatgtatttagtaaggacattggatatgtggaaaagtatgatggtgcatggaagttagtacatgatcgtctccccgctataaaggcattatcaacttctccttattgattgaaaatgaaaatataaatagtttttatgtatagcagtattaccctatagttttattgcttactactaacatggatacagatgttacaaatgtagaagatatcataaatgaaatagatagagagaaagaagaaatactaaaaaatgtagaaattgaaaataataaaaacattaacaagaatcatccaagtggatatattagagaagcactcgttattaatacaagtagtaatagtgattccattgataaagaagttatagaatgtatcagtcacgatgtaggaatatagatcatatctactaatttttataatcgatacaaaacataaaaaacaactcgttattacatagcaggcatggaatccttcaagtattgttttgataacgatggcaagaaatggattatcggaaatactttatattctggtaattcaatactatataaggtcagaaaaaatttcactagttcgttctacaattacgtaatgaaaatagatcacaaatcacacaagccattgttgtctgaaatacgattctatatatctgtattggatcctttgactatcgacaactggacacgggaacgtggtataaagtatttggctattccagatctgtatggaattggagaaaccgatgattatatgttcttcgttataaagaattcgggaagagtattcgccccaaaggatactgaatcagtcttcgaagcatgcgtcactatgataaacacgttagagtttatacactctcgaggatttacccatggaaaaatagaaccgaggaatatactgattagaaataaacgtctttcactaattgactattctagaactaacaaactatacaagagtggaaactcacatatagattacaacgaggacatgataacttcaggaaatatcaattatatgtgtgtagacaatcatcttggagcaacagtttcaaaacgaggagatttagaaatgttgggatattgcatgatagaatggttcggtggcaaacttccatggaaaaacgaaagtagtataaaagtaataaaacaaaaaaaagaatataaaaaatttatagctactttctttgaggactgttttcctgaaggaaatgaacctctggaattagttagatatatagaattagtatacacgttagattattctcaaactcctaattatgacagactacgtaaactgtttatacaagattgaaattatattctttttttatagagtgtggtagtgttacggatatctaatattaatattagactatctctatcgcgctacacgaccaatatcgattactatggatatcttcagggaaatcgcatcttctatgaaaggagagaatgtattcatttctccagcgtcaatctcgtcagtattgacaatactgtattatggagctaatggatccactgctgaacagctatcaaaatatgtagaaacggaggagaacacggataaggttagcgctcagaatatctcattcaaatccatgaataaagtatatgggcgatattctgccgtgtttaaagattcctttttgagaaaaattggcgataagtttcaaactgttgacttcactgattgtcgcactatagatgcaatcaacaagtgtgtagatatctttactgaggggaaaatcaatccactattggatgaaccattgtctcctgatacctgtctcctagcaattagtgccgtatactttaaagcaaaatggttgatgccattcgaaaaggaatttaccagtgattatcccttttacgtatctccgacggaaatggtagatgtaagtatgatgtctatgtacggcaaggcatttaatcacgcatctgtaaaggaatcattcggcaacttttcaatcatagaactgccatatgttggagatactagtatgatggtcattcttccagacaagattgatggattagaatccatagaacaaaatctaacagatacaaattttaagaaatggtgtaactctctggaagctacgtttatcgatgttcacattcccaagtttaaggtaacaggttcgtataatcttgtggatactctagtaaagtcaggactgacagaggtgttcggttcaactggagattatagcaatatgtgtaattcagatgtgagtgtcgacgctatgattcacaaaacgtatatagatgtcaatgaagagtatacagaagcagctgcagcaacttgtgcactggtgtcagactgtgcatcaacaattacaaatgagttctgtgtagatcatccgttcatctatgtgattaggcatgttgatggaaaaattcttttcgttggtagatattgctctccgacaactaattgttaaccattttttttaaaaaaatagaaaaaacatgtggtattagtgcaggtcgttgttcttccaattgcaattggtaagatgacggccaactttagtacccacgtcttttcaccacagcactgtggatgtgacagactgaccagtattgatgacgtcagacaatgtttgactgaatatatttattggtcgtcctatgcataccgcaacaggcaatgcgctggacagttgtattccacactcctctcttttagagatgatgcggaatcagtgttcatcgacattcgcgagctggtaaaaaatatgccgtgggatgatgtcaaagattgtacagaaatcatccgttgttatataccggatgagcaaaaaaccatcagagagatttcggccatcatcggactttgtgcatatgctgctacttactggggaggtgaagaccatcccactagtaacagtctgaacgcattgtttgtgatgcttgagatgctcaattacgtggattataacatcatattccggcgtatgaattgatgagttgtacatcttgacattttctttcttctcttctccctttcttctcttctcccttcctccctcttctccctttcccagaaacaaacttttttacccactataaaataaaatgagtatactacctattatatttcttcctatatttttttattcttcattcgttcagacttttaacgcgcctgaatgtatcgacaaagggcaatattttgcatcattcatggagttagaaaacgagccagtaatcttaccatgtcctcaaataaatacgctatcatccggatataatatattagatattttatgggaaaaacgaggagcggataatgatagaattataccgatagataatggtagcaatatgctaattctgaacccgacacaatcagactctggtatttatatatgcattaccacgaacgaaacctactgtgacatgatgtcgttaaatttgacaatcgtgtctgtctcagaatcaaatatagatcttatctcgtatccacaaatagtaaatgagagatctactggcgaaatggtatgtcccaatattaatgcatttattgctagtaacgtaaacgcagatattatatggagcggacatcgacgccttagaaataagagacttaaacaacggacacctggaattattaccatagaagatgttagaaaaaatgatgctggttattatacatgtgttttagaatatatatacagaggtaaaacatataacgtaaccagaattgtaaaattagaggtacgggataaaataataccttctactatgcaattaccagatggcattgtaacttcaataggtagtaatttgactattgcgtgtagagtatcgttgagacctcccacaacggatgcagacgtcttttggataagtaatggtatgtattacgaagaagatgatggggacggagacggtagaataagtgtagcaaataaaatctatatgaccgataagagacgtgttattacatcccggttaaacattaatcctgtcaaggaagaagatgctacaacgtttacgtgtatggcgtttactattcctagcatcagcaaaacagttactgttagtataacgtgaatgtatgttgttacatttccatgtcaattgagtttataagaatttttatacattatcttccaacaaacaattgacgaacgtattgctatgattaactcccacgatactatgcatattattaatcattaacttgcagactatacctagtgctattttgacatactcatgttcttgtgtaattgcggtatctatattattaaagtacgtaaatctagctatagttttattatttaattttagataatataccgtctccttatttttaaaaattgccacatcctttattaaatcatgaatgggaatttctatgtcatcgttagtatattgtgaacaacaagagcagatatctataggaaagggtggaatgcgatacattgatctatgtagttttaaaacacacgcgaactttgaagaatttatataaatcattccatcgatacatccttctatgttgacatgtatatatccaggaattcttttattaatgtcaggaaatgtataaactaaaacattgcccgaaagcggtgcctctatctgcgttatatccgttcttaacttacaaaatgtaaccaatacctttgcatgacttgttttgttcggcaacgttagtttaaacttgacgaatggattaattacaatagcatgatccgcgcatctattaagtttttttactttaacgcccttgtatgtttttacagagactttatctaaatttctagtacttgtatgtgttataaatataacgggatatagaactgaatcacctaccttagatacccaattacattttatcagatccagataataaacaaattttgtcgccctaactaattctatattgttatatattttacaattggttatgatatcatgtaataacttggagtctaacgcgcatcgtcgtacgtttatacaattgtgatttagtgtagtatatctacacatgtatttttccgcactatagtattctggactagtgataaaactatcgttatatctgtcttcaatgaactcatcgagatattgctctctgtcatattcatacacctgcataaactttctagacatcttacaatccgtgttattttaggatcatatttacatatttacgggtatatcaaagatgttagattagttaatgggaatcgtctataataatgaatattaaacaattatatgaggacttttaccacaaagcatcataaaaatgagtcgtcgtctgatttatgttttaaatatcaaccgcaaatcaactcataaaatacaagagaatgaaatatatacatattttagtcattgcaatatagaccatacttctacagaacttgattttgtagttaaaaactatgatctaaacagacgacaacatgtaactgggtatactgcactacactgctatttgtataataattactttacaaacgatgtactgaagatattattaaatcatgacgtaaatgtaacgatgaaaaccagtagcggacgtatgcctgtttatatattgcttactagatgttgcaatatttcacatgatgtagtgatagatatgatagacaaagataaaaaccacttattacatagagactattccaacctattactagagtatataaaatctcgttacatgttattaaaggaagaggatatcgatgagaacatagtatccactttattagataagggaatcgatcctaactttaaacaagacggatatacagcgttacattattattatttgtgtctcgcacacgtttataaaccaggtgagtgtagaaaaccgataacgataaaaaaggccaagcgaattatttctttgtttatacaacatggagctaatctaaacgcgttagataattgtggtaatacaccattccatttgtatcttagtattgaaatgtgtaataatattcatatgactaaaatgctgttgacttttaatccgaatttcaaaatatgtaataatcatggattaacgcctatactatgttatataacttccgactacatacaacacgatattcttgttatgttaatacatcactatgaaacaaatgttggagaaatgccgatagatgagcgtcgtatgatcgtattcgagtttatcaaaacatattctacacgtccggcagattcgataacttatttgatgaataggtttaaaaatataaatatttatacccgctatgaaggaaagacattattacacgtagcatgtgaatataataatacacacgtaatagattatcttatacgtatcaacggagatataaatgcgttaaccgacaataacaaacacgctacacaactcattatagataacaaagaaaattccccgtataccatcgattgtttactgtatatacttagatatattgtagataagaatgtgataagatcgttggtggatcaacttccatctctacctatcttcgatataaaatcatttgagaaattcatatcctactgtatacttttagatgacacattttacgataggcacgttaagaatcgcgattctaaaacgtatcgatacgcattttcaaaatacatgtcgtttgataaatacgatggtataataactaaatgtcacgacgaaacaatgttactcaaactgtccactgttctagacactacactatatgcagttttaagatgccataattcgaaaaagttaagaagatacctcaacgagttaaaaaaatataataacgataagtcctttaaaatatattctaatattatgaatgagagataccttaatgtatattataaagatatgtacgtgtcaaaggtatatgataaactatttcctgttttcacagataaaaattgtctactaacattactaccttcagaaattatatacgaaatattatacatgctgacaattaacgatctttataatatatcgtatccacctaccaaagtatagttgtatttttctcatgcgatgtgtgtaaaaaaactgatattatataaatattttagtgccgtataataaagatgacgatgaaaatgatggtacatatatatttcgtatcattattgttattgctattccacagttacgccatagacatcgaaaatgaaatcacagaattcttcaataaaatgagagatactctaccagctaaagactctaaatggttgaatccagcatgtatgttcggaggcacaatgaatgatatagccgctctaggagagccattcagcgcaaagtgtcctcctattgaagacagtcttttatcgcacagatataaagactatgtggttaaatgggagaggctagaaaagaatagacggcgacaggtttctaataaacgtgttaaacatggtgatttatggatagccaactatacatctaaattcagtaaccgtaggtatttgtgtaccgtaactacaaagaatggtgactgtgttcagggtatagttagatctcatattaaaaaacctccttcatgcattccaaaaacatatgaactaggtactcatgataagtatggcatagacttatactgtggaattctttacgcaaaacattataataatataacttggtataaagataataaggaaattaatatcgacgacattaagtattcacaaacgggaaagaaattaattattcataatccagagttagaagatagtggaagatacaactgttacgttcattacgacgacgttagaatcaagaatgatatcgtagtatcaagatgtaaaatacttacggttataccgtcgcaagaccacaggtttaaactaatactagatccaaaaatcaacgtaacgataggagaacctgccaatataacatgcactgctgtgtcaacgtcattattgattgacgatgtactgattgaatgggaaaatccatccggatggcttataggattcgattttgatgtatactctgttttaactagtagaggcggtattaccgaggcgaccttgtactttgaaaatgttactgaagaatatataggtaatacatataaatgtcgtggacacaactattattttgaaaaaacccttacaactacagtagtattggagtaaatacacaatgcatttttatatacattactgaataattattattattatttatatcgtatttgtgctataacgcgactatctaggtatttgtatctcactgatagagaacatataaatatagactctattaaacagttgtgtaaaatatcaaatcctaatagatgtggatgtacggctttacatgagtacttttataattatagatcagtcaacggaaaatacaagtatagatacaacggttactatcaatattatttatctagcgattatgaaaattataatgaatattattatgatgattatgatagaactggtatgaacagtgagagtgataatatatcaatcaaaacagaatatgaattctatgatgaaacacaagatcaaagtacacaactagtaggttacgacattaaactcaaaaccaatgaggatgattttatggctatgatagatcagtgggtgtccatgattatatagatgaatcaattaataaagtagtatatggaagagagtctcacgtaagatggcgggatatatggcaagaacataatgatggcgtatacagtataggaaaggagtgcatagataatatatacgaagacaaccataccgtagacgaattctacaagatagacagcgtatcagatgtagatgacgcggaacacatatctccgataactaatgatgtatctacacaaacatgggaaaagaaatcagagttagatagatacatggaaatgtatcctcgtcatagatatagtaagcattctgtctttaagggattttctgacaaagttagaaaaaatgatttagacatgaatgtggtaaaagaattactttctaacggtgcatctctaacaattaaggatagcagtaataaggatccaataaccgtttattttcgaagaacgataatgaatttagaaatgattgatattattaacaaacatacaactattgatgaacgaaagtatatagtacactcctatctaaaaaattataaaaatttcgattatccatttttcaggaagttagttttgactaataaacattgtctcaacaattattataatataagcgacagcaaatatggaacaccgctacatatattggcgtctaataaaaaattaataactcctaattacatgaagttattagtgtataacggaaatgatataaacgcacgaggtgaagatacacaaatgcgaactccattacacaaatatttgtgtaaatttgtatatcataatattgaatatggtatccgatactataatgaaaagattatagacgcatttatagagttaggagccgatctaactattccaaataacgatggaatgataccagtagtttactgtatacactcaaatgcagaatatggttataacaatattactaacataaagataatacgtaaactacttaatcttagtagacgtgcgtcacataatctatttagagatcgagtcatgcacgattatataagtaatacatatattgatcttgagtgtttagatattattagatcgttggatggattcgatatcaatggttactttgaaggacgtacaccacttcattgcgctatacaacataacttcactcagattgctaagtacttattagatcgaggagctgatatagtcgtacccaacacattgattatacatcagtacatacagtaaatagcatagatatggaggaggatacaaatatttcaaataaagttataaggtacaacactgtcaataatatatggaagacattacctaacttctggactggaactataaatccaggcgtggtctcgcataaagatgatatatatgttgtatgcgacatcaaagatgaaaaaaatgttaagacttgtatatttagatataacacgaatacgtataacggatgggaattggttacgacgacagaaagcagattatcagctctgcatactattcttcatgacaataccataatgatgttacattgttatgaatcgtatatgttacaagatacatttaatgtgtacactcgcgaatggaatcatatgtgtcatcaacattcgaatagttatatcatgtacaatatactacccatctactaaatataatagaataaaataaatgagtatgatcattttagataacgattgattttatcattaccgcttcattcttatattctttgcttacggaacctatatttagaaacatctactaacgattttttatgcttgcattattaatggtatgtaatatgattgattgtgtacgcaataccaatttgttaagtatgaatacggggtacaaacataaactgaaatttaacattatttatttatgatatatatcgttatcgttattgtttggtctataccatggatatctttaaagaactaatcttaaaacaccctgatgaaaatgttttgatttctccagtttctattttatctactttatctattctaaatcatggagcagctggttctacagctgaacaactatcaaaatatatagagaatatgaatgagaatacacccgatgataagaaggatgacaataatgacatggacgtagatattccgtattgtgcgacactagctaccgcaaataaaatatacggtagcgatagtatcgagttccacgcctccttcctacaaaaaataaaagacgattttcaaactgtaaactttaataatgctaaccaaacaaaggaactaatcaacgaatgggttaagacgatgacaaatggtaaaattaattccttattgactagtccgctatccattaatactcgtatgacagttgttagcgccgtccattttaaagcaatgtggaaatatccattttctaaacatcttacatatacagacaagttttatatttctaagaatatagttaccagtgttgatatgatggtgggtaccgagaataacttgcaatatgtacatattaatgaattattcggaggattctctattatcgatattccatacgagggaaactctagtatggtaattatactaccggacgacatagaaggtatatataacatagaaaaaaatataacagatgaaaaatttaaaaaatggtgtggtatgttatctactaaaagtatagacttgtatatgccaaagtttaaagtggaaatgacagaaccgtataatctggtaccgattttagaaaatttaggacttactaatatattcggatattatgcagattttagcaagatgtgtaatgaaactatcactgtagaaaaatttctacatacgacgtttatagatgttaatgaggagtatacagaagcatcggccgttacaggagtatttatgactaacttttcgatggtatatcgtacgaaggtctacataaaccatccattcatgtacatgattaaagacaacacaggacgtatactttttatagggaaatactgctatccgcaataaatataaacaaatagacttttatcacgtttatctatgtctaaatattacaaatagtaatagtataaactaaagctgataatacttaaaaaaataataatatcatttacaattaatagtataaactaaaaattaaacaaatcgttattataagtaatatcaaaatgatgatatacggattaatagcgtgtcttatattcgtgacttcatccatcgctagtccactttatattcccgttattccacccattacggaagataaatcgttcaatagtgtagaggtattagtttccttgtttagagatgaccaaaaagactatacggtaacttctcagttcaataactacactatcgataccaaagactggactatcggcgtactatccacacctgatggtttggatataccattgactaatataacttattggtcacggtttactataggtcgtgcattgttcaaatcagagtctgaggatattttccaaaagaaaatgagtattctaggtgtttctatagaatgtaagaagtcgtcgacattacttacttttttgaccgtgcgtaaaatgactcgagtatttaataaatttccagatatggcttattatcgaggagactgtttaaaagccgtttatgtaacaatgacttataaaaatactaaaactggagagactgattacacgtacctctctaatggggggttgcctgcatactatcgtaatggggtcgatggttgattattgattagtatattccttattcacacaaaaagaacatttttataaacatgaaaccactgtctaaatgtaattatgatcttgatttatagatgaagatcagcctttagaggattttaaccagtatgtttaatatgaaaaaaataaacataacatattttgagattaagcgctattgtgcttaattattttgctctataaactgaatatatagccacaattattgacgggcttgtttatgaccggcaatcatgaatttacagaaattatctctggctatatatcttactgcgacatgttcgtggtgttatgaaacatgcataagaaaaactgcgttgtatcatgacattcaattggagcatgtagaagacaataaagatagtgtagcgtcgctaccgtacaagtagtcaatcaaagagaacgtagtagattgttggctacatttaattggacagatatagctgagggtgttagaaatgagttcattaaaatatgtgatatcaacggaacatatttatataattatactattgctgttagtataattattgattccacggaagaactaccaacagttactccaattacaacaacatatgaaccttctacatataattatactatcgatgatagcactgttattactactgaagaactacaagtgactcctcatatggatctccatcgatgatacatgtattaaaatactttccgaataagtcttttaaatattgtattaattatgaaaaactatgctatgcgagtatgatgcaaagatgtttaatgatacgatactagattttatctctagcgagagatgtcgttagaatcatttatcataactacgtttaataataattcatcaacgaatatcgataacatgtgtcatttatacgttaaagtctgtccgtcttctctattgtttagactgtttgtagaatgctgtgatataaacaaactagtagaaggtacgactccgttacactgttatctaatgaatgaaggatttgaatcatctgttttaaaaaacctattaaaggagtatgtcatgaatacgtttaatgttcatgacatccattacacaaatatttaactcatgatgaagttgagaatgatatgctttctgatagtatagatagctttagctaatataaaaatatattaatccactatatattctagacttgatttaaaaccgataaactactactacgtactgtataagttgttaaaaaaaggagcagaccctaattatgtagatgatagaggtaatacttttcttcattacttctgcatctatatgtccacttatgagaaaacgtcatttaataagatgcatcgtgaaaagaaatttattaaagagttggtaaaatatgaaaccgaaagtaaataatataggaaatacacctctacataactacgtatctcaatatgatatcactctcattcctcatccacaacccattaaaaaaatggaaattaaagccctctattagcataaacggctacaggtctacctttacaatggcctctccttgtgcccagttcagaccctgtcattgccacgctactaaggactccctgaataccgtggccgacgtcagacattgtctgactgaatacatcctgtgggtttctcatagatggacccatagagaaagcgcagggtctctctacaggcttctcatctctttcagaactgatgcaacggagctctttggtggtgagttgaaggattcacttccgtgggacaatatcgacaattgcgtggagatcattaaatgtttcatcagaaatgactccatgaaaaccgccgaagaacttcgtgcaatcattggactttgtactcaatcagctatcgtctctggaagagtcttcaacgataagtatatcgacatactacttatgctgcgaaagattctgaacgagaacgactatctcaccctcttggatcatatccgcactgctaaatactaaatctccttcatgctctctcactacactttttatcatcttatgaggaatgattgccttcatcatttttcgtgaaataggaataattagcaccagaatagctatggattgcacatgtattctatgtcgtctactggatgaagatgtgacgtacaaaaaaataaaactagaaattgaaacgtgtcacaacttatcaaaacatatagatagacgaggaaacaatgcgctacattgttacgtcttcaataaatgcgatacagacattaagattgttcgactgttactctctcgcggagtcgagagactttgtagaaacaacgaaggattaactccgctaggagcatacagtaagcatagatacgtaaaatctcaaattgtgcatctactgatatccagctattcgaattcctctaacgaactcaagtcgaatataaatgatttcgatctgtattcgtatatgtcttcggataatatcgacttacgtctgctaaaatacctaattgtggataaacggatacgtccgtccaagaatacgaattatgcaatcaatggtctcggattggtggatatatacgtaacgacgcctaatccgagaccagaagtattgctatggcttcttaaatcagaatgttacagcaccggttacgtatttcgtacctgtatgtacgacagtgatatgtgtaagaactctcttcattactatatatcgtctcatagagaatctcaatctctatccaaggatgtaattaaatgtttgatcaataacaatgtttccatccatggcagagacgaaggaggatctttacccatccaatactactggtcttgctcaaccatagatatagagattgttaaattattaataaaggatgtggacacgtgtagagtatacgacgtcagccctatattagaggcggattatctaaacaagcgatttagagtaaccccatataatgtagacatggaaatcgttaatcttcttattgagagacgtcatactcttgtcgacgtaatgcgtagtattacttcttacgattccagagactataaccactacatcatcgataacattctaaagagatttagacaacaggatgaatccatcgtacaagccatgttgataaactacttacattacggcgatatggtcgttcgatgcatgttagataacggacaacaactatcctctgcacgactactttgttaataataatctcgtcgatgtaaacgtcgtaaggtttatcgtggaaaataatggacacatggctgtaaatcacgtatcgaacaatggccgtctatgtatgtacggtctgatattatcgagatttaataattgcgggtatcactgttatgaaaccatactaatagatgtatttgatatactaagcaagtacatggataatatagatatgatcgataatgagaataaaactctactatattacgcggtcgatgtcaataatatacaatttgcaaagcggttattggaatatggagcgagtgttacaacatcacgctcgataatcaatacggccatccagaaaagtagttacagaagagaaaacaaaacgaggatagttgatttattacttagctaccatcccactctagagactatgattgacgcatttaatagagatatacgctatctatatcctgaaccattattcgcctgtatcagatacgccttaatcctagatgatgattttccttctaaagtaagtatgatatctccggtcgtcataaggaactaaagcgctatagagtagacattaatagaatgaagaatgcctacatatcaggcgtctccatgtttgatatattatttaaacgaagcaaacgccacagattgagatacgcaaagaatccgacatcaaatggtacaaaaaagaactaacgtccatcattacagaaactgtaaagaacaatgagaggatcgactccatagtggacaacattaatacagacgataacttgatttcgaaattacccatggagatactttattactccattaaataatttatcatggagcgataatgtcctgtttcatttgtttccatgacatattacaaaatcgattccgtccaagatgataaaaacatttaccggcatcataaacacggagtttattttatatgtctcgcataaacattactaaaaaaatatattgttcggttttctttcacatctttaattatgaaaaagtaaatcattatgagatggacgagattgtacgcatcgttcgcgacagtatgtggtacatacctaacgtatttatggacgacggtaagaatgaaggtcacgtttctgtcaacaatgtttgtcatatgtattttacgttctttgatgtggatacatcgtctcatctgtttaagctagttattaaacactgcgatctgaataaacgaggtaactctccattacattgctatacgatgaatacacgatttaatccatctgtattaaagatattgttacaccacggcatgcgtaactttgatagcaaggatgaaaaaggacatattcctctacaccactatctgattcattcactatcaatcgataacaagatctttgatatactaacggacaccattgatgactttagtaaatcatccgatctattgctgtgttatcttagatataaattcaatgggagcttaaactattacgttctgtacaaaggatccgaccctaattgcgtcgacgaggatggactcacttctcttcattactactgtaaacacatatccacgttctacaaaagcaattattacaagttaagtcacactaagatgcgagccgagaagcgattcatctacgcgataatagattatggagcaaacattaacgcggttacacacttaccttcaacagtataccaaacatagtcctcgtgtggtgtatgctcttttatctcgaggagccgatacgaggatacgtaataatcttgattgtacacccatcatggaacgattgtgcaacaggtcatattctcataatgttactcaattggcacgaacaaaaggaagaaggacaacatctactttatctattcataaaacataatcaaggatacactctcaatatactacggtatctactagataggttcgacattcagaaagacgaatactataataccgcctttcaaaattgtaacaacaatgttgcctcatacatcggatacgacatcaaccttccgactaaagacggtattcgacttggtgtttgaaaacagaaacatcatatacaaggcggatgttgtgaatgacatcatccaccacagactgaaagtatctctacctatgattaaatcgttgttctacaagatgtcagaattctctccctacgacgattactacgtaaaaaagatactagcctactgcctattaagggacgagtcattcgcggaactacatagtaaattctgtttaaacgaggactataaaagtgtatttatgaaaaatatatcattcgataagatagattccatcatcgtgacataagtcgccttaaagagattcgaatctccgacaccgacctgtatacggtatcacagctatcttaaagccatacattcggacagacacatttcatttcccatgtacgacgatctcatagaacagtgccatctatcgatggagcataaaagtaaactcgtcgacaaagcactcaataaattagagtctaccatcggtcaatctagactatcgtatttgcctccggaaattatgcgcaatatcatctaaacagtatgttgtacggaaagaaccattacaaatattatccatgatagaaagaaaatatctatatgattggagaagtaggaaacaggaacaagacgacgattactacattattaaatcatgaagtccgtattatactcgtatatattgtttctctcatgtataataataaacggaagagatatagcaccgcatgcaccatccgatggaaagtgtaaagacaacgaatacaaacgccataatttgtgtccgggaacatacgcttccagattatgcgatagcaagactaacacacgatgtacaccctgtggttcgggtaccttcacatctcgcaataatcatttacccgcttgtctaagttgtaacggaagacgcgatcgtgtaacacgactcacaatagaatctgtgaatgctctcccggatattattgtcttctcaaaggatcatccggatgcaaggcatgtgtttcccaaacaaaatgtggaataggatacggagtatccggagacgtcatctgttctccgtgtggtctcggaacatattctcacaccgtctcttccgcagataaatgcgaacccgtacccagtaatacctttaactatatcgatgtggaaattaatctgtatcccgtcaacgacacgtcgtgtactcggacgaccactaccggtctcagtgaatccatctcaacgtcggaactaactattactatgaatcataaagactgtaatcccgtatttcgtgaggaatacttctctgtccttaataaggtagcaacttcaggtttctttacaggagaaaggtgtgcactctgaatttcgagattaaatgcaataacaaagattcttcctccaaacagttaacgaaagcaaagaatgatgacggtatcatgccgcattcggagacagtaactctagtgggcgactgtatatctagcgtcgacatctatatactatatagtaataccaatactcaagactacgaaactgatacaatctcttatcatgtgggtaatgttctcgatgtcgatagccatatgcccggtagttgcgatatacataaactgatcactaattccaaacccacccgctttttatagtaagtttttcacccataaataataaatacaataattaatttctcgtaaaagtagaaaatatattctaatttattgcatggtaaggaagtagaatcataaagaacagtactcaatcaatagcaattatgaaacaatatatcgtcctggcatgcatgtgcctgccagtcttcagcaatcatcctcatcctcatcctcgtgtacggaagaagaaaacaaacatcatatgggaatcgatgttattatcaaagtcacaaagcaagaccaaacaccgaccaatgataagatttgccaatccgtaacggaaattacagagtccgagtcagatccaaatcccgaggtggaatcagaagatgattccacatcagtcgaggatgtagatcctcctaccacttattactccatcatcggtggaggtctgagaatgaactttggattcaccaaatgtcctcagattaaatccatctcagaatccgctgatggaaacacagtgaatgctagattgtccagcgtgtccccaggacaaggtaaggactctcccgcgatcactcatgaagaagctcttgctatgatcaaagactgtgaggtgtctatcgacatcagatgtagcgaagaagagaaagacagcgacatcaagacccatccagtactcgggtctaacatctctcataagaaagtgagttacgaagatatcatcggttcaacgatcgtcgatacaaaatgtgtcaagaatctagagtttagcgttcgtatcggagacatgtgcaaggaatcatctgaacttgaggtcaaggatggattcaagtatgtcgacggatcggcatctgaaggtgcaaccgatgatacttcactcatcgattcaacaaaactcaaagcgtgtgtctgaatcgataactctattcatctgaaattggatgagtagggttaatcgaacgattcaggcacaccacgaattaaaaaagtgtaccggacactatattccggtttgcaaaacaaaaatgttcttaactacattcacaaaaagttacctctcgcgacttcttctttttctgtctcaatagtgtgatacgattatgacactattcctattcctattcctatttcctttcagggtatcacaaaaatattaaacctctttctgatggtctcataaaaaaagttttacaaaaatatttttattctctttctctctttgatggtctcataaaaaaagttttacaaaaatatttttattctctttctctctttgat

SEQ ID NO: 8 - DNA, 196247 bp, Vaccinia virus
  source 1..196247: mol_type = other DNA
  misc_feature 1..196247: note = VIR41
atcaaagagagaaagagaataaaaatatttttgtaaaactttttttatgagaccatcaaagagagaaagagaataaaaatatttttgtaaaactttttttatgagaccatcagaaagaggtttaatatttttgtgataccctgaaaggaaataggaataggaataggaatagtgtcataatcgtatcacactattgagacagaaaaagaagaagtcgcgagaggtaactttttgtgaatgtagttaagaacatttttgttttgcaaaccggaatatagtgtccggtacacttttttaattcgtggtgtgcctgaatcgttcgattaaccctactcatccaatttcagatgaatagagttatcgattcagacacacgctttgagttttgttgaatcgatgagtgaagtatcatcggttgcaccttcagatgccgatccgtcgacatacttgaatccatccttgacctcaagttcagatgattccttgcacatgtctccgatacgaacgctaaactctagattcttgacacattttgtatcgacgatcgttgaaccgatgatatcttcgtaactcactttcttatgagagatgttagacccgagtactggatgggtcttgatgtcgctgtctttctcttcttcgctacatctgatgtcgatagacacctcacagtctttgatcatagcaagagcttcttcatgagtgatcgcgggagagtccttaccttgtcctggggacacgctggacaatctagcattcactgtgtttccatcagcggattctgagatggatttaatctgaggacatttggtgaatccaaagttcattctcagacctccaccgatgatggagtaataagtggtaggaggatctacatcctcgactgatgtggaatcatcttctgattccacctcgggatttggatctgactcggactctgtaatttccgttacggattggcaaatcttatcattggtcggtgtttggtcttgctttgtgactttgataataacatcgattcccatatgatgtttgttttcttcttccgtacacgaggatgaggatgaggatgattgctgaagactggcaggcacatgcatgccaggacgatatattgtttcataattgctattgattgagtactgttctttatgattctacttccttaccatgcaataaattagaatatattttctacttttacgagaaattaattattgtatttattatttatgggtgaaaaacttactataaaaagcgggtgggtttggaattagtgatcagtttatgtatatcgcaactaccgggcatatggctatcgacatcgagaacattacccacatgataagagattgtatcagtttcgtagtcttgagtattggtattactatatagtatatagatgtcgacgctagatatacagtcgcccactagagttactgtctccgaatgcggcatgataccgtcatcattctttgctttcgttaactgtttggaggaagaatctttgttattgcatttaatctcgaaattcagagtgcacacctttctcctgtaaagaaacctgaagttgctaccttattaaggacagagaagtattcctcacgaaatacgggattacagtctttatgattcatagtaatagttagttccgacgttgagatggattcactgagaccggtagtggtcgtccgagtacacgacgtgtcgttgacgggatacagattaatttccacatcgatatagttaaaggtattactgggtacgggttcgcatttatctgcggaagagacggtgtgagaatatgttccgagaccacacggagaacagatgacgtctccggatactccgtatcctattccacattttgtttgggaaacacatgccttgcatccggatgatcctttgagaagacaataatatccgggagagcattcacagattctattgtgagtcgtgttacacgatcgcgtcttccgttacaacttagacaagcgggtaaatgattattgcgagatgtgaaggtacccgaaccacagggtgtacatcgtgtgttagtcttgctatcgcataatctggaagcgtatgttcccggacacaaattatggcgtttgtattcgttgtctttacactttccatcggatggtgcatgcggtgctatatctcttccgtttattattatacatgagagaaacaatatatacgagtataatacggacttcatgatttaataatgtagtaatcgtcgtcttgttcctgtttcctacttctccaatcatatagatattttctttctatcatggataatatttgtaatggttctttccgtacaacatactgtttagatgatattgcgcataatttccggaggcaaatacgatagtctagattgaccgatggtagactctaatttattgagtgctttgtcgacgagtttacttttatgctccatcgatagatggcactgttctatgagatcgtcgtacatgggaaatgaaatgtgtctgtccgaatgtatggctttaagatagctgtgataccgtatacaggtcggtgtcggagattcgaatctctttaaggcgacttatgtcacgatgatggaatctatcttatcgaatgatatatttttcataaatacacttttatagtcctcgtttaaacagaatttactatgtagttccgcgaatgactcgtcccttaataggcagtaggctagtatcttttttacgtagtaatcgtcgtagggagagaattctgacatcttgtagaacaacgatttaatcataggtagagatactttcagtctgtggtggatgatgtcattcacaacatccgccttgtatatgatgtttctgttttcaaacaccaagtcgaataccgtctttagtcggaaggttgatgtcgtatccgatgtatgaggcaacattgttgttacaattttgaaaggcggtattatagtattcgtctttctgaatgtcgaacctatctagtagataccgtagtatattgagagtgtatccttgattatgttttatgaatagataaagtagatgttgtccttcttccttttgttcgtgccaattgagtaacattatgagaatatgacctgttgcacaatcgttccatgatgggtgtacaatcaagattattacgtatcctcgtatcggctcctcgagataaaagagcatacaccacacgaggactatgtttggtatactgttgaaggtaagtgtgtaaccgcgttaatgtttgctccataatctattatcgcgtagatgaatcgcttctcggctcgcatcttagtgtgacttaacttgtaataattgcttttgtagaacgtggatatgtgtttacagtagtaatgaagagaagtgagtccatcctcgtcgacgcaattagggtcggatcctttgtacagaacgtaatagtttaagctcccattgaatttatatctaagataacacagcaatagatcggatgatttactaaagtcatcaatggtgtccgttagtatatcaaagatcttgttatcgattgatagtgaatgaatcagatagtggtgtagaggaatatgtcctttttcatccttgctatcaaagttacgcatgccgtggtgtaacaatatctttaatacagatggattaaatcgtgtattcatcgtatagcaatgtaatggagagttacctcgtttattcagatcgcagtgtttaataactagcttaaacagatgagacgatgtatccacatcaaagaacgtaaaatacatatgacaaacattgttgacagaaacgtgaccttcattcttaccgtcgtccataaatacgttaggtatgtaccacatactgtcgcgaacgatgcgtacaatctcgtccatctcataatgatttactttttcataattaaagatgtgaaagaaaaccgaacaatatatttttttagtaatgtttatgcgagacatataaaataaactccgtgtttatgatgccggtaaatgtttttatcatcttggacggaatcgattttgtaatatgtcatggaaacaaatgaaacaggacattatcgctccatgataaattatttaatggagtaataaagtatctccatgggtaatttcgaaatcaagttatcgtctgtattaatgttgtccactatggagtcgatcctctcattgttctttacagtttctgtaatgatggacgttagttcttttttgtaccatttgatgtcggattctttgcgtatctcaatctgtggcgtttgcttcgtttaaataatatatcaaacatggagacgcctgatatgtaggcattcttcattctattaatgtctactctatagcgctttagttccttatgacgaccggagatatcatacttactttagaaggaaaatcatcatctaggattaaggcgtatctgatacaggcgaataatggttcaggatatagatagcgtatatctctattaaatgcgtcaatcatagtctctagagtgggatggtagctaagtaataaatcaactatcctcgttttgttttctcttctgtaactacttttctggatggccgtattgattatcgagcgtgatgttgtaacactcgctccatattccaataaccgctttgcaaattgtatattattgacatcgaccgcgtaatatagtagagttttattctcattatcgatcatatctatattatccatgtacttgcttagtatatcaaatacatctattagtatggtttcataacagtgatacccgcaattattaaatctcgataatatcagaccgtacatacatagacggccattgttcgatacgtgatttacagccatgtgtccattattttccacgataaaccttacgacgtttacatcgacgagattattattaacaaagtagtcgtgcagaggatagttgttgtccgttatctaacatgcatcgaacgaccatatcgccgtaatgtaagtagtttatcaacatggcttgtacgatggattcatcctgttgtctaaatctctttagaatgttatcgatgatgtagtggttatagtctctggaatcgtaagaagtaatactacgcattacgtcgacaagagtatgacgtctctcaataagaagattaacgatttccatgtctacattatatggggttactctaaatcgcttgtttagataatccgcctctaatatagggctgacgtcgtatactctacacgtgtccacatcctttattaataatttaacaatctctatatctatggttgagcaagaccagtagtattggatgggtaaagatcctccttcgtctctgccatggatggaaacattgttattgatcaaacatttaattacatccttggatagagattgagattctctatgagacgatatatagtaatgaagagagttcttacacatatcactgtcgtacatacaggtacgaaatacgtaaccggtgctgtaacattctgatttaagaagccatagcaatacttctggtctcggattaggcgtcgttacgtatatatccaccaatccgagaccattgattgcataattcgtattcttggacggacgtatccgtttatccacaattaggtattttagcagacgtaagtcgatattatccgaagacatatacgaatacagatcgaaatcatttatattcgacttgagttcgttagaggaattcgaatagctggatatcagtagatgcacaatttgagattttacgtatctatgcttactgtatgctcctagcggagttaatccttcgttgtttctacaaagtctctcgactccgcgagagagtaacagtcgaacaatcttaatgtctgtatcgcatttattgaagacgtaacaatgtagcgcattgtttcctcgtctatctatatgttttgataagttgtgacacgtttcaatttctagttttatttttttgtacgtcacatcttcatccagtagacgacatagaatacatgtgcaatccatagctattctggtgctaattattcctatttcacgaaaaatgatgaaggcaatcattcctcataagatgataaaaagtgtagtgagagagcatgaaggagatttagtatttagcagtgcggatatgatccaagagggtgagatagtcgttctcgttcagaatctttcgcagcataagtagtatgtcgatatacttatcgttgaagactcttccagagacgatagctgattgagtacaaagtccaatgattgcacgaagttcttcggcggttttcatggagtcatttctgatgaaacatttaatgatctccacgcaattgtcgatattgtcccacggaagtgaatccttcaactcaccaccaaagagctccgttgcatcagttctgaaagagatgagaagcctgtagagagaccctgcgctttctctatgggtccatctatgagaaacccacaggatgtattcagtcagacaatgtctgacgtcggccacggtattcagggagtccttagtagcgtggcaatgacagggtctgaactgggcacaaggagaggccattgtaaaggtagacctgtagccgtttatgctaatagagggctttaatttccatttttttaatgggttgtggatgaggaatgagagtgatatcatattgagatacgtagttatgtagaggtgtatttcctatattatttactttcggtttcatattttaccaactctttaataaatttcttttcacgatgcatcttattaaatgacgttttctcataagtggacatatagatgcagaagtaatgaagaaaagtattacctctatcatctacataattagggtctgctcctttttttaacaacttatacagtacgtagtagtagtttatcggttttaaatcaagtctagaatatatagtggattaatatatttttatattagctaaagctatctatactatcagaaagcatatcattctcaacttcatcatgagttaaatatttgtgtaatggatgtcatgaacattaaacgtattcatgacatactcctttaataggttttttaaaacagatgattcaaatccttcattcattagataacagtgtaacggagtcgtaccttctactagtttgtttatatcacagcattctacaaacagtctaaacaatagagaagacggacagactttaacgtataaatgacacatgttatcgatattcgttgatgaattattattaaacgtagttatgataaatgattctaacgacatctctcgctagagataaaatctagtatcgtatcattaaacatctttgcatcatactcgcatagcatagtttttcataattaatacaatatttaaaagacttattcggaaagtattttaatacatgtatcatcgatggagatccatatgaggagtcacttgtagttcttcagtagtaataacagtgctatcatcgatagtataattatatgtagaaggttcatatgttgttgtaattggagtaactgttggtagttcttccgtggaatcaataattatactaacagcaatagtataattatataaatatgttccgttgatatcacatattttaatgaactcatttctaacaccctcagctatatctgtccaattaaatgtagccaacaatctactacgttctctttgattgactacttgtacggtagcgacgctacactatctttattgtcttctacatgctccaattgaatgtcatgatacaacgcagtttttcttatgcatgtttcataacaccacgaacatgtcgcagtaagatatatagccagagataatttctgtaaattcatgattgccggtcataaacaagcccgtcaataattgtggctatatattcagtttatagagcaaaataattaagcacaatagcgcttaatctcaaaatatgttatgtttatttttttcatattaaacatactggttaaaatcctctaaaggctgatcttcatctataaatcaagatcataattacatttagacagtggtttcatgtttataaaaatgttctttttgtgtgaataaggaatatactaatcaataatcaaccatcgaccccattacgatagtatgcaggcaaccccccattagagaggtacgtgtaatcagtctctccagttttagtatttttataagtcattgttacataaacggcttttaaacagtctcctcgataataagccatatctggaaatttattaaatactcgagtcattttacgcacggtcaaaaaagtaagtaatgtcgacgacttcttacattctatagaaacacctagaatactcattttcttttggaaaatatcctcagactctgatttgaacaatgcacgacctatagtaaaccgtgaccaataagttatattagtcaatggtatatccaaaccatcaggtgtggatagtacgccgatagtccagtctttggtatcgatagtgtagttattgaactgagaagttaccgtatagtctttttggtcatctctaaacaaggaaactaatacctctacactattgaacgatttatcttccgtaatgggtggaataacgggaatataaagtggactagcgatggatgaagtcacgaatataagacacgctattaatccgtatatcatcattttgatattacttataataacgatttgtttaatttttagtttatactattaattgtaaatgatattattatttttttaagtattatcagctttagtttatactattactatttgtaatatttagacatagataaacgtgataaaagtctatttgtttatatttattgcggatagcagtatttccctataaaaagtatacgtcctgtgttgtctttaatcatgtacatgaatggatggtttatgtagaccttcgtacgatataccatcgaaaagttagtcataaatactcctgtaacggccgatgcttctgtatactcctcattaacatctataaacgtcgtatgtagaaatttttctacagtgatagtttcattacacatcttgctaaaatctgcataatatccgaatatattagtaagtcctaaattttctaaaatcggtaccagattatacggttctgtcatttccactttaaactttggcatatacaagtctatacttttagtagataacataccacaccattttttaaatttttcatctgttatatttttttctatgttatatataccttctatgtcgtccggtagtataattaccatactagagtttccctcgtatggaatatcgataatagagaatcctccgaataattcattaatatgtacatattgcaagttattctcggtacccaccatcatatcaacactggtaactatattcttagaaatataaaacttgtctgtatatgtaagatgtttagaaaatggatatttccacattgctttaaaatggacggcgctaacaactgtcatacgagtattaatggatagcggactagtcaataaggaattaattttaccatttgtcatcgtcttaacccattcgttgattagttcctttgtttggttagcattattaaagtttacagtttgaaaatcgtcttttattttttgtaggaaggaggcgtggaactcgatactatcgctaccgtatattttatttgcggtagctagtgtcgcacaatacggaatatctacgtccatgtcattattgtcatccttcttatcatcgggtgtattctcattcatattctctatatattttgatagttgttcagctgtagaaccagctgctccatgatttagaatagataaagtagataaaatagaaactggagaaatcaaaacattttcatcagggtgttttaagattagttctttaaagatatccatggtatagaccaaacaataacgataacgatatatatcataaataaataatgttaaatttcagtttatgtttgtaccccgtattcatacttaacaaattggtattgcgtacacaatcaatcatattacataccattaataatgcaagcataaaaaatcgttagtagatgtttctaaatataggttccgtaagcaaagaatataagaatgaagcggtaatgataaaatcaatcgttatctaaaatgatcatactcatttattttattctattatattaacacatacatttttaacagcaacacattcaatattgtattgttatttttatattatttacacaattaacaatatattattagtttatattactgaattaataatataaaattcccaatcttgtcataaacacacactgagaaacagcataaacacaaaatccatcaaaaatgtcgatgaaatatctgatgttgttgttcgctgctatgataatcagatcattcgccgatagtggtaacgctatcgaaacgacattgccagaaattacaaacgctacaacagatattccagctatcagattatgcggtccagagggagatggatattgtttacacggtgactgtatccacgctagagatatcgacggtatgtattgtagatgctctcatggttatacaggcattagatgtcagcatgtagtattagtagactatcaacgttcagaaaaaccaaacactacaacgtcatatatcccatctcccggtattgtgcttgtattagtaggcattattattatgtgttgtctattatctgtttataggttcactcgaagaactaataaactacctctacaagatatggttgtgccataatttttataaatttttttatgagtatttttacaaaaaaaatgtataaagtgtatgtcttatgtatatttataaaaatgctaagtatgcgatgtatctatgttatttgtatttatctaaacaatacctctacctctagatattatacaaaaattttttatttcggcatattaaagtaaaatctagttaccttgaaaatgaatacagtgggtggttccgtatcaccagtaagaacataatagtcgaatacagtatccgattgagattttgcatacaatactagtctagaaagaaatttgtaatcattttctgtgacgggagtccatatatctgtatcatcgtctagtttatcagtgtcccatgctatatttctgttatcatcattagttaatgaaaataactctcgtgcttcagaaaagtcaaatattgtatccatacatacatctccaaaactatcgcttatacgtttatctttaacgatacctatacctagatggttatttactaacagacattttccagatctattgactataactcctatagtttccacatcaaccaagtaatgatcatctattgttatataacaataacataactcttttccatttttatcagtatgtatatctatatcaacgtcgtcgttgtagtgaatagtagtcattgatctattatatgaaacggatatgtctagaacggcaattgtcttacgtccagttaacactttcgttgatttaaagtctagagtctttgcaaacataatatccttatccgactttatatttcctgtagggtggtataattttattttgcctccacatatcggtgtttccaaatatattactagacaatattccatatagttattagttaagggtacccaattagaacacgtacgcttattatcatcatttggatcgtatttcataaaagttattgtactatcgatgtcaacacattctacattttttaatcgtctatatagtatttttctgatattttctataatatcagaattgtcttccatcggaagttgtatactatcggaatcagttacatgtttaaataattctctgatgtcattccttatacaatcaaattcattattaaacagtttaatagtctgtagacctttatcgtcgtaaatatccattgtcttattagttacgcttatttttatgtgttttacgttgctttattatattttataagaatgattgtttgacgaatcacgagaactattaagacacattattaggtatatattataaaaaagtttttgattacgatgttataagaggaaagaggacacattaacatcatacatcaattaactacattcttataacatcgtaatcaaaagaattgcaattttgatgtataacaactgtcaatgggttatggaattgtatattacatattatacggtatgttggtaacgacaaataccgatcggtaatcgtttgccggtgtaatagaattatatatatctatctattacaccggctgagtatacataataataagttgtggtagtatgatctccatatttataatttaggactttgtattcagtatttttggaatcataaaaaataaaaaaaagttttactaatttaaaatttaaaaagtatttacatttttttcactgtttagtcgcggatatggaattcgatcctgccaaaatcaatacatcatctatagatcatgtaacaatattacaatacatagatgaaccaaatgatataagactaacagtatgcattatccgaaatattaataacattacatattatatcaatatcacaaaaataaatacacatttggctaatcaatttcgggcttggaaaaaacgtatcgccggaagggactatatgactaacttatctagagatacaggaatacaacaatcaaaacttactgaaactatacgtaactgtcaaaaaaatagaaacatatatggtctatatatacactacaatttagttattaatgtggttattgattggataaccgatgtgattgttcaatcaatattaagagggttggtaaattggtacatagctaataatacctatactccaaatacacccaataatacaacaaccatttctgagttggatatcatcaaaatactaaataaatacgaggacgtgtatagagtaagtaaagaaaaagaatgtggaatttgctatgaagttgtttactcaaaacgattagaaaacgatagatactttggtttattggattcgtgtactcatatattttgcataacatgcatcaatatatggcataaaacacgaagagaaaccggtgcgtcggataattgtcctatatgtcgtacccgttttagaaacataacaatgagcaagttctataagctagttaactaataaataaaaagtttaatttgttgacgacgtatgtcgttattttttctcgtataaaagattaatttgattctaatataatctttagtattggataaatatcaattcaaattaattccattagattatatcataaataaaaatagtagcacgcactacttcagccaaatattcttttttgaaacgccatctatcgtagtgaggacacaagtgaacctataatgagcaaatttattagtatcggttacatgaaggactttacgtagagtggtgattccactatctgtggtacgaacggtttcatcttctttgatgccatcacccagatgttctataaacttggtatcctcgtccgatttcatatcctttgccaaccaatacatatagctaaactcaggcatatgttccacacatcctgaacaatgaaattctccagaagatgttacaatgtctagatttggacatttggtttcaaccgcgttaacatatgagtgaacacacccatacatgaaagcgatgagaaataggattttcatcttgccaaaatatcactagaaaaaatttatttatcaattttaaaggtataaaaaatacttattgttgctcgaatattttgtatttgatggtatacggaagattagaaatgtaggtattatcatcaactgattctatggttttatgtattctatcatgtttcactattgcgttggaaataatatcatatgcttccacatatattttattttgttttaactcataatactcacgtaattctggattattggcatatctgtgaataattttagctccatgatcagtaaatattaatgagaacatagtattaccacctaccattatttttttcatttcgttcaattcttgattgcaaagatctatataatcattatagcgttgacttatggactctggaatcttagacgatgtacagtcatctataatcatggcatatttaatacattgttttatagcatagtagttatctacgatgttagatatttctctcaatgaatcaatcacacaatctaatgtaggtttatgacataatagcattttcagcagttcaatgtttctagattcgttgatggcaatggctatacatgtatatccgttatttgatctaatgttgacatctgaaccggattctagcagtaaagatactagagattgtttattatatctaacagccttgtgaagaagtgtttctcctcgtttgtcaatcatgttaatgtctttaagataaggtaggcaaatgtttatagtactaagaattgggcaagcataagacatgtcacaaagaccctttttgtatgtataagtgtagaaattataacatccatagttggatttacataggtgtccaatcgggatctctccatcatcgagatgattgacggcatctcccccttccttttttagtagatatttcatcgtgtaagaatcaatattaatatttctaaagtatccgtgtatagcctctttatttaccacagctccatattccaacatgcattccactaaagggatatcgatatcgccgaatgtcatatactcaattagtatatgttggaggacatccgagttcattgttttcaatatcaaagagatggtttccttatcatttctccatagtggtacaatactacacattattccgtgaggctttccattctccaaaaacaatttgaccaaatctacatctttattgtatctataatcactatttagataatcagccataattcctcgagtgcaacatgttagatcgtctatatatgaataagccgtgttatctattcctttcattaacaatttaacgatgtctatatctatatgagatgacttaatataatattgaagagctgtacaatagtttttatctatagaagacggcttgattccgtgattaattagacatttaacaacttccggacgcacatatgctctcgtatccgactctgaatacagatgagagatgatatacagatgcaatacggtaccgcaatttcgtagttgataatcatcatacgcgtatccgtactcgtcctcataaagaacactgcagccattttctatgaacaaatcaataattttaggaacaggatcattgtcattacataattttctataactgaacgatggttttcacatttaacactcaagtcaaatccatgttctaccaacacctttatcaagtcaacgtctacatttttggatttcatatagctgaatatattaaagtcatttatgttgctaaatccagtggcttctagtagagccatcgctatatcctttaactttaacatgtctactatttgtgtattcttctaatggggtagctgtctccaatttttgcgtaatggattagtgccactgtctagtagtagtttgacgacctcgacattattacaatgctcattaaaaaggtatgcgtgtaaagcattattcttgaattggttcctggtatcattaggatctctgtctctcaacatctgtttaagttcatcgagagccacctcctcattttccaaatagtcaaacattttgactgaatagaagtgaatgagctactgtgaactctatacacccacacaactaatgtcattaaatattatttttttgaatgtatttataccatgtcaaaaacttgtacaattattaataaaaataatttagtgtttaaattttaccagttccagattttacacctccgttaaccccactttttacaccactggacgaccctcctccccacattccaccgccaccagatgtataagttttagatcctttattactaccatcatgtccatggataaagacactccacatgccgccactaccccctttagaagacatattaataagacttaagagttaaggacaagtttaacaataaaattaatcacgagtaccctactaccaacctacactattatatgattatagtttctatttttacagtaccttaactaaagtttctagtcacaagagcaatactaccaacctacactattatatgattatagtttctatttttataggaacgcgtacgagaaaatcaaatgtctaatttctaacggtagtgttgataaacgattatcgtcaatggatacctcctctatcatgtcgtctattttcttactttgttctattaacttattagcattatatattatttgattataaaacttatattgcttattagcccaatctgtaaatatcggattattaacatatcgtttctttgtaggtttatttaacttgtacatcactgtaagcatgtccgtaccatttattttaatttgacgcatatccgcaatttctttttcgcagtcggttataaattctatatatgatggatacatgctacatgtgtacttataatcgactaatatgaagtacttgatacatattttcagtaacgatttattattaccacctatgaataagtacctgtgatcgtctaggtaatcaactgttttcttaatacattcgatggttggtaatttactcagaataatttccaatatcttaatatataattctgctatttctggaatatatttatctgccagtataacacaaatagtaatacatgtaaacccatattttgttattatattaatgtctgcgccattatctattaaccattctactaggctgacactatgcgacttaatacaatgataaagtatactacatccatgtttatctattttgtttatatcatcaatatacggcttacaaagttttagtatcgataacacatccaactcacgcatagagaaggtagggaataatggcataatatttattaggttatcatcattgtcattatctacaactaagtttccattttttaaaatatactcgacaactttaggatctctattgccaaatttttgaaaatatttatttatatgcttaaatctatataatgtagctccttcatcaatcatacatttaataacattgatgtatactgtatgataagatacatattctaacaatagatcttgtatagaatctgtatatcttttaagaattgtggatattaggatattattacgtaaactattacacaattctaaaatataaaacgtatcacggtcgaataatagttgatcaactatataattatcgattttgtgatttttcttcctaaactgtttacgtaaatagttagatagaatattcattagttcatgaccactatagttactatcgaataacgcgtcaaatatttcccgtttaatatcgcatttgtcaagataataatagagtgtggtatgttcacgataagtataataacgcatctctttttcgtgtgaaattaaatagtttatcacgtccaaagatgtagcataaccatcttgtgacctagtaataatataataatagagaactgttttacccattctatcatcataatcagtggtgtagtcgtaatcgtaatcgtctaattcatcatcccaattataatattcaccagcacgtctaatctgttctattttgatcttgtatccatactgtatgttgctacatgtaggtattcctttatccaataatagtttaaacacatctacattgggatttgatgttgtagcgtatttctctacaatattaataccatttttgatactatttatttctatacctttcgaaattagtaatttcaataagtctatatcgatgttatcagaacatagatattcgaatatatcaaaatcattgatatttttatagtcgactgacgacaataacaaaatcacaacatcgtttttgatattattatttttcttggtaacgtatgcctttaatggagtttcaccatcatactcatataatggatttgcaccactttctatcaatgattgtgcactgctggcatcgatgttaaatgttttacaactatcatagagtatcttatcgttaaccatgattggttgttgatgctatcgcattttttggtttctttcatttcagttatgtatggatttagcacgtttgggaagcataagctcatatgatttcagtactgtagtgtcagtactattagtttcgatcagatcaatgtctagatctatagaatcaaaacacgataggtcagaagataatgaatatctgtaggcttcttgttgtactgtaacttctcgttttgttagatggttgcatcgtgctttaacatcaatggtacaaattttatcctcgctttgtgtatcatattcgtccctactataaaattgtatattcagattatcatgagatgtgtatacgctaacggtatcaataaacggagcacaccatttagtcataaccgtaatccaaaaatttttaaagtatatcttaacgaaagaagttgtgtcattgtctacggtgtatggtactagatcctcataagtgtatatatctagagtaatgtttaatttatcaaatggttgataatatggatcctcatggcaatttcctaagacgaaaataagacataaacacgcaataaatctaattgcggacatggttactccttaaaaaaatactaataatcaccttggctatttagtaagtgtcatttaacactatactcatattaatccatggactcataatctctatacgggattaacggatgttctatatacggggatgagtagttctcttctttaactttatactttttactaatcatatttagactgatgtatgggtaatagtgtttgaagagctcgttctcatcatcagaataaatcaatatctctgtttttttgttatacagatgtattacagcctcatatattacgtaatagaacgtgtcatctaccttattaactttcaccgcatagttgtttgcaaatacggttaatcctttgacctcgtcgatttccgaccaatctgggcgtataatgaatctaaactttaatttcttgtaatcattcgaaataatttttagtttgcatccgtagttatcccctttatgtaactgtaaatttctcaacgcgatatctccattaataatgatgtcgaattcgtgctgtatacccatactgaatggatgaacgaataccgacggcgttaatagtaatttactttttcatctttacatattgggtactagttttactatcataagtttataaattccacaagctactatggaataagccaaccatcttagtataacacacatgtcttaaagtttattaattaattacatgttgttttatatatcgctacgaatttaaacagagaaatcagtttaggaaaaaaaattatctatctacatcatcacgtctctgtattctacgatagagtgctactttaagatgagacatatccgtgtcatcaaaaatatactccattaaaatgattattccggcagcgaacttgatattggatatatcacaacctttgttaatatctacgacaatagacagcagtcccatggttccataaacagtgagtttatctttctttgaagagatattttgtagagatcttataaaactgtcgaatgacatcgcatttatatctttagctaaatcgtatatgttaccatcgtaatatctaaccgcgtctatcttaaacgtttccatcgctttaaagacgtttccgatagatggtctcatttcatcagtcatactgagccaacaaatataatcgtgtataacatctttgatagaatcagactctaaagaaaacgaatcggctttattatacgcattcatgataaacttaatgaaaaatgtttttcgttgtttaagttggatgaatagtatgtcttaataattgttattatttcattaattaatatttagtaacgagtacactctataaaaacgagaatgacataactaatcataactagttatcaaagtgtctaggacgcgtaattttcatatggtatagatcctgtaagcattgtctgtattctggagctattttctctatcgcattagtgagttcagaatatgttataaatttaaatcgaataacgaacataactttagtaaagtcgtctatattaactcttttattttctagccatcgtaataccatgtttaagatagtatattctctagttactacgatctcatcgttgtctagaatatcacatactgaatctacatccaattttagaaattggtctgtgttacatatctcttctatattattgttgatgtattgtcgtagaaaactattacgtagaccattttctttataaaacgaatatatagtactccaattatctttaccgatatatttgcacacataatccattctctcaatcactacatctttaagattttcgttgttaagatatttggctaaactatataattctattagatcatcaacagaatcagtatatatttttctagatccaaagacgaactctttggcgtcctctataatattcccagaaaagatattttcgtgttttagtttatcgagatctgatctgttcatatacgccatgattgtacggtacgttatgataaccgcataaaataaaaatccattttcatttttaaccaatactattcataattgagattgatgtaatactttgttactttgaacgtaaagacagtacacggatccgtatctccaacaagcacgtagtaatcaaatttggtgttgttaaacttcgcaatatttatcaatttagatagaaacttatactcatcatctgttttaggaatccatgtattattaccactttccaacttatcattatcccaggctatgtttcgtccatcatcgttgcgcagagtgaataattcttttgtattcggtagttcaaatatataatccatgcatagatcggtaaagctattgtagatgtgatttttcctaaatctaatataaaactcgtttactagcaaacactttcctgatttatcgaccaagacacatatggtttctaaatctatcaagtggtggggatccatagttatgacgcagtaacatagattattaccttcttaactgtcgctaatatctatatatttattgttatcgtattggattctgcatatagatggcttgtatgtcaaagatatagaacacataaccaatttatagtcgcgctttacattctcgaatctaaagttaagagatttagaaaacattatatcctcggatgatgttatcactgtttctggagtaggatatattaaagtctttacagatttcgtccgattcaaataaatcactaaataatatcccacattatcatctgttagagtagtatcattaaatctattatattttatgaaagatatatcactgctcacctctatatttcgtacatttttaaactgtttgtataatatctctctgatacaatcagatatatctattgtgtcggtagacgataccgttacatttgaattaatggtgttccattttacaacttttaacaagttgaccaattcatttctaatagtatcaaacgctccatgattaaatattttaatagtatccattttatatcactacggacacaaagtagctgacataaaccattgtataatttttatgttttatgtttattagcgtacacattttggaagttccggcttccatgtatttcctggagagcaagtagatgatgaggaaccagataggttatatccgtacttgcacttaaagtttacattgtcgttgtatgagtatgatcttttaaacccgctagacaagtatccgtttgatattgtaggatgtggacatttaacaatctgacacgtgggtggatcggaccattctcctcctgaacacaggacaccagagttaccaatcaacgaatatccactattgcaactataagttacaacgcttccatcggtataaaaatcctcgtatccgttatgtcttccgttggatatagatggaggggattggcatttaacagattcacaaataggtgcctcgggattccataccatagatccagtagatcctaattcacaatacgatttagattcaccgatcaaatgatatccgctattacaagagtacgttatactagagccaaagtctactccgccaatatcaagttggccattatcgatatctcgaggcgatgggcatctccgtttaatacattgattaaagagtgtccatccagtacctgtacatttagcatatataggtcccattttttgctttctgtatccaggtagacatagatattctatagtgtctcctatgttgtaattagcattagcatcagtctccacactattcttaaatttcatattaatgggtcgtgacggaatagtacagcatgatagaacgcatcctattcccaacaatgtcaggaacgtcacgctctccaccttcatatttatttatccgtaaaaatgttatcctggacatcgtacaaataataaaaagcccatatatgttcgctattgtagaaattgtttttcacagttgctcaaaaacgatggcagtgacttatgagttacgttacactttggagtctcatctttagtaaacatatcataatattcgatattacgagttgacatatcgaacaaattccaagtatttgattttggataatattcgtattttgcatctgctataattaagatataatcaccgcaagaacacacgaacatctttcctacatggttaaagtacatgtacaattctatccatttgtcttccttaactatatatttgtatagataattacgagtctcgtgagtaattccagtaattacatagatgtcgccgtcgtactctacagcataaactatactatgatgtctaggcatgggagacttttttatccaacgatttttagtgaaacattccacatcgtttaatactacatatttttcatacgtggtataaactccacccattacatatatatcatcgtttacgaataccgacgcgcctgaatatctaggagtaattaagtttggaagtcttatccatttcgaagtgccgtgtttcaaatattctgccacacccgttgaaatagaaaattctaatcctcctattacatataactttccattgttaacacaagtactaacttctgattttaacgacgacatattagtaaccgttttccattttttcgtttcaagatctacccgcgatacggaataaacatgtctattgttaatcatgccgccaataatgtatagacaattatgtaaaacatttgcattatagaattgtctatctgtattaccgactatcgtccaatattctgttctaggagagtaatgggttattgtggatatataatcagagtttttaatgactactatattatgttttataccatttcgtgtcactggctttgtagatttggatatagttaatcccaacaatgatatagcattgcgcatagtattagtcataaacttgggatgtaaaatgttgatgatatctacatcgtttggatttttatgtatccactttaataatatcatagctgtaacatcctcatgatttacgttaacgtcttcgtgggataagatagttgtcagttcatcctttgataattttccaaattctggatcggatgtcaccgcagtaatattgttgattatttctgacatcgacgcattatatagttttttaattccatatcttttagaaaagttaaacatccttatacaatttgtggaattaatattatgaatcatagtttttacacatagatctactacaggcggaacatcaattattatggcagcaactagtatcatttctacattgtttatggtgatgtttatcttcttccagcgcatatagtctaatagcgattcaaacgcgtgatagtttataccattcaatataatcgcttcatcctttagatggtgatcctgaatgcgtttaaaaaaattatacggagatgccgtaataatttccttattcacttgtataatttccccattgatagaaaatatcacgctttccattcttgaagtactataagtaattatagtataatgtaaaggtttatatattcaatattttttataaaaaaatcatttcgacattaattcctttttaaatttccgtctatcatctatagaaacatattctatgaatttataaaatgcttttacgtgtcctatcgtaggcgatagaaccgctaaaaagcctattgaatttctacaaaagaatctattatatggtatagggagagtataaaacattaaatgcccgtacttattaaagtattcagtagccaatcctaactctttcgaatacttattaatggctcttgttctgtacgaatctatttttttgaacaacggacctagtggtatatcttgttctatgtatctaaaataatgtctgactagatccgttagtttaatatcctcagtcatcttgtctagaatggcaaatctaactgcgggtttaggctttagtttagtttttatatctacatctatgtctttatctaacaccaaaaatataatagctaatattttattacaatcatccggatattcttctacgatctcactaactaatgtttctttggttatactagtatagtcactatcggacaaataaagaaaatcagatgatcgatgaataatacatttaaattcatcatctgtaagatttttgagatgtctcattaaaatattattagggtcagtactcattatcattaggcagctattacttattttattatttttcaccatatagatcaatcattagatcatcaaaatatgtttcaatcatcctaaagagtatggtgaatgactcttcccatctaatttctgaacgttcaccaatgtctctagccactttggcactaatagcgatcattcgcttagcgtcttctatattattaactggttgattcaatctatctagcaatggaccgtcggacagcgtcattctcatgttcttaatcaatgtacatacatcgccgtcatctaccaattcatccaacaacataagctttttaaaatcatcattataataggtttgatcgttgtcatttctccaaagaatatatctaataagtagagtcctcatgcttagtaatttaactattttagttaacaactattttttatgttaaatcaattagtacaccgctatgtttaatacttattcatattttagtttttaggattgagaatcaatacaaaaattaatgcatcattaattttagaaatacttagtttccacgtagttaatgaaacatttgaactcatcgtacaagacgttctcgtacaggacgtaactataaaccggtttatatttgttcaagatagatacaaatccgataactttttttacgaattctacgggatccactttaaaagtgtcataccgggttctttttatttttttaaacagatcaatggtgtgatgttgattaggtcttttacgaatttgatatagaatagcgtttacatattctccataatggtcaatcgccatttgttcgtatgtcataaattctttaattatatgacactgtgtattgtttagttcatccttgttcattgttaggaatctatccaaaatggcaattatactagaactataggtgcgttgtatacacatattgatgtgtctgtttatacaatccatgatatttggatccatgctactaccttcgggtaaaattgtagcatcatataccatttctagtactttaggttcattattatccattgcagaggacgtcatgatcgcatcctaaaaaaatatattatttttatgttattttgttaaaaataatcatcgaatacttcgtaagatactccttcatgaacataatcagttacaaaacgtttatatgaagtaaagtatctacgatttttacaaaagtccggatgcataagtacaaagtacgcgataaacggaataataatagatttatctagtctatctttttctatagctttcatagttagatacatggtctcagaagtaggattatgtaacatcagcttcgataaaatgactgggttatttagtcttacacattcgctcatacatgtatgaccgttaactacagagtctacactaaaatgattgaacaatagatagtctaccattgtttcgtattcagatagtacagcgtagtacatggcatcttcacaaattatatcattgtctaatagatatttgacgcatcttatggatcccacttcaacagccatcttaaaatcggtaaaatcatattgctttcctttatcattaataatttctaaaacatcatctctatcataaaagatacaaatattaactgtttgatccgtaataacattgctagtcgatagcaatttgttaataagatgcgctgggctcaatgtcttaataagaagtgtaagaggactatctccgaatttgttttgtttattaacatccgttgatggaagtaaaagatctataatgtctacattcttgactgttttagagcatacaatatggagaggtgtatttccatcatgatctggttttgagggactaattcctagtttcatcatccatgagattgtagaagcttttggattgtctgacataagatgtctatgaatatgatttttgccaaatttatccactatcctggcttcgaatccgatggacattatttttttaaacactctttctgaaggatctgtacacgccaacaacggaccacatccttcttcatcaaccgagttgttaatcttggctccatactgtaccaataaatttattctctctatgacttcatcatctgttcccgagagataatatagaggcgttttatgctgtttatcacacgcgtttggatctgcgccgtgcgtcagcagcatcgcgactattctattattattaattttagaagctatatgcaatggataatttccatcatcatccgtctcatttggagagtatcctctatgaagaagttcttcgacaaatcgttcatctagtcctttaattccacaatacgcatgtagaatgtgataattatttccagaaggttcgatagcttgtagcatattcctaaatacatctaaatttttactattatatttggcataaagagatagataatactcggccgacataatgttgtccattgtagtataaaaattaatatttctatttctatttctgtatatttgcaacaatttactctctataacaaatatcataacttagttcttttatgtcaagaaggcactggtttagttcatctataaatgtcacgccataactaccacgcatgctatactcagaattatgataaagatatttatccttggggtgtaggtaatggggattaatctttgttggatcagtctctaagttaacacatgtcacacatgatccatttatagttatatcacacgatgatgatttatgaattgattccggaagatcgctatcgtattttgtggttccacaattcatttccatacatgttattgtcacactaatattatgatgaactttatctagccgctgagtggtaaacaacagaacagatagtttattatctttaccaacaccctcagccgctgccacaaatctctgatccgtatccatgatggtcatgtttatttctagtccgtatccagtcaacactatgttagcatttctgtcgatatagctttcactcatatgacactcaccaataatagtagaattaatgtcgtaatttacaccaatagtgagttcggcggcaaagtaccaataccggtaatcttgtcgaggaggacatatagtattcttgtattctaccgaatacccgagagatgcgatacaaaagagcaagactaatttgtaaaccatcttactcaaaatatgtaacaatagtacgatgcaatgagtaagacaataggaaatctatcttatatacacataattattctatcaattttaccaattagttagtgtaatgttaacaaaaatgtgggagaatctaattagtttttctttacacaattgacgtacatgagtctgagttccttgtttttgctaattatttcatccaatttattattcttgactatatcgagatcttttgtataggagtcagacttgtattcaacatgcttttctataatcattttagctatttcggcatcatccaatagtacattttccagattagcagaatagatattaatgtcgtatttgaacagagcctgtaacatctcaatgtctttattatctatagccaatttaatgtccggaatgaagagaagggaattattggtgtttgtcgacgtcatatagtcgagcaagagaatcatcatatccacgtgtccattttttatagtggtgtgaatacaactaaggagaatagccagatcaaaagtagatggtatttctgaaagaaagtatgatacaatacttacatcattaagcatgacggcatgataaaatgaagttttccatccagttttcccatagaacatcagtctccaatttttcttaacaaacagttttaccgtttgcatgttaccactatcaaccgcataatacaatgcagtgtttcccttgtcatcaaattgtgaatcatccagtccactgaatagcaaaatctttactattttggtatcttccaatgtggctgcctgatgtaatggaaattcattctctagaagatttttcaatgctccagcgttcaacaacgtacatactagacgcacgttattatcagctattgcataatacaaggcactatgtccatggacatccgccttaaatgtatctttactagagagaaagcttttcagctgcttagacttccaagtattaattcgtgacagatccatgtctgaaacgagacgctaattagtgtatattttttcattttttataattttgtcatattgcaccagaattaataatatctctaatagatctgattagtagatacatggctatcgcaaaacaacatatacacatttaataaaaataatatttattaagaaaattcagatttcacgtacccatcaatataaataaaataatgattccttacaccgtacccatattaaggagattccaccttacccataaacaatataaatccagtaatatcatgtctaatgatgaacacaaatggtgtattaaattccagtttttcaggagatgatctcgccgtagctaccataatagtagatgcctctgctacagttccttgttcgtcgacatctatctttgcattctgaaacattttataaatatataatgggtccctagtcatatgtttaaacgacgcattatctggattaaacatactaggagccatcatttcggctatcgacttaatatccctcttattttcgatagaaaatttagggagtttaagattgtacactttattccctaattgaaacgaccaatagtctaattttgcagccgtaatagaatctgtgaaatgggtcatattatcacctattgccaggtacatactaatattagcatccttatacggaaggcgtaccatgtcatattctttgtcatcgattgtgattgtatttccttgcaatttagtaactacgttcatcatgggaaccgttttcgtaccgtacttattagtaaaactagcattgcgtgttttagtgatatcaaacggatattgccatgtacctttaaaatatatagtattaatgattgcccatagagtattattgtcgagcatattagaatctactacattagacataccggatctacgttctactatagaattaattttattaaccgcatctcgtctaaagtttaatctatataggccgaatctatgatattgttgataatacgacggtttaatacacacagtattatctacgaaactttgataagttagatcagtgtacgtatatttagatgttttcagcttagctaatcctgatattaattctgtaaatgctggacccagatctctttttctcaaatccatagtcttcaataattctattctagtattacctgatgcaggcaatagcgacataaacatagaaaacgaatagccaaacggcgagaagacaatattatcatcttgaatatttttatacgctactataccggcattggtaaatccttgcagacgataggtagacgctgaacacgttaacgatagtatcaataacgcaatcatgattttatggtattaataattaaccttatttttatgttcggtataaaaaaattattgatgtctacacatccttttgtaattgacatctatatatccttttgtataatcaactctaatcactttaacttttacagttttccctaccagtttatccctatattcaacatatctatccatatgcatcttaacactctctgccaagatagcttcagagtgaggatagtcaaaaagataaatatatagagcataatccttctcgtatactctgccctttattacatcgcccgcattgggcaacgaataacaaaatgcaagcatcttgttaacgggctcgtaaattgggataaaaattatgtttttatatctattttattcaagagaatattcaggaatttctttttccggttgtatctcgtcgcagtatatatcatttgtacattgtttcatattttttaatagtttacaccttttagtaggactagtatcgtacaattcatagctgtattttgaattccaatcacgcataaaaatatcttccaattgttgacgaagacctaatccatcatccggtgtaatattaatagatgctccacatgtatccgtaaagtaatttcctgtccaatttgaggtacctatataggccgttttatcggttaccatatatttggcatggtttaccctagaatacggaatgggaggatcagcatctggtacaataaatagctttacttctatatctatgtttttagattttagcatagcgatagatcttaaaaagtttctcatgataaacgaagatcgttgccagcaactaatcaatagcttaacggatacttgtctgtctatagcggatcttcttaattcatcttctatataaggccaaaacaaaattttacccgccttcgaataaataatagggataaagttcataacagatacataaacgaatttactcgcatttctaatacatgacaataaagcggttaaatcattggttctttccatagtacatagttgttgcggcgcagaagcaataaatacagagtgtggaacaccacttacgttaatactaagaggatgatctgtattataatacgacggataaaagtttttccaattatatggtagattgttaactccaagataccagtatacctcaaaaatttgagtgagatccgctgccaagttcctattattgaagatcgcaatacccaattctttgacctgagttagtgatctccaatccatgttagcgcttcctaaataaatatgtgtattatcagatatccaaaattttgtatgaagaactcctcctaggatatttgtaatatctatgtatcgtacttcaactccggccatttgtagtctttcaacatcctttaatggtttgttagatttattgacggctactctaactcttactcctcttttgggtaattgtacaatctcgtttaatattatcgtgccgaaattcgtacccacttcatccgataaactccaataaaaagatgatatatctagtgtttttgtggtattggatagaatttccctccacatgttaaatgtagacaaatatactttatcaaattgcatacctataggaatagtctctgtaatcactgcgattgtattatccggattcattttatttgttaaaaaataatcctatatcacttcactctattaaaaatccaagtttctatttctttcatgactgattttttaacttcatccgtttccttatgaagatgatgtttggcaccttcataaatttttatttctctattacaatttgcatgttgcatgaaataatatgcacctaaaacatcgctaatctcattgtttgttccctggagtatgagagtcgggggggtgttaatcttggaaattatttttctaaccttgttggtagccttcaagacctgactagcaaatccagccttaattttttcatgattgattaatgggtcgtattggtatttataaactttatccatatctctagatactgattctggacatagctttccgactggcgcatttggtgtgatggttcccataagtttggcagctagcagattcagttttgaaacagcatctgcattaactagaggagacattagaatcattgctgtaaacaagtttggattatcgtaagaggctagtatagaaattgttgctcccatggaatgacccaataagtagatttaatagttaccacgtgctgtaccaaagtcatcaatcatcattttttcaccattacttcttccatgtccaatatgatcatgtgagaatactaaaattcctaacgatgatatgttttcagctagttcgtcataacgtccagaatgtttaccagctccatgacttatgaatactaatgccttaggatatgtaataggtttccaatatttacaatatatgtaatcattgtccagattgaacatacagtttgcactcatgattcacgttatataactatcaatattaacagttcgtttgatgatcatattatttttatgttttattgataattgtaaaaacatacaattaaatcaatatagaggaaggagacggatactgtcttttgtgagatagtcatggcgactaaatcagattatgaggatgctgttttttactttgtggatgatgataaaatatgtagtcgcgactccatcatcgatctaatagatgaatatatcacgtggagaaatcatgttatagtgtttaacaaagatattaccagttgtggaagactgtacaaggaattgatgaagttcgatgatgccgctatacagtactatggtattgataaaattaatgagattgtcgaagctatgagcgaaggagaccactacatcaattttacaaaagtccatgatcaggaaagtttattcgctaccataggaatatgtgctaaaatcactgaacattggggatacaaaaagatttcagaatctagattccaatcattgggaaacattacagatctgatgaccgacgataatataaacatcttgatactttttctagaaaaaaaattgaattgatgatataggggtcttcataacgcataattattacgttagcattctatatccgtgttaaaaaaaattatcctatcatgtatttgagagttttatatgtagcaaacatgatagctgtgatgccaataagctttagatattcacgcgtgctagtgttagggatggtattatctggtggtgaaatgtccgttatataatctacaaaacaatcatcgcatatagtatgcgatagtagagtaaacatttttatcgtttctactgggttcatacatcgtctacccaattcggttatgaatgaaattgtcgccaatcttacacccaaacccttgttatccattagcatagtattaacttcgttatttatgtcataaactgtaaatgattctgtagatgccatatcatacatgatattcatgtccctattataatcattactaactttatcacaatatatgttgataatatctatatatgatctagtctttgtgggcaactgtctatacaagtcgtctaaacgttgtttactcatatagtatcgaacagccatcattacatggtcccgttccgttgatagataatcgagtatgttagtggacttgtcaaatctatataccatattttctggaagtggatatacatagtcgtgatcaacattattgctagcctcatcttctatatcctgtactataccattatctatatcatctacataatctacgatattattatacataaacatcgacaacatactattgtcaattatctaagtcctgttgatccaaacccttgatctcctctatctgtactatctagagattgtacttcttccagttctggataatatatacgttgatagattagctgggctattctatcccccgtatttacattaaacgtacattttccattattaataagaataactcctatgtttcccctataatcttcgtctattacaccgcctcctatatcaatgccttttagggacagaccagacctaggagctattctaccatagcagaacttaggcatggacatactaatatctgtcttaattaactgtcgttctccaggagggatagtataatcgtaagcgctatataaatcatatccggcggcgtaaggtgattgcctagtaggagatttagctctgttagtttccttaacaaatctaactggtgagttaatattcatgttgaacataaaactaatattttatttcaaaattatttaccatcccatatattccatgaataagtgtgatgattgtacacttctatagtatctatatacgattcacgataaaatcctcctatcaatagcagtttattatccactatgatcaattctggattatccctcggataaataggatcatctatcagagtccatgtattgctggattcacaataaaattccgcatttctaccaaccaagaataaccttctaccgaacactaacgcgcatgatttataatgaggataataagtggatggtccaaactgccactgatcatgattgggtagcaaatattctgtagttgtatcagtttcagaatgtcctcccattacgtatataacattgtttatagatgccactgctggattacatctaggtttcagaagactcggcatattaacccaagcagcatccccgtggaaccaacgctcaacagatgtgggatttggtagacctcctactacgtataatttattgttagcgggtatcccgctagcatacagtctggggctattcatcggaggaattggaatccaattgtttgatatataatttacagctatagcattgttatgtatttcattgttcatccatccaccgatgagatatactacttctccaacatgagtacttgtacacatatggaatatatctataatttgatccatgttcataggatactctatgaatggatacttgtatgatttgcgtggttgtttatcacaatgaaatattttggtacagtctagtatccattttacattatttatacctctgggagaaagataatttgacctgattacatttttgataaggagtagcagatttcctaatttatttcttcgctttatataccacttaatgacaaaatcaactacataatcctcatctggaacatttagttcatcgctttctagaataagtttcatagatagataatcaaaattgtctatgatgtcatcttccagttccaaaaagtgtttggcaataaagtttttagtatgacataagagattggatagtccgtattctatacccatcatgtaacactcgacacaatattcctttctaaaatctcgtaagataaagtttatacaagtgtagatgataaattctacagaggttaatatagaagcacgtaataaattgacgacgttatgactatctatatatacctttccagtatatgagtaaataactatagaagttaaactgtgaatgtcaaggtctagacaaacccttgtaactggatctttatttttcgtgtatttttgacgtaaatgtgtgcgaaagtaaggagataactttttcaatatcgtagaattgactattatattgccacctatagcatcaataattgttttgaatttcttagtcatagacaatgctaatatattcttacagtacacagtattaacaaatatcggcatttatgtttctttaaaagtcaacatctagagaaaaatgattatctttttgagacataactcccattttttggtattcacccacacgtttttcgaaaaaattagtttttccttccaatgatatattttccatgaaatcaaacggattggtaacattataaatttttttaaatcccaattcagaaatcaatctatccgcgacgaattctatatatgttttcatcatttcacaattcattcctataagtttaactggaagagccgcagtaagaaattcttgttcaatggatactgcatctgttataatagatctaacggtttcttcactcggtggatacaataaatgtttaaacatcaaacatgcgaagtcgcagtgtagaccctcgtctctactaattagttcgttggaaaacgtgagtccgggcattaggccacgctttttaagccaaaatatggaagcgaatgatccggaaaagaagattccttctactgcagcaaaggcaataagtctctctccataaccggcgctgtcatgtatccacttttgagcccaatcggccttcttttttacacaaggcattgtttctatggcattaaagagatagtttttttcattactatctttaacataagtatcgatcaaaagactatacatttccgaatgaatgttttcaatggccatctgaaatccgtagaaacatctagcctcggtaatctgtacttctgtacaaaatcgttccgccaaattttcattcactattccgtcactggctgcaaaaaacgccaatacatgttttataaaatatttttcgtctggtgttagtttattccaatcattgatatctttagatatatctacttcttccactgtccaaaatgatgcctctgcctttttatacatgttccagatgtcatgatattggattgggaaaataacaaatctatttggatttggtgcaaggatgggttccataactaaattaacaatatcaataaattttttttcagttatctatatgcctgtacttggattttttgtacatcgatatcgccgcaatcactacaataattacaagtattattgatagcattgttattagtactatcataattaaattatcgacattcatgggtgctgaataatcgttattatcatcattatcattttgtaattgtgacatcatactaaataaatcgtttgcgagattgttgtgggaagcgggcatggaggatgcattatcattattatttaacgccttccatttggattcacaaatatggcgcgcgttcaacattttatggaaactataattttgtgaaaacagataacaagaaaactcgtcatcgttcaaatttttaacgatagtaaaccgattaaacgtcgagctaatttctaacgctagcgactctgttggatatgggtttccagatatatatcttttcagttcccctacgtatctataatcatctgtaggaaatggaagatatttccatttatctactgttcctaatatcatatgtggtggtgtagtagaaccattaagcgcgaaagatgttatttcgcatcgtattttaacttcgcaataatttctggttagataacgcactctaccagtcaagtcaatgatattagcctttacagatatattcatagtagtcgtaacgatgactccatcttttagatgcgatactcctttgtatgtaccagaatcttcgtacctcaaactcgatatatttaaacaagttaatgagatattaacgcgttttatgaatgatgatatataaccagaagttttatcctcggtggctagcgctataaccttatcattataataccaactagtgtgattaatatgtgacacgtcagtgtgggtacaaatatgtacattatcgtctacgtcgtattcgatacatccgcatacagccaacaaatataaaatgacaaatactctaacgccgttcgtacccatcttgatgcggtttaataaatgttttgatttcaatttattgtaaaaaaagattcggttttatactgttcgatattctcattgcttatattctcatctatcatctccacacagtcaaatccgtggttagcatgcacctcatcaaccggtaaaagactatcggactcttctatcattataactctagaatatttaatttggtcattattaatcaagtcaattatcttatttttaacaaacgtgagtattttactcattttttataaaaacttttagaaatatacagactctatcgtgtgtctatatcttctttttatatccaatgtatttatgtctgatttttcttcatttatcatatataatggtccaaattctacacgtgcttcggattcatccagatcattaaggttcttataattgtaacatccttctcttccctcttctacatcttccttcttattcttattcttagcgtcacagaatctaccacagcaggatcccatgacgagcgtcatattaaactaatccattttcaattataatatatgattagtaatgaccattaaaataaaaaatattcttcataaccggcaagaaagtgaaaagttcacattgaaactatgtcagtagtatacatcatgaaatgatgatatatatatactctattttggtggaggattatatgatataattcgtggataatcattcttaagacacatttcttcattcgtaaatcttttcacgttaaatgagtgtccatattttgcaatttcttcatatgatggcggtgtacgtggacgaggctgctcctgttcttgttgtggtcgccgactgtcgtgtttgcgtttatccctccattatcgcgattgcgtagatggagtactattatataccttgtaattaaatttttttattaattaaacgtataaaaacgttccgtatctgtatttaagagccagatttcgtctaatagaacaaatagctacagtaaaaataactagaataattgctacacccactagaaaccacggatcgtaatacggcaatcggttttcgataataggtggaacgtatattttatttaaggacttaacaattgtctgtaaaccacaatttgcttccgcggatcctgtattaactatctgtaaaagcatatgttggccgggcggagccgaacattctccgatatccaatttctgtatatctataatattattaacctccgcatacgcattacagttcttttctagcttggataccgcactaggtacatcgtctagatctattcctatttcctcagcgatagctcttctatccttttccggaagcaatgaaatcacttcaataaatgattcaaccatgagtgtgaaactaagtcgagaattactcatgcatttgttagttattcggagcgcgcaatttttaaactgtcctataacctctcctatatgaatagcacaagtgacattagtagggatagaatgttgagctaatttttgtaaataactatctataaaaagattatacaaagttttaaactctttagtttccgccatttatccagtctgagaaaatgtctctcataataaatttttccaagaaactaattgggtgaagaatggaaacctttaatctatatttatcacagtctgttttggtacacatgatgaattcttctaatgccgtactaaattcgatatctttttcgatttctggatatgtttttaataaagtatgaacaaagaaatggaaatcgtaataccagttatgtttaactttgaaattgttttttattttcttgttaatgattccagccacttgggaaaagtcaaagtcgtttaatgccgatttaatacgttcattaaaaacaaactttttatcctttagatgaattattattggttcattggaatcaaaaagtaagatattatcgggtttaagatctgcgtgtaaaaagttgtcgcagcatggtagttcgtagattttaatgtataacagagccatctgtaaaaagataaactttatgtattgtaccaaagatttaaatcctaatttgatagctaactcggtatctactttatctgccgaatacagtgctaggggaaaaattataatgtttcctctttcgtattcgtagttagttctcttttcatgttcgaaaaagtgaaacatgcggttaaaatagtttataacattaatattactgttaataactgccgggtaaaagtgggatagtaatttcacgaatttgatactgtcctttctctcgttaaacgcctttagaaaaactttagaagaatatctcaatgatagttcctgaccatccatagtttgtatcaataatagcaacatatgaagaacacgtttatacagagtatgtaaaaatgttaatttatagtttaatcccatggcccacgcacacacgattaattttttttcatctccctttagattgttgtatagaaatttgggtactgtgaactccgccgtagtttccatgggactatataattttgtggcctcgaatacaaattttactacatagttatctatcttaaaaactataccatatcctcctgtagatatgtgataaaaatcgtcgtttataggataaaatcgtttatccttttgttggaaaaaggatgaattaatgtaatcattctcttctatctttagtagtgtttccttattaaaattcttaaaataatttaacaatctaactgacggagcccaattttggtgtaaatctaattgggacattatattgttaaaatacaaacagtctcctaatataacagtatctgataatctatggggagacatccattgatattcaggggatgaatcattggcaacacccatttattgtacaaaaagccccaatttacaaacgaaagtccaggtttgatagagacaaactattaactattttgtctctgtttttaacacctccacagtttttaatttctttagtaatgaaattattcacaatatcagtatcttctttatctaccagagattttactaacttgataaccttggctgtctcattcaatagggtagtaatatttgtatgtgtgatattgatatctttttgaattgtttcttttagaagtgattctttgatggtgccagcatacgaattacaataatgcagaaactcggttaacatgcaggaattatagtaagccaattccaattgttgcctgtgttgtattagagtgtcaatatgagcaatggtgtccttgcgtttctctgatagaatgcgagcagcgattttggcgttatcatttgacgatatttctggaatgacgaatcctgtttctactaactttttggtaggacaaagtgaaacaatcaagaagatagcttctcctcctatttgtggaagaaattgaactcctctagatgatctactgacgatagtatctccttgacagatattggaccgaattacagaagtacctggaatgtaaagccctgaaaccccctcattttttaagcagattgttgccgtaaatcctgcactgtgaccaagatagagagctcctttggtgaatccatctctatgtttcagtttaaccaagaaacagtcagctggtctaaaatttccatctctatctaatacagcatctaacttgatgtcaggaactatgaccggtttaatgttatatgtaacattgagtaaatccttaagttcataatcatcactgtcatcagttatgtacgatccaaacaatgtttctactggcatagtggatacgaagatgctatccatcagaatgtttccctgattagtattttctatatagctattcttctttaaacgattttccaaatcagtaactatgttcatttttttaggagtaggacgcctagccagtatggaagaggattttctagatcctctcttcaacatctttgatctcaatggaatgcaaaaccccatagtgaaacaaccaacgataaaaataatattgtttttcactttttataattttaccatctgactcatggattcattaatatctttataagagctactaacgtataattctttataactgaactgagatatatacaccggatctatggtttccataattgagtaaatgaatgctcggcaataactaatggcaaatgtataaaacaacgaaattatactagagttgttaaagttaatattttctatgagctgttccaataaattatttgttgtgactgcgttcaagtcataaatcatcttgatactatccagtaaacagtctttaagttctggaatattatcatcccattgtaaagcccctaattcgactatcgaatatcctgctctgatagcagtttcaatatcgacggacgtcaatactgtaataaaggtggtagtattgtcatcatcgtgataaactacgggaatatggtcgttagtaggtacggtgactttacacaacgcgatatataactttccttttgtaccatttttaacgtagttgggacgtcctgcagggtattgttttgaagaaatgatatcgagaacagatttgatacgatatttgttggattcctgattattcactataatataatctagacagatagatgattcgataaatagagaaggtatatcgttggtaggataatacatccccattccagtattctcggatactctattgatgacactagttaagaacatgtcttctattctagaaaacgaaaacatcctacatggactcattaaaacttctaacgctcctgattgtgtctcgaatgcctcgtacaaggatttcaaggatgccatagattctttgaccaacgatttagaattgcgtttagcatctgatttttttattaaatcgaatggtcggctctctggtttgctaccccaatgataacaatagtcttgtaaagataaaccgcaagaaaatttatacgcatccatccaaataaccctagcaccatcggatgatattaatgtattattatagattttccatccacaattattgggccagtatactgttagcaacggtatatcgaatagattactcatgtaacctactagaatgatagttcgtgtactagtcataatatctttaatccaatctaagaaatttaaaattagattttttacactgttaaagttaacaaaggtattacccggatacgtggatatcatatatggcattggtccattatcagtaatagctccataaactgatacggcgatggtttttatatgtgtttgatctaacgaggaagaaattcgcgcccacaattcatctctagatatgtatttaatatcaaacggtaacacatcaatttcgggacgcgtatatgtttctaaatttttaatccaaatataatgatgacctatatgccctattatcatactgtcaactatagtacacctagagaacttacgatacatctgtttcctataatcgttaaattttacaaatctataacatgctaaaccttttgacgacaaccattcattaatttctgatatggaatctgtattctcgataccgtattgttctaaagccagtgctatatctccctgttcgtgggaacgctttcgtataatatcgatcaacggataatctgaagtttttggagaataatatgactcatgatctatttcgtccataaacaatctagacataggaattggaggcgatgatcttaattttgtgcaatgagtcgtcaatcctataacttctaatattgtaatattcatcatcgacataacactatctatgttatcatcgtatattagtataccacggccttcttcatttcgtgccaaaataatatacagtcttaaataattacgcaatatctcaatagtttcataattgttagctgttttcatcaaggtttgtatcctgtttaacatgatggcgttctataacgtctctattttctatttttaattttttaaatttttaacgatttactgtggctagatacccaatctctctcaaatatttttttagcctcgcttacaagctgtttatctatactattaaaactgacgaatccgtgattttggtaatgggttccgtcgaaatttgccgaagtgatatgaacatattcgtcgtcgactatcaacaattttgtattattctgaatagtgaaaaccttcacagatagatcattttgaacacacaacgcgtctagacttctggcggttgccatagaatatacgtcgttcttatcccaattaccaactagaagtctgatcttaactcctctattaatggctgcttctataatggagttgtaaatgtcaggccaatagtagctattaccgtcgacacgtgtagtgggaactatggccaaatgttcaatatctatactagtcttagccgacttgagtttatcaataactacatcagtgtctagatctctagaatatcccaataggtgttctggagaatcagtaaagaacactccacctataggattcttaatatgatacgcagtgctaactggcagacaacaagccgcagagcataaattcaaccatgaattttttgcgctattaaaggctttaaaagtatcaaatcttctacgaagatctgtggccagcgggggataatcagaatatacacctaacgttttaatcgtatgtatagatcctccagtaaatgacgcgtttcctacataacatctttcatcatctgacacccaaaaacaaccgagtagtagtcccacattattttttttatctatattaacggttataaaatttatatccgggcagtgactttgtagctctcccagatttcttttccctcgttcatctagcaaaactattattttaatccctttttcagatgcctcttttagtttatcaaaaataagcgcgcccctagtcgtactcagaggattacaacaaaaagatgctatgtatatatatttcttagctagagtgataatttcgttaaaacattcaaatgttgttaaatgatcggatctaaaatccatattttctggtagtgtttctaccagcctacattttgctcccgcaggtaccggtgcaaatggccacatttagttaacataaaaacttatacatcctgttctatcaacgattctagaatatcatcggctatatcgctaaaattttcatcaaagtcgacatcacaacctaactcagtcaatatattaagaagttccatgatgtcatcttcgtttatttctatatccgtatccattgtagattgttgaccgattatcgagtttaaatcattactaatactcaatccttcagaatacaatctgtgtttcattgtaaatttataggcggtgtatttaagttggtagattttcaattatgtatcaatatagcaacagtagttcttgctcctccttgattctagcatcctcttcattattttcttctacgtacataagcatgtccaatacgttagacaacacaccgacgatggcggccgccacagacacgaatatgactagaccgatgaccatttaaaaacccctctctagctttcacttaaactgtatcgattattcttttagaacatgtataatataaaaacattattctatttcgaatttaggcttccaaaaatttttcatccgtaaaccgataataatatatatagacttgttaatagtcggaataaatagattaatgcttaaactatcatcatctccacgattagagatacaatatttacattctttttgctgtttcgaaactttatcaatacacgttaatacaaacccaggaaggagatattgaaactgaggctgttgaaaatgaaacggtgaatacaataattcagataatgtaaaatcatgattccgtattctgatgatattagaactgctaatggatgtcgatggtatgtatctaggagtatctattttaacaaagcatcgatttgctaatatacaattatcattttgattaattgttattttattcatattcttaaaaggtttcatatttatcaattcttctacattaaaaatttccatttttaatttatgtagccccgcaatactcctcattacgtttcattttttgtctataatatccattttgttcatctcggtacatagattatccaattgagaagcgcatttagtagttttgtacattttaagtttattgacgaatcgtcgaaaactagttatagttaacattttattatttgataccctgatattaatacccctgccgttactattatttataactgatgtaacccacgtaacattagaattaattatcgatagtaatgcatcgacgcttccaaaattgtctattataaactcaccgataatttttttattgcatgttttcatattcattaggattatcaaatctttaatcttattacgattgtatgcgttgatattacaagacgtcattctaaaagacggaggatctccatcaaatgccagacaatcacgtacaaagtacatggaaataggttttgttctattgcgcatcatagattcatatagaacacccatagaaatactaatttgttttactctataaaatactaatgcatctatttcatcgttttgtataacgtctttccaagtgccaaattccaaatttttttcattgatagtaccaaattcttctatctctttaactacttgcatagataggtaattacagtgatgcctacatgccgttttttgaaactgaatagatgcgtctagaagcgatgctacactagtcacaatcaccactttcatatttagaatatatgtatgtaaaaatatagtagaatttcattttgtttttttctatgctataaatgaattctcattttgcatctgctcatactccgttttatatcaataccaaagaaggaagatatctggttctaaaagccgttaaagtatgcgatgttagaactgtagaatgcgaaggaagtaaagcttcctgcgtactcaaagtagataaaccctcatcgcccgcgtgtgagagaagaccttcgtccccgtccagatgcgagagaatgaataaccctggaaaacaagtcccgtttatgaggacggacatgctacaaaatatgttcgcggctaatcgcgataatgtagcttctagacttttgtcctaaaatactattatatccttttcgatattaataaatccgtgtcgtccaggttttttatctctttcagtatgtgaatagataggtattttatctctattcatcatcgaatttaagagatccgataaacattgtttgtattctccagatgtcagcatctgatacaacaatatatgtgcacataaacctctggcacttatttcatgtaccttccccttatcactaaggagaatagtatttgagaaatatgtatacatgatattatcatgaattagatatacagaatttgtaacactctcgaaatcacacgatgtgtcggcgttaagatctaatatatcactcgataacacattttcatctagatacactagacattttttaaagctaaaatagtctttagtagtgacagtaactatgcgattattttcatcgatgatacatttcatcggcatattattacgcttaccatcaaagactataccatgtgtatatctaacgtattctagcatggttgccatacgtgcattaaacttttcaggatctttggatagatcttccaatctatctatttgagaaaacatttttatcatgttcaatagttgaaacgtcggatccactatatagatattatctataaagattttaggaactacgttcatggtatcctggcgaatattaaaactatcaatgatatgattatcgttttcatcttttatcaccatatagtttctaagatatgggattttacttaatataatattatttcccgtgataaattttattagaaaggccaaatctataagaaaagtcctagaattagtctgaagaatatctatatcgccgtaccgtatatttggattaattagatatagagaatatgatccgtaacatatacaacttttattatggcgtctaagatattcttccatcaacttattaacatttttgactagggaagatacattatgacgtcccattacttttgccttgtctattactgcgacgttcatagaatttagcatatctcttgccaattcttccattgatgttacattataagaaattttagatgaaattacatttggagctttaatagtaagaactcctaatatgtccgtgtatgtggtcactaatacagattgtagttctataatcgtaaataatttacctatattatatgtttgagtctgtttagaaaagtagctaagtatacgatcttttatttctgatgcagatgtatcaacatcggaaaaaaatctttttttattcttttttactaaagatacaaatatgtctttgttaaaaacagttattttctgaatatttctagcttgtaattttaacatatgatattcgttcacactaggtactctgcctaaataggtttctataatctttaatgtaatattaggaagagtattctgatcaggattcctattcattttgaggatttaaaactctgattattgtctaatatggtctcaacacaaactttttcacagagcgatagagtttttgataactcgtttttcttaagaaatataaaactactgtttccagagctcgctctatcttttattttatctaattcgatacaaactcctgatactggttcagaaagtaattcattaattttcagtcctttatagaagatatttaatatagataatacaaaattttcagttcttgatatcgatctgattgatcctagaactagatatattaataacgtgctcattaggcagtttatggcagcttgataattagatatagtatattccagttcatatttattagataccgcattgcccagattttgatattctatgaattcctctgaaaataaatccaaaataactagacattctattttttgtggattagtgtactctcttccctctatcatgttcactactggtgtccacgatgataaatatctagagggaatataatatagtccataggatgccaatctagcaatgtcgaataactgtaatttgattcttcgttcttcattatgaattgattcttgaggtataaacctaacacaaattatattattagacttttcgtatgtaatgtctttcatgttataagtttttaatcctggaatagaatctattttaatgaggcttttaaacgcagagttctccaacgagtcaaagcataatactctgttgtttttcttatatacgatgttacgattttcttctttgaatggaataggtttttgaattagtttataattacaacataatagataaggaagtgtgcaaatagtacgcggaaaaaacataatagctcccctgttttcatccatggttttaagtaaatgatcactggcttctttagtcaatggatattcgaacattaaccgtttcatcatcattggacagaatccatatttcttaatgtaaagagtgatcaaatcattgtgtttattgtaccatcttgttgtaaatgtgtattcggttatcggatctgctcctttttctattaaagtatcgatgtcgatctcgtctaagaattcaactatatcgacatatttcatttgtatacacataaccattactaacgtagaatgtataggaagagatgtaacgggaacagggtttgttgattcgcaaactattctaatacataattcttctgttaatacgtcttgcacgtaatctattatagatgccaagatatctatataattattttgtaagatgatgttaactatgtgatctatataagtagtgtaataattcatgtatttcgatatatgttccaactctgtctttgtgatgtctagtttcgtaatatctatagcatcctcaaaaaatatattcgcatatattcccaagtcttcagttctatcttctaaaaaatcttcaacgtatggaatataataatctattttacctcttctgatatcattaatgatatagtttttgacactatcttctgtcaattgattcttattcactatatctaagaaacggatagcgtccctaggacgaactactgccattaatatctctattatagcttctggacataattcatctattataccagaattaatgggaactattccgtatctatctaacatagttttaagaaagtcagaatctaagacctgatgttcatatattggttcatacatgaaatgatctctattgatgatagtgactatttcattctctgaaaattggtaactcattctatatatgctttccttgttgatgaaggatagaatatactcaatagaatttgtaccaacaaactgttctcttatgaatcgtatatcatcatctgaaataatcatgtaaggcatacatttaacaattagagacttgtctcctgttatcaatatactattcttgtgataatttatgtgtgaggcaaatttgtccacgttctttaattttgttatagtagatatcaaatccaatggagctacagttcttggcttaaacagatatagtttttctggaacgaattctacaacattattataaaggactttgggtagataagtgggatgaaatcctattttaattaatgcgatagccttgtcctcgtgcagatatccaaacgcttttgtgatagtatggcattcattgtctagaaacgctctacgaatatctgtgacagatatcatctttagagaatatactagtcgcgttaatagtactacaatttgtattttttaatctatctcaataaaaaaattaatatgtatgattcaatgtataactaaactactaactgttattgataactagaatcagaatctaatgatgacgtaaccaagaagtttatctactgccaatttagctgcattatttttagcatctcgtttagattttccatctgccttatcgaatactcttccgtcgatgtctacacaggcataaaatgtaggagagttactaggccccactgattcaatacgaaaagaccaatctctcctagtaatttggcagtactcattaataacggtgacagggttagcacctttccaatcaataatttttttagccggaataacatcatcaaaagacttatgatcctctctcattgatttttcgcgggatacatcatctattatggcgtcagccataacatcagcatccggcttatccgcctccgttgtcataaaccaacgaggaggaatatcgtcggagctgtacaccatagcactacgttgaagatcgtacagagctttattaacttctcgcttctccatattaagttgtctagttagttgtgcagcagtagctccttcgattccaatggttttaatagcctcacacacaatctctgcgttagaacgttcgtcgatatagattttagacatttttagagagaactaacacaaccagcaataaaactgaacctactttatcatttttttattcatcatcctctggtggttcgtcgttcctatcgaatgtggatctgattaacccgtcatctataggtgatgctggttctggagattctggaggagatggattattatctggaagaatctctgttatttccttgttttcatgtatcgattgcgttgtaacattaagattgcgaaatgctctaaatttgggaggcttaaagtgttgtttgcaatctctacacgcatgtctaactagtggaggttcgtcagcggctctagtttgaatcatcatcggcgtagtattcctacttttacagttaggacacggtgtattgtatttctcgtcgagaacgttaaaataatcgttgtaactcacatcctttattttatctatattgtattctactcctttcttaatgcattttataccgaataagagatagcgaaggaattctttttcggtgccgctagtacccttaatcatatcacatagtgttttatattccaaatttgtggcaatagacggtttatttctatacgatagtttgtttctggaatcctttgagtattctataccaatattattctttgattcgaatttagtttcttcgatattagattttgtattacctatattcttgatgtagtactttgatgatttttccatggcccattctattaagtcttccaagttggcatcatccacatattgtgatagtaattctcggatatcagtagcggctaccgccattgatgtttgttcattggatgagtaactactaatgtatacattttccatttataacacttatgtattaactttgttcatttatattttttcattattatgttgatattaacaaaagtgaatatatatgttaataattgtattgtggttatacggctacaatttcataatgagtggaagtcagtgtccgatgatcaatgacgatagctttactctgaaaagaaagtatcaaatcgatagtgcggagtcaacaataaaaatggataagaagaggataaagtttcagaatagagccaaaatggtaaaagaaataaatcagacaataagagcagcacaaactcattacgagacattgaaactaggatacataaaatttaagagaatgattaggactactactctagaagatatagcaccatctattccaaataatcagaaaacttataaactattctcggacatttcagccatcggcaaagcatcacagaatccgagtaagatggtatatgctctgctgctttacatgtttcccaatttgtttggagatgaccatagattcattcgttatagaatgcatccaatgagtaaaatcaaacacaagatcttctctcctttcaaacttaatcttattagaatattagtggaagaaagattctataataatgaatgcagatctaataaatggagaataattggaacacaagttgataaaatgttgatagctgaatctgataaatatacaatagatgcaaggtataacctaaaacccatgtatagaatcaagggaaaatctgaagaagataccctcttcatcaaacagatggtagaacaatgtgtgacatcccaggaattggtggaaaaagtgttgaagatactgtttagagatttgttcaagagtggagaatacaaagcatacagatacgatgatgatgtagaaaatggatttattggattggatacactaaaattaaacattgttcatgatatagttgaaccatgtatgcctgttcgtaggccagtggctaagatactgtgtaaagaaatggtaaataaatactttgagaatccgctacatattattggtaaaaatcttcaagagtgcattgactttgttagtgaataggcatttcatctttctccaatactaattcaaattgttaaattaataatggatagtataaatagttattagtgataaaatagtaaaaataattattagaataagagtgtagtatcatagataactctcttctataaaaatggattttattcgtagaaagtatcttatatacacagtagaaaataatatagattttttaaaggatgatacattaagtaaagtaaacaattttaccctcaatcatgtactagctctcaagtatctagttagcaattttcctcaacacgttattactaaggatgtattagctaataccaatttttttgttttcatacatatggtacgatgttgtaaagtgtacgaagcggttttacgacacgcatttgatgcacccacgttgtacgttaaagcattgactaagaattatttatcgtttagtaacgcaatacaatcgtacaaggaaaccgtgcataaactaacacaagatgaaaaatttttagaggttgccgaatacatggacgaattaggagaacttataggcgtaaattatgacttagttcttaatccattatttcacggaggggaacccatcaaagatatggaaatcatttttttaaaactgtttaagaaaacagacttcaaagttgttaaaaaattaagtgttataagattacttatttgggcatacctaagcaagaaagatacaggcatagagtttgcggataatgatagacaagatatatatactctatttcaacaaactggtagaatcgtccatagcaatctaacagaaacgtttagagattatatctttcccggagataagactagctattgggtgtggttaaacgaaagtatagctaatgatgcggatatcgttcttaatagacacgccattaccatgtatgataaaattcttagttatatatactctgagataaaacaaggacgcgttaataaaaacatgcttaagttagtttatatctttgagcctgaaaaagatatcagagaacttctgctagaaatcatatatgatattcctggagatatcctatctattattgatgcaaaaaacgacgattggaaaaaatattttattagtttttataaagctaattttattaacggtaatacatttattagtgatagaacgtttaacgaggacttattcagagttgttgttcaaatagatcccgaatatttcgataatgaacgaattatgtctttattctctacgagtgctgcggacattaaacgatttgatgagttagatattaataacagttatatatctaatataatttatgaggtgaacgatatcacattagatacaatggatgatatgaagaagtgtcaaatctttaacgaggatacgtcgtattatgttaaggaatacaatacatacctgtttttgcacgagtcggatcccatggtcatagagaacggaatactaaagaaactgtcatctataaaatccaagagtagacggctgaacttgtttagcaaaaacattttaaaatattatttagacggacaattggctcgtctaggtcttgtgttagatgattataaaggagacttgttagttaaaatgataaaccatcttaagtctgtggaggatgtatccgcattcgttcgattttctacagataaaaaccctagtattcttccatcgctaatcaaaactattttagctagttataatatttccatcatcgtcttatttcaaaggtttttgagagataatctatatcatgtagaagaattcttggataaaagcatccatctaaccaagacggataagaaatatatacttcaattgataagacacggtagatcatagaacagaccaaatatattattaataatttgtatatacatagatataattatcacatattaaaaattcacacatttttgataaatgggaactgctgcaacaattcagactcccaccaaattaatgaataaagaaaatgcagaaatgattttggaaaaaattgttgatcatatagttatgtatattagtgacgaatcaagtgattcagaaaataatcctgaatatattgattttcgtaacagatacgaagactatagatctctcattataaaaagtgatcacgagtttgtaaagctatgtaaaaatcatgcagagaaaagttctccagaaacgcaacaaatgattatcaaacacatatacgaacaatatcttattccagtatctgaagtactattaaaacctataatgtccatgggtgacataattacatataacggatgtaaagacaatgaatggatgctagaacaactctctaccctaaactttaacaatctccgcacatggaactcatgtagcataggcaatgtaacgcgtctgttttatacattttttagttatctgatgaaagataaactaaatatataagtataatcccattctaatactttaacctgatgtattacctgcatcttattagaatattaacctaactaaaagacataacataaaaactcattacatagttgataaaaagcggtaggatataaatattatggctgccaccgttccgcgttttgacgacgtgtacaaaaatgcacaaagaagaattctagatcaagaaacattttttagtagaggtctaagtagaccgttaatgaaaaacacatatctatttgataattacgcgtatggatggataccagaaactgcaatttggagtagtagatacgcaaacttagatgcaagtgactattatcccatttcgttgggattacttaaaaagttcgagtttctcatgtctctatataaaggtcctattccagtatacgaagaaaaagtaaatactgaattcatagccaatggatcgttctctggtagatacgtatcatatcttcgaaagttttctgctcttccaacaaacgagtttattagttttttgttactgacttccattccaatctataatatcttgttctggtttaaaaatactcagtttgatattactaaacacacattattcagatacgtctatacagataatgccaaacacctggcgttggctaggtatatgcatcaaacaggagactataagcctttgtttagtcgtctcaaagagaattatatatttaccggtcccgttccaataggtatcaaagatatagatcaccctaatcttagtagagcaagaagtccatccgattatgagacattagctaatattagtactatattgtactttaccaagtatgatccggtattaatgtttttattgttttacgtacctgggtattcaattactacaaaaattactccagccgtagaatatctaatggataaactgaatctaacaaagagcgacgtacaactgttgtaaattattttatgcttcgtaaaatgtaggttttgaaccaaacattctttcaaagaatgagatgcataaaactttattatccaatagattgactatttcggacgtcaatcgtttaaagtaaacttcgtaaaatattctttgatcactgccgagtttaaaacttctatcgataattgtctcatatgttttaatatttacaagttttttggtccatggtacattagccggacaaatatatgcaaaataatatcgttctccaagttctatagtttctggattatttttattatattcagtaaccaaatacatattagggttatctgcggatttataatttgagtgatgcattcgactcaacataaataattctagaggagacgatctactatcaaattcggatcgtaaatctgtttctaaagaacggagaatatctatacatacctgattagaattcatccgtccttcagacaacatctcagacagtctggttttgtacatcttaatcatattcttatgaaacttggaaacatctcttctagtttcactagtacctttattaattctctcaggtacagattttgaattcgacgatgccgagtatttcatcgttgtatatttcttcttcgattgcataatcagattcttatataccgcctcaaactctattttaaaattattaaacaatactctactattaatcagtcgttctaactctttcgctatttctatagacttatctacatcttgactgtctatctctgtaaacacggagtcggtatctccatacacgctacgaaaacgaaatctgtaatctataggcaacgatgttttcacaatcggattaatatctctatcgtccatataaaatggattacttaatggattggcaaaccgtaacataccgttagataactctgctccatttagtaccgattctagatacaagatcattctacgtcctatggatgtgcaactcttagccgaagcgtatgagtatagagcactatttctaaatcccatcagaccatatactgagttggctactatcttgtacgtatattgcatggaatcataaatggccttttcagttgaactggtagcctgttttaacatctttttatatctggctctctctgccaaaaatgttcttaatagtctaggaatggttccttctatcgatctatcgaaaattgctatttcagagatgaggttcggtagtctaggttcacaatgaaccgtaatatatctaggaggtggatatttctgaagcaatagctgattatttatttcttcttccaatctattggtactaacaacgacaccgactaatgtttccggagatagatttccaaagatacacacattaggatacagactgttataatcaaagattaatacattattactaaacattttttgttttggagcaaataccttaccgccttcataaggaaacttttgttttgtttctgatctaactaagatagttttagtttccaacaatagctttaacagtggacccttgatgactgtactcgctctatattcgaataccatggattgaggaagcacatatgttgacgcacccgcgtctgtttttgtttctactccataatactcccacaaatactgacacaaacaagcatcatgaatacagtatctagccatatctaaagctatgtttagattataatccttatacatctgagctaaatcaacgtcatcctttccgaaagataatttatatgtatcattaggtaaagtaggacataatagtacgactttaaatccattttcccaaatatctttacgaattactttacatataatatcctcatcaacagtcacataattacctgtggttaaaacctttgcaaatgcagcggctttgcctttcgcgtccgtagtatcgtcaccgatgaacgtcatttctctaactcctctatttaatactttacccatgcaactgaacgcgttcttggatatagaatccaatttgtacgaatccaatttttcagatttttgaatgaatgaatatagatcgaaaaatatagttccattattgttattaacgtgaaacgtagtattggccatgccgcctactcccttatgactagactgatttctctcataaatacagagatgtacagcttcctttttgtccggagatctaaagataatcttctctcctgttaataactctagacgattagtaatatatctcagatcaaagttatgtccgttaaaggtaacgacgtagtcgaacgttagttccaacaattgtttagctattcgtaacaaaactatttcagaacatagaactagttctcgttcgtaatccatttccattagtgactgtatcctcaaacatcctctatcgacggcttcttgtatttcctgttccgttaacatctcttcattaatgagcgtaaacaataatcgtttaccacttaaatcgatataacagtaacttgtatgcgagattgggttaataaatacagaaggaaacttcttatcgaagtgacactctatatctagaaataagtacgatcttgggatatcgaatctaggtatttttttagcgaaacagttacgtggatcgtcacaatgataacatccattgttaatctttgtcaaatattgctcgtccaacgagtaacatccgtctggagatatcccgttagaaatataaaaccaactaatattgagaaattcatccatggtggcattttgtatgctgcgtttctttggctcttctatcaaccacatatctgcgacggagcattttctatctttaatatctagattataacttattgtctcgtcaatgtctatagttctcatctttcccaacggcctcgcattaaatggaggaggagacaatgactgatatatttcgtccgtcactacgtaataaaagtaatgaggaaatcgtataaatacggtctcaccatttcgacatctggatttcagatataaaaatctgttttcaccgtgactttcaaaccaattaatgcaccgaacatccatttatagaatttagaaatatattttcatttaaatgaatcccaaacattggggaagagccgtatggaccattatttttatagtactttcgcaagcgggtttagacggcaacatagaagcgtgtaaacgaaaactatatactatagtcagcactcttccatgtcctgcatgtagacggcacgcgactatcgctatagaggacaataatgtcatgtctagcgatgatctgaattatatttattattttttcatcagattatttaacaatttggcatctgatcccaaatacgcgatcgatgtgacaaaggttaaccctttataaacttaacccattataaaacttatgattagtcacaactgaaataaccgcgtgattattttttggtataattctacacggcatggtttctgtaactatgaattcaacccccgttacattagtgaaatctttaacaaacagcaagggttcgtcaaagacataaaactcattgtttacaatcgaaatagaccccctatcacacttaaaataaaaaatatccttatcctttaccaccaaataaaattctgattggtcaatgtgaatgtattcacttaacagttccacaaatttatttattaactccgaggcacatacatcgtcggtattttttatggcaaactttactcttccagcatccgtttctaaaaaaatattaacgagttccatttatatcatccaatattattgaaatgacgttgatggacagatgatacaaataagaaggtacggtacctttgtccaccatctcctccaattcatgctctattttgtcattaactttaatgtatgaaaacagtacgccacatgcttccatgacagtgtgtaacactttggatacaaaatgtttgacattagtataattgttcaagactgtcaatctataatagatagtagctataatatattctatgatggtattgaagaagatgacaaccttggcatattgatcatttaacacagacatggtatcaacagatagcttgaatgaaagagaatcagtaattggaataagcgtcttctcgatagagtgtccgtataccaacatgtctgatattttgatgtattccattaaattatttagttttttctttttattttcgttaaacagcatttctgtcaacggaccccaacatcgttgaccgattaagttttgattgatttttccgtgtaatgcgtatctagtcagatcgtatagcctatccaataatccatcatctgtgcgtagatcacatcgtacactttttaattctctatagaagagcgacagacatctggagcaattacagacagcaatttctttattctctacagatgtaagatacttgaagacattcctatgatgatgcagaattttggataacacggtattgatggtatctgttaccataattcctttgatggctgatagtgtcagagcacaagatttccaatctttgacaatttttagcaccattatctttgttttgatatctatatcagacagcatggtgcgtctgacaacacagggattaagacggaaagatgaaatgattctctcaacatcttcaatggataccttgctattttttctggcattatctatatgtgcgagaatatcctctagagaatcagtatcctttttgatgatagtggatctcaatgacatgggacgtctaaaccttcttattttatcaccagattgcatggtgatttgtcttctttcttttatcataatgtaatctctaaattcatcggcaaattgtctatatctaaaatcataatatgagatgtttacctctacaaatatctgttcgtccaatgttagagtatctacatcagttttgtattccaaattaaacatggcaacggatttaattttatattcctctattaagtcctcgtcgataataacagaatgtagataatcatttaatccatcgtacatggttggaagatgcttgttgacaaaatctttaattgtcttgatgaaggtgggactatatctaacatcttgattaataaaatttataacattgtccataggatactttgtaactagttttatacacatctcttcatcggtaagtttagacagaatatcgtgaacaggtggtatattatattcatcagatatacgaagaacaatgtccaaatctatattgtttaatatattatatagatgtagcgtagctcctacaggaatatctttaactaagtcaatgatttcatcaaccgttagatctattttaaagttaatcatataggcattgatttttaaaaggtatgtagccttgactacattctcattaattaaccattccaagtcactgtgtgtaagaagattatattctatcataagcttgactacatttggtcccgataccattaaagaattcttatgatataaggaaacagcttttaggtactcatctactctacaagaattttggagagccttaacgatatcagtgacgtttattatttcaggaggaaaaaacctaacattgagaatgtcggagttaatagcttccagatacagtgattttggcaatagtccgtgtaatccataatccagtaacacgagctggtgcttgctagacaccttttcaatgtttaatttttttgaaataagctttgataaagccttcctcgcaaattccggatacatgaacatgtcggcgacatgattaagtattgttttttcattatttttatattttctcaacaagttctcaataccccaatagatgatagaatatcacccaatgcgtccatgttgtctatttccaacaggtcgctatatccaccaatagaagtttttccaaaaaagattctaggaacagttctaccaccagtaatttgttcaaaatagtcacgcaattcattttcgggtttaaattctttaatatcgacaatttcatacgctcctcttttgaaactaaacttatttagaatatccagtgcatttctacaaaaaggacatgtatacttgacaaaaattgtcactttgttattggccaacctttgttgtacaaattcctcggccattttaatatttaagtgatataaaactatctcgacttatttaactctttagtcgagatatatggacgcagatagctatatgatagccaactacagaaggcaaacgctataaaaaacataattacgacgagcatatttataaatatttttattcagcattacttgatatagtaatattaggcacagtcaaacattcaaccactctcgatacattaactctctcattttctttaacaaattctgcaatatcttcgtaaaaagattcttgaaactttttagaatatctatcgactctagatgaaatagcgttcgtcaacatactatgttttgtatacataaaggcgcccattttaacagtttctagtgacaaaatgctagcgatcctaggatcctttagaatcacatagattgacgattcgtctctcttagtaactctagtaaaataatcatacaatctagtacgcgaaataatattatccttgacttgaggagatctaaacaatctagttttgagaacatcgataagttcatcgggaatgacatacatactatctttaatagaactcttttcatccagttgaatggattcgtccttaaccaactgattaatgagatcttctattttatcattttccagatgatatgtatgtccattaaagttaaattgtgtagcgcttctttttagtctagcagccaatactttaacatcactaatatcgatatacaaaggagatgatttatctatggtattaagaattcgtttttcgacatctgtcaaaaccaattcctttttgcctgtatcatccagttttccatcctttgtaaagaaattattttctactagactattaataagactgataaggattcctccataattgcacaatccaaactttttaacaaaactagactttacaagatctacaggaatgcgtacttcaggtttcttagcttgtgattttttcttttgtggacattttcttgtgaccaactcatctaccatttcattgattttagcagtgaaataagctttcaatgcacgggcactgatactattgaaaacgagttgatcttcaaattccgccatttaagttcaccaaacaacttttaaatacaaatatatcaatagtagtagaataagaactataaaaaaaataataattaaccaataccaaccccaacaaccggtattattagttgatgtgactgttttctcatcacttagaacagatttaacaatttctataaagtctgtcaaatcatcttccggagaccccataaatacaccaaatatagcggcgtacaacttatccatttatacattgaatattggcttttctttatcgctatcttcatcatattcatcatcaatatcaacaagtcccagattacgagccagatcttcttctacattttcagtcattgatacacgttcactatctccagagagtccgataacgttagccaccacttctctatcaatgattagtttcttgagtgcgaatgtaatttttgtttccgttccggatctatagaaaactacaggtgtgataattgccttggccaattgtctttctcttttactgagtgattctagttcaccttctatagatctgagaatggatgattctccagtcgaaacatattctaccatggatccgtttaatttgttgatgaagatggattcatccttaaatgttttctctgtaatagtttccaccgaaagactatgcaaagaatttggaatgcgttccttgtgcttaatgtttccatagacggcttctagaagttgatacaacataggactagccgcggtaacttttatttttagaaagtatccatcgcttctatcttgtttagatttatttttataaagtttagtctctccttccaacataataaaagtggaagtcatttgactagataaactatcagtaagttttatagagatagacgaacaattagcgtattgagaagcatttagtgtaacgtattcgatacattttgcattagatttactaatcgattttgcatactctataacacccgcacaagtctgtagagaatcgctagatgcagtaggtcttggtgaagtttcaactctcttcttgattaccttactcatgattaaacctaaataattgtactttgtaatataatgatatatattttcactttatctcatttgagaataaaaatgtttttgtttaaccactgcatgatgtacagatttcggaatcgcaaaccaccagtggttttattttatccttgtccaatgtgaattgaatgggagcggatgcgggtttcgtacgtagatagtacattcccgtttttagaccgagactccatccgtaaaaatgcatactcgttagtttggaataactcggatctgctatatggatattcatagattgactttgatcgatgaaggctcccctgtctgcagccatttttatgatcgtcttttgtggaatttcccaaatagttttataaactcgcttaatatcttctggaaggtttgtattctgaatggatccaccatctgccataatcctattcttgatctcatcattccataattttctctcggttaaaactctaaggagatgcggattaactacttgaaattctccagacaatactctccgagtgtaaatattactggtatacggttccaccgactcattatttcccaaaatttgagcagttgatgcagtcggcataggtgccaccaataaactatttctaagaccgtatgttctgattttatcttttagaggttcccaattccaaagatccgacggtacaacattccaaagatcatattgtagaataccgttactggcgtacgatcctacatatgtatcgtatggtccttccttctcagctagttcacaactcgcctctaatgcaccgtaataaatggtttcgaagatcttcttatttagatcttgtgcttccaggctatcaaatggataatttaagagaataaacgcgtccgctaatccttgaacaccaataccgataggtctatgtctcttattagagatttcagcttctggaataggataataattaatatctataattttattgagatttctgacaattactttgaccacatccttcagtttgagaaaatcaaatcgcccatctattacaaacatgttcaaggcaacagatgccagattacaaacggctacctcattagcatccgcatattgtattatctcagtgcaaagattactacacttgatagttcctaaattttgttgattactctttttgttacacgcatccttataaagaatgaatggagtaccagtttcaatctgagattctataatcgctttccagacgactcgagcctttattatagatttgtatctcctttctctttcgtatagtgtatacaatcgttcgaactcgtctccccaaacattgtccaatccaggacattcatccggacacatcaacgaccactctccgtcatccttcactcgtttcataaagagatcaggaatccaaagagctataaatagatctctggttctatgttcctcgtttcctgtattctttttaagatcgaggaacgccataatatcagaatgccacggttccaagtatatggccataactccaggccgtttgtttcctccctgatctatgtatctagcggtgttattataaactctcaacattggaataataccgtttgatataccattggtaccggagatatagcttccactggcacgaatattactaattgatagacctattccccctgccattttagagattaatgcgcatcgttttaacgtgtcatagataccctctatgctatcatcgatcatgttaagtagaaaacagctagacatttggtgacgactagttcccgcattaaataaggtaggagaagcgtgcgtaaaccatttttcagaaagtagattgtacgtctcaatagctgagtctatatcccattgatgaattcctactgcgacacgcattaacatgtgctgaggtctttcaacgatcttgttgtttattttcaacaagtaggatttttccaaagttttaaaaccaaaatagttgtatgaaaagtctcgttcgtaaataataaccgagttgagtttatccttatatttgttaactatatccatggtgatacttgaaataatcggagaatgtttcccatttttaggattaacatagttgaataaatcctccatcacttcactaaatagtttttttgtttccttgtgtagatttgatacggctattctggcggctagaatggcataatccggatgttgtgtagtacaagtggctgctatttcggctgccagagtgtccaattctaccgttgttactccattatatattccttgaataaccttcatagctattttaataggatctatatgatccgtgtttaagccataacataattttctaatacgagacgtgattttatcaaacatgacattttccttgtatccatttcgtttaatgacaaacatttttgttggtgtaataaaaaaattatttaacttttcattaatagggatttgacgtatgtagcgtacaaaattatcgttcctggtatatagataaagagtcctatatatttgaaaatcgttacggctcgattaaactttaatgattgcatagtgaatatatcattaggatttaactccttgactatcagggcggcaccagaaattaccatcaaaagcattaatacagttatgccgatcgcagttagaacggttatagcatccaccatttatatctaaaaattagatcaaagaatatgtgacaaagtcctagttgtatactgagaattgacgaaacaatgtttcttacatatttttttcttattagtaactgacttaatagtaggaactggaaagctagacttgattattctataagtatagatacccttccaaataatattctctttgataaaagttccagaaaatgtagaattttttaaaaagttatcttttgctattaccaagattgtgtttagacgcttattattaatatgagtgatgaaatccacaccgcctctagatatcgcttttatttccacattagatggtaaatccaatagtgaaactatctttttaggaatgtatggactcgcgtttagaggagtgaacgtcttaggcgtcggaaaggatgattcatcaaacgaataaacaatttcacaaatggatgttaatgtattagtaggaaattttttgacgctagtggaattgaagattctaatggatgatgttctacctatttcatccgataacatgttaatttccgacaccaacggttttaatatttcgatgatatacggtagtctctctttcggacttatatagcttattccacaatacgagtcattatatactccaaaaaacaaaataactagtataaaatctgtatcgaatgggaaaaacgaaattatcgacataggtatagaatctggaacattgaacgtattaatacttaattctttttctgtggtaagtaccgataggttattgacattgtatggttttaaatattctataacttgagacttgatagatattagtgatgaattgaaaattatttttatcaccacgtgtgtttcaggatcatcgtcgacgcccgtcaaccaaccgaatggagtaaaataaatatcattaatatatgctctagatattagtatttttatcaatcctttgattatcatcttctcgtaggcgaatgattccatgatcaagagtgatttaagaacatcctccggagtattaatgggcttagtaaacagtccatcgttgcaataataaaagttatccaagttaaaggatattatgcattcgtttaaagatatcacctcatctgacggagacaattttttggtaggttttagagactttgaagctacttgtttaacaaagttattcatcgtcgtttactattctatttaattttgtagttaatttatcacatatcacattaattgactttttggtccatttttccatacgtttatattcttttaatcctgcgttatccgtttccgttatatccagggatagatcttgcaagttaaatagaatgctcttaaataatgtcatttttttatccgctaaaaatttaaagaatgtataaacttttttcaaagatttaaaacttttaggtggagttctagtacacaatatcataaacaaactaataaacatcccgcattcagattccaacagctgattaacttccacattaatacagcctattttcgctccaaatgtacattcgaaaaatctgaataaaacatcgatgtcacaatttgtattatccaatacagaatgtctgtgattcgtgttaaaaccatcggagaaggaatagaaataaaaattattatagtggtggaattcagttggaatattgcctccggagtcataaaaggatactaaacattgttttttatcataaattacacatttccaatgagacaaataacaaaatccaaacattacaaatctagaggtagaacttttaattttgtctttaagtatatacgataagatatgtttattcataaacgcgtcaaatttttcatgaatcgctaaggagtttaagaatctcatgtcaaattgtcctatataatccacttcggatccataagcaaactgagagactaagttcttaatacttcgattgctcatccaggctcctctctcaggctctattttcatcttgacgacctttggattttcaccagtatgtattcctttacgtgataaatcatcgattttcaaatccatttgtgagaagtctatcgccttagatactttttcccgtagtcgaggtttaaagaaatacgctaacggtatactagtaggtaactcaaagacatcatatatagaatggtaacgcgtctttaactcgtcggttaactctttcttttgatcgagttcgtcgctactattgggtctgctcaggtgccccgactctactagttccaacatcataccgataggaatacaagacactttgccagcggttgtagatttatcatatttctccactacatatccgttacaatttgttaaaaatttagatacatctatattgctacataatccagctagtgaatatatatgacataataaattggtaaatcctagttctggtattttactaattactaaatctgtatatctttccatttatcatggaaaagaatttaccagatatcttcttttttccaaactgcgttaatgtattctcttacaaatattcacaagatgaattcagtaatatgagtaaaacggaacgtgatagtttctcattggcggtgtttccagttataaaacatagatggcataacgcacacgttgtaaaacataaaggaatatacaaagttagtacagaagcacgtggaaaaaaagtatctcctccatcactaggaaaacccgcacacataaacctaaccgcgaagcaatatatatacagtgaacacacaataagctttgaatgttatagttttctaaaatgtataacaaatacagaaatcaattcgttcgatgagtatatattaagaggactattagaagctggtaatagtttacagatattttccaattccgtaggtaaacgaacagatactataggtgtactagggaataagtatccatttagcaaaattccattggcctcattaactcctaaagcacaacgagagatattttcagcgtggatttctcatagacctgtagttttaactggaggaactggagtgggtaagacgtcacaggtacccaagttattgctttggtttaattatttatttggtggattctctactctagataaaatcactgactttcacgaaagaccagtcattctatctcttcctaggatagctttagttagattgcatagcaataccattttaaaatcattgggatttaaggtactagatggatctcctatttctttacggtacggatctataccggaagaattaataaacaaacaaccaaaaaaatatggaattgtattttctacccataagttatctctaacaaaactatttagttatggcactcttattatagacgaagttcatgagcatgatcaaataggagatattattatagcagtagcgagaaagcatcatacgaaaatagattctatgtttttaatgactgccacgttagaggatgacagggaacggctaaaagtatttttacctaatcccgcatttatacatattcctggagatacactgtttaaaattagcgaggtatttattcataataagataaatccatcttccagaatggcatacatagaagaagaaaagagaaatttagttactgctatacagatgtatactcctcctgatggatcatccggtatagtctttgtggcatccgttgcacagtgtcacgaatataaatcatatttagaaaaaagattaccgtatgatatgtatattattcatggtaaggtcttagatatagacgaaatattagaaaaagtgtattcatcacctaatgtatcgataattatttctactccttatttggaatccagcgttactatacacaatgttacacacatttatgatatgggtagagtttttgtccccgctccttttggaggatcgcaacaatttatttctaaatctatgagagatcaacgaaaaggaagagtaggaagagttaatcctggtacatacgtctatttctatgatctgtcttatatgaagtctatacagcgaatagattcagaatttctacataattatatattgtacgctaataagtttaatctaacactccccgaagatttgtttataatccctacaaatttggatattctatggcgtacaaaggaatatatagactcgttcgatattagtacagaaacatggaataaattattatccaattattatatgaagatgatagagtatgctaaactttatgtactaagtcctattctcgctgaggagttggataactttgagaggacgggagaattaactagtattgtacgagaagccattttatctctaaatttacgaattaagattttaaattttaaacataaagatgatgatacgtatatacacttttgtaaaatattattcggtgtctataacggaacaaacgctactatatattatcatagacctctaacgggatatatgaatatgatttcagatactatatttgttcctgtagataataactaaaaatcaaactctaatgaccacatctttttttagagatgaaaaattttctacatctccttttgtagacacgactaaacattttgcagaaaaaagtttattagtgtttagataatcgtatacttcatcagtgtagatagtaaatgtgaacagataaaaggtattcttgctcaatagattggtaaattccatagaatatattaatcctttcttcttgagatcccacatcatttcaaccagagacgttttatccaatgatttacctcgtactataccacatacaaaactagattttgcagtgacgtcgtacctggtattcctaccaaacaaaattttacttttagttcttttagaaaattctaaggtagaatctctatttgccaatatgtcatctatggaattaccactagcaaaaaatgatagaaatatatattgatacatcgcagctggttttgatctactatactttaaaaacgaatcagattccataattgcctgtatatcatcagctgaaaaactatgttttacacgtattccttcggcatttctttttaatgatatatcttgtttagacaatgataaagttatcatgtccatgagagacgcgtctccgtatcgtataaatatttcattagatgttagacgcttcattaggggtatacttctataaggtttcttaatcagtccatcattggttgcgtcaagaactactatcggatgttgttgggtatctctagtgttacacatggccttactaaagtttgggtaaataactatgatatctctattaattatagatgcatatatttcattcgtcaaggatattagtatcgacttgctatcgtcattaatacgtgtaatgtaatcatataaatcatgcgatagccaaggaaaatttaaatagatgttcatcatataatcgtcgctataattcatattaatacgttgacattgactaatttgtaatatagcctcgccacgaagaaagctctcgtattcagtttcatcgataaaggataccgttaaatataactggttgccgatagtctcatagtctattaagtggtaagtttcgtacaaatacagaatccctaaaatattatctaatgttggattaatctttaccataactgtataaaatggagacggagtcataactattttaccgtttgtacttactggaatagatgaaggaataatctccggacatgctggtaaagacccaaatgtctgtttgaagaaatccaatgttccaggtcctaatctcttaacaaaaattacgatattcgatcccgatatcctttgcattctatttaccagcatatcacgaactatattaagattatctatcatgtctattctcccaccgttatataaatcgcctccgctaagaaacgttagtatatccatacaatggaatacttcatttctaaaatagtattcgttttctaattctttaatgtgaaatcgtatactagaaagggaaaaattatctttgagttttccgttagaaaagaaccacgaaactaatgttctgattgcgtccgattccgttgctgaattaatggatttacaccaaaaactcatataacttctagatgtagaagcattcgctaaaaaattagtagaatcaaaggatataagtagatgttccaacaagtgagcaattcccaagatttcatctatatcattctcgaatccgaaattagaaattcccaagtagatatcctttttcatccgatcgttgatgaaaatacgaactttattcggtaagacaatcatttactaaggagtaaaataggaagtaatgttcgtatgtcgttatcatcgtataaattaaaggtgtgttttttaccattaagtgacattataattttaccaatattggaattataatataggtgtatttgcgcactcgcgacggttgatgcatcggtaaatatagctgtatctaatgttctagtcggtatttcatcatttcgctgtctaataatagcgttttctctatctgtttccattacagctgcctgaagtttattggtcggataatatgtaaaataataagaaatacatacgaataacaaaaataaaataagatataataaagatgccatttagagatctaattttgttcaacttgtccaaattcctacttacagaagatgaggaatcgttggagatagtgtcttccttatgtagaggatttgaaatatcttatgatgacttgataacttactttccagataggaaataccataaatatatttataaagtatttgaacatgtagatttatcggaggaattaagtatggaattccatgatacaactttgcgagatttagtttatcttagattgtacaagtattccaagtgtatacggccgtgttataaattaggagataatctaaaaggcatagttgttataaaggacaggaatatttatattagggaagcaaatgatgacttgatagaatatctcctcaaggaatacactcctcagatttatacatattctaatgagcgcgtccccataactggttcaaaattaattctttgtggattttctcaagttacatttatggcgtatacaacgtcgcatataacaacaaataaaaaggtagatgttctcgtttccaaaaaatgtatagatgaactagtcgatccaataaattatcaaatacttcaaaatttatttgataaaggaagcggaacaataaacaaaatactcaggaagatattttattcggtaaccggtggccaaactccataggtagctttttctatttcggattttagaatttccaaattcaccagcgatttatcggttttggtgaaatccaaggatttattaatgtccacaaatgccatttgttttgtctgtggattgtatttgaaaatggaaacgatgtagttagatagatgcgctgcgaagtttcctattagggttccgcgcttcacgtcacccagcatacttgaatcaccatcctttaaaaaaaatgataagatatcaacatggagtatatcatactcggattttaattcttctactgcatcactgacattttcacaaatactacaatacggtttaccgaaaataatcagtacgttcttcatttatgggtatcaaaaacttaaaatcgttactgctggaaaataaatcactgacgatattagatgataatttatacaaagtatacaatggaatatttgtggatacaatgagtatttatatagccgtcgccaattgtgtcagaaacttagaagagttaactacggtattcataaaatacgtaaacggatgggtaaaaaagggagggcatgtaaccctttttatcgatagaggaagtataaaaattaaacaagacgttagagacaagagacgtaaatattctaaattaaccaaggacagaaaaatgctagaattagaaaagtgtacatccgaaatacaaaatgttaccggatttatggaagaagaaataaaggcaaaaatgcaattaaaaatcgataaacttacatttcaaatatatttatctgattctgataacataaaaatatcattgaatgagatactaacacatttcaacaataatgagaatgttacattattttattgtgatgaacgagacgcagaattcgttatgtgtctcgaggctaaaacacatttctctaccacaggagaatggccgttgataataagtaccgatcaggatactatgctatttgcatctactgataatcatcctaagatgataaaaaacttaactcaactgtttaaatttgttccctcggcagaggataactatttagcaaaattaacggcgttagtgaatggatgtgatttctttcctggactctatggggcatctataacacccaccaacttaaacaaaatacaattgtttagtgattttacaatcgataatatagtcactagtttggcaattaaaaattattatagaaagactaactctaccgtagacgtgcgtaatattgttacgtttataaacgattacgctaatttagacgatgtctactcgtatgttcctccttgtcaatgcactgttcaagaatttatattttccgcattagatgaaaaatggaatgaatttaaatcatcttatttagagaccgttccgttaccctgtcaattaatgtacgcgttagaaccacgtaaggagattgatgtttcagaagttaaaactttatcatcttatatagatttcgaaaatactaaatcagatatcgatgttataaaatctatatcctcgatttttggatattctaacgaaaactgtaacacgatagtattcggcatctataaggataatttactactgagtataaataattcattttactttaacgatagtctgttaataaccaatactaaaagtgataatataataaatataggttactagattaaaaatggtgttccaactcgtgtgctctacatgcggtaaagatatttctcacgaacgatataaattgattatacgaaaaaaatcattaaaggatgtactcgtcagtgtaaagaacgaatgttgtaggttaaaattatctacacaaatagaacctcaacgtaacttaacagtgcaacctctattggatataaactaatatggatccggttaattttatcaagacatatgcgcctagaggttctattatttttattaattataccatgtcattaacaagtcatttgaatccatcgatagaaaaacatgtgggtatttattatggtacgttattatcggaacacttggtagttgaatctacctatagaaaaggagttcgaatagtcccattggatagtttttttgaaggatatcttagtgcaaaagtatacatgttagagaatattcaagttatgaaaatagcagctgatacgtcattaactttattgggtattccgtatggatttggtcatgatagaatgtattgttttaaattggtagctgactgttataaaaatgccggtgttgaaacatcgtctaaacgaatattaggtaaagatatttttctgagccaaaacttcacagacgataatagatggataaagatatatgattctaataatttaacattttggcaaattgattaccttaaagggtgagttaatatgcataactactcctccgttgttttttccctcgttctttttcttaacgttgtttgccatcactctcataatgtaaagatattctaaaatggtaaacttttgcatatcggacgcagaaattggtataaatgttgtaattgtattatttcccgtcaatggactagtcacagctccatcagttttatatcctttagagtatttctcactcgtgtctaacattctagagcattccatgatctgtttatcgttgatattggccggaaagatagattttttattttttattatattactattggcaattgtagatataacttctggtaaatatttttctaccttttcaatctcttctattttcaagccggctatatattctgctatattgttgctagtatcaataccttttcttgctaagaagtcatatgtggtattcactatatcagttttaactggtagttccattagcctttccacttctgcagaataatcagaaattggttctttaccagaaaatccagctactataataggctcaccgatgatcattggcaaaatcctatattgtaccagattaatgagagcatatttcatttccaataattctgctagttcttgagacattgatttatttgatgaatctagttggttctctagatactctaccatttctgccgcatacaataacttgttagataaaatcagggttatcaaagtgtttagcgtggctagaatagtgggcttgcatgtattaaagaatgcggtagtatgagtaaaccgttttaacgaattatatagtctccagaaatctgtggcgttacatacatgagccgaatgacatcgaagattgtccaatatttttaatagctgctctttgtccattatttctatatttgactcgcaacaattgtagataccattaatcactgattcctttttcgatgccggacaatagcacaattgtttagctttggactctatgtattcagaattaatagatatatctcttaatacagattgcactatacattttgaaactatgtcaaaaattgtagaacgacgctgttctgcagccatttaactttaaataatttacaaaaatttaaaatgagcatccgtataaaaatcgataaactgcgccaaattgtggcatatttttcagagttcagtgaagaagtgtctataaatgtagactcgacggatgagttaatgtatatttttgccgccttgggcggatctgtaaacatttgggccattatacctctcagtgcatcagtgttctaccgcggagccgaaaatattgtgtttaatcttccggtgtccaaggtaaaatcgtgtttgtgtagttttcacaatgatgccatcatagatatagaacctgatctggaaaataatctagtaaaactttctagttatcatgtagtaagtgtcgattgtaacaaggaactgatgcctattaggacagatactactatttgtctaagtatagatcaaaagaaatcttacgtgtttaattttcacaagtatgaagaaaaatgttgtggtagaaccgtcattcatttagaatggttgttgggctttatcaagtgtattagtcagcatcagcatttggctattatgtttaaagatgacaatattattatgaagactcctggtaatactgatgcgttttccagggaatattctatgactgaatgttctcaagaactacaaaagttttctttcaaaatagctatctcgtctctcaacaaactacgaggattcaaaaagagagtcaatgtttttgaaactagaatcgtaatggataatgacgataacattctaggaatgttgttttcggatagagttcaatcctttaagatcaacatctttatggcgtttttagattaatactttcaatgagataaatatgggtggcggagtaagtgttgagctccctaaacgggatccgcctccgggagtacccactgatgagatgttattaaacgtggataaaatgcatgacgtgatagctcccgctaagcttttagaatatgtgcatataggaccactagcaaaagataaagaggataaagtaaagaaaagatatccagagtttagattagtcaacacaggacccggtggtctttcggcattgttaagacaatcgtataatggaaccgcacccaattgctgtcgcacttttaatcgtactcattattggaagaaggatggaaagatatcagataagtatgaagagggtgcagtattagaatcgtgttggccagacgttcacgacactggaaaatgcgatgttgatttattcgactggtgtcagggggatacgttcgatagaaacatatgccatcagtggatcggttcagcctttaataggagtgatagaactgtagagggtcaacaatcgttaataaatctgtataataagatgcaaacattatgtagtaaagatgctagtgtaccaatatgtgaatcatttttgcatcatttacgcgcacacaatacagaagatagcaaagagatgatcgattatattctaagacaacagtctgcggactttaaacagaaatatatgagatgtagttatcccactagagataagttagaagagtcattaaaatatgcggaacctcgagaatgttgggatccagagtgttcgaatgccaatgttaatttcttactaacacgtaattataataatttaggactttgcaatattgtacgatgtaatactagcgtgaacaacttacagatggataaaacttcctcattaagattgtcatgtggattaagcaatagtgatagattttctactgttcccgtcaatagagcaaaagtagttcaacataatattaaacattcgttcgacctaaaattgcatttgatcagtttattatctctcttggtaatatggatactaattgtagctatttaaatgggtgccgcggcaagcatacagacgacggtgaatacactcagcgaacgtatctcgtctaaattagaacaagaagcgaacgctagtgctcaaacaaaatgtgatatagaaatcggaaatttttatatccgacaaaaccatggatgtaacctcactgttaaaaatatgtgctctgcggacgcggatgctcagttggatgctgtgttatcagccgctacagaaacatatagtggattaacaccggaacaaaaagcatacgtgccagctatgtttactgctgcgttaaacattcagacaagtgtaaacactgttgttagagattttgaaaattatgtgaaacagacttgtaattctagcgcggtcgtcgataacaaattaaagatacaaaacgtaatcatagatgaatgttacggagccccaggatctccaacaaatttggaatttattaatacaggatctagcaaaggaaattgtgccattaaagcgttgatgcaattgacgactaaggccactactcaaatagcacctagacaagttgctggtacaggagttcagttttatatgattgttatcggtgttataatattggcagcgttgtttatgtactatgccaagcgtatgctgttcacatccaccaatgataaaatcaaacttattttagccaataaggaaaacgtccattggactacttacatggacacattctttagaacttctccgatggttattgctaccacggatatacaaaactgaaaatatattgataatattttaatagattaacatggaagttatcgctgatcgtctagacgatatagtgaaacaaaatatagcggatgaaaaatttgtagattttgttatacacggtctagagcatcaatgtcctgctatacttcgaccattaattaggttgtttattgatatactattatttgttatagtaatttatatttttacggtacgtctagtaagtagaaattatcaaatgttgttggtggcgctagtcatcacattaactattttttattactttatactataatagtactagactgacttctaacaaacatctcacctgccataaataaatgcttgatattaaagtcttctatttctaacactattccatctgtggaaaataatactctgacattatcgctaattgacacatcggtgagtgatatgcctataaagtaataatcttctttgggcacatataccagtgtaccaggttctaacaacctatttactggtgctcctgtagcatactttttctttaccttgagaatatccatcgtttgcttggtcaatagcgatatgtgattttttatcaaccactcgaaaaagtaattggagtgttcatatcctctacgggctattgtctcatggccgtgtatgaaatttaagtaacacgactgtggtagatttgttctatagagccggttgccgcaaatagatagaactaccaatatgtctgtacaaatgttaaacattaattgattaacagaaaaaacaatgttcgttctgggaatagaaaccagatcaaaacaaaattcgttagaatatatgccacgtttatacattgaatataaaataactacagtttgaaaaataacagtatcatttaaacatttaacttgcggggttaatctcacaactttactgtttttaaactgttcaaaatatagcatcgatccatgagaaatacgtttagccgcctttaatagaggaaatcccaccgcctttctggatctcaccaacgacgatagttctgaccagcaactcatttcttcatcatccacctgttttaacatataataggcaggagatagatatccgtcattgcaatattccttctcgtaggcacacaatctaatattgataaaatctccattctcttctctgcatttattatcttgtttcggtggctgattaggctgtagtcttggtttaggctttggtatatcgttgttgaatctattttggtcattaaatctttcatttcttcctggtatatttttatcacctcgtttggttggatttttgtctatattatcgtttgtaacatcggtacgggtattcatttatcacaaaaaaaacttctctaaatgagtctactgctagaaaacctcatcgaagaagataccatattttttgcaggaagtatatctgagtatgatgatttacaaatggttattgccggcgcaaaatccaaatttccaagatctatgctttctatttttaatatagtacctagaacgatgtcaaaatatgagttggagttgattcataacgaaaatatcacaggagcaatgtttaccacaatgtataatataagaaacaatttgggtctaggagatgataaactaactattgaagccattgaaaactatttcttggatcctaacaatgaagttatgcctcttattattaataatacggatatgactgccgtcattcctaaaaaaagtggtaggagaaagaataagaacatggttattttccgtcaaggatcatcacctatcttgtgtattttcgaaactcgtaaaaagattaatatttataaagaaaatatggaatccgcatcgactgagtatacacctatcggagacaacaaggctttgatatctaaatatgcgggaattaatatcctaaatgtgtattctccttccacatccataagattgaatgccatttacggattcaccaataaaaataaactagagaaacttagtactaataaggaactagaatcgtatagttctagccctcttcaagaacccattaggttaaatgattttctgggactattggaatgtgttaaaaagaatattcctctaacagatattccgacaaaggattgattactataaatggagaatgttcctaatgtatactttaatcctgtgtttatagagcccacgtttaaacattctttattaagtgtttataaacacagattaatagttttatttgaagtattcgttgtattcattctaatatatgtattttttagatctgaattaaatatgttcttcatgcctaaacgaaaaatacccgatcctattgatagattacgacgtgctaatctagcgtgtgaagacgataaattaatgatctatggattaccatggatgacaactcaaacatctgcgttatcaataaatagtaaaccgatagtgtataaagattgtgcaaagcttttgcgatcaataaatggatcacaaccagtatctcttaacgatgttcttcgcagatgatgattcattttttaagtatttggctagtcaagatgatgaatcttcattatctgatatattgcaaatcactcaatatctagactttctgttattattattgatccaatcaaaaaataaattagaagccgtgggtcattgttatgaatctctttcagaggaatacagacaattgacaaaattcacagactttcaagattttaaaaaactgtttaacaaggtccctattgttacagatggaagggtcaaacttaataaaggatatttgttcgactttgtgattagtttgatgcgattcaaaaaagaatcctctctagctaccaccgcaatagatcctattagatacatagatcctcgtcgcgatatcgcattttctaacgtgatggatatattaaagtcgaataaagtgaacaataattaattctttattgtcatcatgaacggcggacatattcagttgataatcggccccatgttttcaggtaaaagtacagaattaattagacgagttggtaccaaaaattgaaaaactagcgtctttttttgctcgactgcagaccatgggaagctctaagagtaaaccgaaagatcccagtcagagaggcgttcaggttgaaacgatatcaccgggtgatggccgcacgtttccaaaacgagggcaaacgtgcgtcgttcattacactggaatgctggaagacggaaaaaaagtagattcctcacgcgacaggaataagccgttcaagtttatgcttgggaagcaggaagtgatcagagggtgggaagagggagtagcgcaaatgtcagtaggccagagagcaaagcttactatatcacccgattatgcctatggggcgacagggcatccggggataattccccctcacgcaactctcgttttcgacgtcgagttgttgaaacttgagggagtgcaggtcgaaacgatctcccccggggatggacggacttttcctaagcggggccagacctgcgtagtccattacacaggcatgctcgaggacgggaaaaaagttgactcctcaagagaccgcaacaagcctttcaaatttatgctgggaaaacaagaagtaatcaggggctgggaagaaggcgtcgcgcagatgagtgtaggtcagcgagccaaacttacgatttcaccggattatgcctacggggcgaccggccacccggggattattcccccgcatgcaaccctcgtttttgatgtcgaacttctcaagctggagagtgggtctggagggggctcaatggacccatttcttgtcctcctgcactctgtatcatccagcctgagtagcagcgagctgacagagttgaagtttctttgcctcggcagggtgggtaagagaaagctcgaacgcgtacagtccggcttggacctcttcagtatgttgcttgagcagaacgatctcgagccaggacataccgagcttctgagagagctgttggccagtcttaggcggcacgatcttctccgcagagtagatgattttgaagccggtgcggctgccggtgcagcgcccggtgaagaagacctgtgtgccgcctgattaattaatttttatgagctcggaggtaatgatatgtatcaatcggtgtgtagaaagtgttacatcgactcataatattatattttttatctaaaaaactaaaaataaacattgattaaattttaatataatacttaaaaatggatgttgtgtcgttagataaaccgtttatgtattttgaggaaattgataatgagttagattacgaaccagaaagtgcaaatgaggtcgcaaaaaaactaccgtatcaaggacagttaaaactattactaggagaattattttttcttagtaagttacagcgacacggtatattagatggtgccaccgtagtgtatataggatcggctcctggtacacatatacgttatttgagagatcatttctataatttaggagtgatcatcaaatggatgctaattgacggccgccatcatgatcctattttaaatggattgcgtgatgtgactctagtgactcggttcgttgatgaggaatatctacgatccatcaaaaaacaactgcatccttctaagattattttaatttctgatgtaagatccaaacgaggaggaaatgaacctagtacggcggatttactaagtaattacgctctacaaaatgtcatgattagtattttaaaccccgtggcatctagtcttaaatggagatgcccgtttccagatcaatggatcaaggacttttatatcccacacggtaataaaatgttacaaccttttgctccttcatattcagctgaaatgagattattaagtatttataccggtgagaacatgagactgactcgagttaccaaattagacgctgtaaattatgaaaaaaagatgtactaccttaataagatcgtccgtaacaaagtagttgttaactttgattatcctaatcaggaatatgactattttcacatgtactttatgctgaggaccgtgtactgcaataaaacatttcctactactaaagcaaaggtactatttctacaacaatctatatttcgtttcttaaatattccaacaacatcaactgaaaaagttagtcatgaaccaatacaacgtaaaatatctagcaaaaattctatgtctaaaaacagaaatagcaagagatccgtacgcggtaataaatagaaacgtgctactgagatatactaccgatatagagtataatgatttagttactttaataaccgttagacataaaattgattctatgaaaactgtgtttcaggtatttaacgaatcatccataaattatactccggttgatgatgattatggagaaccaatcattataacatcgtatcttcaaaaaggtcataacaagtttcctgtaaattttctatacatagatgtggtaatatctgacttatttcctagctttgttagactagatactacagaaactaatatagttaatagtgtactacaaacaggcgatggtaaaaagactcttcgtcttcccaaaatgttagagacggaaatagttgtcaagattctctatcgccctaatataccattaaaaattgttagatttttccgcaataacatggtaactggagtagagatagccgatagatctgttatttcagtcgctgattaatcaattagtagagatgagataagaacattataataatcaataatattatcttatatctcgtttagaaaaatgctaatattaaaatagctaacgctagtaatccaatcggaagccatttgatatctataatagggtatctaatttcctgattcagatagcggacagctatattctcggtagctactcgtttggaatcacaaacattatttacatctaatttactatctgtaatggaaacgtttcccaatgaaatggtacaatccgatacattgcattttgttatatttttttttaaagaggctggtaacaacgcatcgcttcgtttacatggctcgtaccaacaataatagggtaatcttgtatctattcctatccgtactatgcttttatcaggataaatacatttacatcgtatatcgtctttgttagcatcacagaatgcataaatttgttcgtccgtcatgataaaaatttaaagtgtaaatataactattatttttatagttgtaataaaaagggaaatttgattgtatactttcggttctttaaaagaaactgacttgataaaaatggctgtaatctctaaggttacgtatagtctatatgatcaaaaagagattaatgctacagatattatcattagtcatgttaaaaatgacgacgatatcggtaccgttaaagatggtagactaggtgctatggatggggcattatgtaaaacttgtgggaaaacggaattggaatgtttcggtcactggggtaaagtaagtatttataaaactcatatagttaagcctgaatttatttcagaaattattcgtttactgaatcatatatgtattcactgcggattattgcgttcacgagaaccgtattccgacgatattaacctaaaagagttatcgggacacgctcttaggagattaaaggataaaatattatccaagaaaaagtcatgttggaacagcgaatgtatgcaaccgtatcaaaaaattactttttcaaagaaaaaggtttgtttcgtcaacaagttggatgatattaacgttcctaattctctcatctatcaaaagttaatttctattcatgaaaagttttggccattattagaaattcatcaatatccagctaacttattttatacagactactttcccatccctccgctgattattagaccggctattagtttttggatagatagtatacccaaagagaccaatgaattaacttacttattaggtatgatcgttaagaattgtaacttgaatgctgatgaacaggttatccagaaggcggtaatagaatacgatgatattaaaattatttctaataacactaccagtatcaatttatcatatattacatccggcaaaaataatatgattagaagttatatcgtcgcccgacgaaaagatcagaccgctagatctgtaattggtcccagtacatctatcaccgttaatgaggtaggaatgcccgcatatattagaaatacacttacagaaaagatatttgttaatgcctttacagtggataaagttaaacaactattagcgtcaaaccaagttaaattttactttaataaacgattaaaccaattaacaagaatacgccaaggaaagtttatcaaaaataaaatacatttattgcctggtgattgggtagaagtagctgttcaagaatatacaagtattatttttggaagacagccgtctctacatagatacaacgtcatcgcttcatctatcagagctaccgaaggagatactatcaaaatatctcccggaattgccaactctcaaaatgctgatttcgacggagatgaagaatggatgatattggagcaaaatcctaaagccgtaattgaacaaagtattcttatgtatccgacgacgttactcaaacacgatattcatggagcccccgtttatggatctattcaagatgaaatcgtagcagcgtattcattgtttaggatacaagatctttgtttagatgaagtattgaacatcttggggaaatatggaagagagttcgatcctaaaggtaaatgtaaattcagcggtaaagatatctatacttacttgataggtgaaaagattaattatccgggtctcttaaaggatggtgaaattattgcaaacgacgtagatagtaattttgttgtggctatgaggcatctgtcattggctggactcttatccgatcataagtcgaacgtggaaggtatcaactttattatcaagtcatcttatgtttttaagagatatctatctatttacggttttggggtgacattcaaagatctgagaccaaattcgacgttcactaataaattggaggccatcaacgtagaaaaaatagaacttatcaaagaagcatacgccaaatatctcaacgatgtaagagacgggaaaatagttccattatctaaagctttagaggcggactatgtggaatccatgttatccaacttgacaaatcttaatatccgagagatagaagaacatatgagacaaacgctgatagatgatccagataataacctcctgaaaatggccaaagcgggttataaagtaaatcctacagaactaatgtatattctaggtacgtatggacaacaaaggattgatggtgaaccagcagagactcgagtattgggtagagtcttaccttactatcttccagactctaaggatccagaaggaagaggttacattcttaattctttaacaaaaggattaacgggttctcaatattacttttcgatgctggttgccagatctcaatctactgatatcgtctgtgaaacatcacgtaccggaacactggctagaaaaatcattaaaaagatggaggatatggtggtcgacggatacggacaagtagttataggtaatacgctcatcaagtacgccgccaattataccaaaattctaggctcagtatgtaaacctgtagatcttatctatccagatgagtccatgacttggtatttggaaattagtgctctgtggaataaaataaaacagggattcgtttactctcagaaacagaaacttgcaaagaagacattggcgccgtttaatttcctagtattcgtcaaacccaccactgaggataatgctattaaggttaaggatctgtacgatatgattcataacgtcattgatgatgtgagagagaaatacttctttacggtatctaatatagattttatggagtatatattcttgacgcatcttaatccttctagaattagaattacaaaagaaacggctatcactatctttgaaaagttctatgaaaaactcaattatactctaggtggtggaactcctattggaattatttctgcacaggtattgtctgagaagtttacacaacaagccctgtccagttttcacactactgaaaaaagtggtgccgtcaaacaaaaacttggtttcaacgagtttaataacttgactaatttgagtaagaataagaccgaaattatcactctggtatccgatgatatctctaaacttcaatctgttaagattaatttcgaatttgtatgtttgggagaattaaatccagacatcactcttcgaaaagaaacagataaatatgtagtagatataatagttaatagattatacatcaagagagcagaaataaccgaattagttgtcgaatatatgattgaacgatttatctcctttagcgtcattgtaaaggaatggggtatggagacattcattgaggacgaggataatattagatttactgtctacctaaatttcgttgaaccggaagaattgaatcttagtaagtttatgatggttcttccgggtgccgccaacaagggcaagattagtaaattcaagattcctatctctgattatacgggttatgacgacttcaatcaaacaaaaaagctcaataagatgactgtagaactcatgaatctaaaagaattgggttctttcgatttggaaaacgtcaacgtgtatcctggagtatggaatacatacgatatcttcggtatcgaggccgctcgtgaatacttgtgcgaagccatgttaaacacctatggagaagggttcgattatctgtatcagccttgtgatcttctcgctagtttactatgtgctagttacgaaccagaatcagttaataaattcaagttcggtgcagctagtactcttaagagagctacgttcggagacaataaagcattgttaaacgcggctcttcataaaaagtcagaacctattaacgataatagtagctgccacttttttagcaaggtccctaatataggaactggatattacaaatactttatcgacttgggtcttctcatgagaatggaaaggaaactatctgataagatatcttctcaaaagatcaaggaaatggaagaaacagaagacttttaattcttatcaataacatatttttctatgatctgtcttttaaacgatggattttccacaaatgcgcctctcaagtccctcatagaatgatacacgtataaaaaatatagcataggcaatgactccttatttttagacattagatatgccaaaatcatagccccgcttctatttactcccgcagcacaatgaaccaacacgggctcgtttcgttgatcacatttagataaaaaggcggttacgtcgtcaaaatatttactaatatcggtagttgtatcatctaccaacggtatatgaataatattaatattagagttaggtaatgtatatttatccatcgtcaaatttaaaacatatttgaacttaacttcagatgatggtgcatccatagcatttttataatttcccaaatacacattattggttacccttgtcattatagtgggagatttggctttgtgcatatctccagttgaacgtagtagtaagtatttatacaaacttttcttatccatttataacgtacaaatggataaaactactttatcggtaaacgcgtgtaatttagaatacgttagagaaaaggctatagtaggcgtacaagcagccaaaacatcaacacttatattctttgttattatattggcaattagtgcgctattactctggtttcagacgtctgataatccagtctttaatgaattaacgagatatatgcgaattaaaaatacggttaacgattggaaatcattaacggatagcaaaacaaaattagaaagtgatagaggtagacttctagccgctggtaaggatgatatattcgacttcaaatgtgtggatttcggcgcctattttatagctatgcgattggataagaaaacatatctgccgcaagctattaggcgaggtactggagacgcgtggatggttaaaaaggcggcaaaggtcgatccatctgctcaacaattttgtcagtatttgataaaacacaagtctaataatgttattacttgtggtaatgagatgttaaatgaattaggttatagcggttattttatgtcaccgcattggtgttccgattttagtaatatggaatagtgttagataaatgcggtaacgaatgttcctgtaaggaaccataacagtttagatttaacgttaaagatgagcataaacataataaacaaaattacaatcaaacctataacattaatatcaaacaatccaaaaaatgaaatcagtggagtagtaaacgcgtacataactcctggataacgtttagcagctgccgttcctattctagaccaaaaattcggtttcatgttttcgaagcggtgttctgcaacaagtcggggatcgtgttctacatatttggcggcgttatccagtatctgcctattgatcttcatttcgttttcgattctggctatttcaaaataaaatcccgatgatagacctccagactttataatttcatctacgatgttcagcgccgtagtaactctaataatataggctgataagctaacatcataccctcctgtatatgtgaatatggcatgatttttgtccattacaagctcggttttaactttattgcctgtaataatttctctcatctgtaggatatctatttttttgtcatgcattgccttcaagacgggacgaagaaacgtaatatcctcaataacgttatcgttttctacaataactacatattctacctttttattttctaactcggtaaaaaaattagaatcccatagggctaaatgtctagcgatatttcttttcgtttcctctgtacacatagtgttacaaaaccctgaaaagaagtgagtatacttgtcatcatttctaatgtttcctccagtccactgtataaacgcataatccttgtaatgatctggatcatccttgactaccacaacatttcttttttctggcataacttcgttgtcctttacatcatcgaacttctgatcattaatatgctcatgaacattaggaaatgtttctgatggaggtctatcaataactggcacaacaataacaggagttttcaccgccgccatttagttattgaaattaatcatatacaactctttaatacgagttatattttcgtctatccattgtttcacatttacatatttcgacaaaaagatataaaatgcgtattccaatgcttctctgtttaatgaattactaaaatatacaaacacgtcactgtctggcaataaatgatatcttagaatattgtaacaatttattttgtattgcacatgttcgtgatctatgagttcttcttcgaatggcataggatctccgaatctgaaaacgtataaataggagttagaataataatatttgagagtattggtaatatataaactctttagcggtataattagtttttttctctcaatttctatttttagatgtgatggaaaaatgactaattttgtagcattagtatcatgaactctaatcaaaatcttaatatcttcgtcacacgttagctctttgaagtttttaagagatgcatcagttggttctacagatggagtaggtgcaacaattttttgttctacacatgtatgtactggagccattgttttaactataatggtgcttgtatcgaaaaactttaatgcagatagcggaagctcttcgccgcgactttctacatcgtaattgggttctaacgccgatctctgaatggatactagttttctaagttctaatgtgattctctgaaaatgtaaatccaattcctccggcattatagatgtgtatacatcggtaaataaaactatagtatccaacgatcccttctcgcaaattctagtcttaaccaaaaaatcgtatataaccacggagatggcgtatttaagagtggattcttctaccgttttgttcttggatgtcatataggaaactataaagtccgcactactgttaagaatgattactaacgcaactatatagttcaaattaagcattttggaaacataaaataactctgtagacgatacttgactttcgaataagtttgcagacaaacgaagaaagaacagacctctcttaatttcagaagaaaactttttttcgtattcctgacgtctagagtttatatcaataagaaagttaagaattagtcggttaatgttgtatttcattacccaagtttgagatttcataatattatcaaaagacatgataatattaaagataaagcgctgactatgaacgaaatagctatatggttcgctcaagaatatagtcttgttaaacgtggaaacgataactgtatttttaatcacgtcagcggcatctaaattaaatataggtatatttattccacacactctacaatatgccacaccatcttcataataaataaattcgttagcaaaattattaattttagtgaaatagttagcgtcaactttcatagcttccttcaatctaatttgatgctcacacggtgcgaattccactctaacatcccttttccatgcctcaggttcatcgatctctataatatctagtttcttgcgtttcacaaacacgggctcgtctctcgcgatgagatctgtatagtaactatgtaaatgataactagatagaaagatgtagctatatagatgacgatcctttaagagaggtataataactttaccccaatcagataaactattgttatggtcttcggaaaaagaatttttataaatttttccagtattttccaaatatacgtacttgacatctaaaaaatccttaatgataataggaatggataatccgtctattttataaagaaatacatatcgcacattatacttttttttggaaatgggaataccgatgtgtctacataaatatgcaaagtctaaatattttttagagaatcttagttggtccaaattcttttccaagtacggtaatagatttttcatattgaacggtatcttcttaatctctggttctagttccgcattaaatgatgaaactaagtcactatttttataactaacgattacatcacctctaacatcatcatttaccagaatactgatcttcttttgtcgtaaatacatgtctaatgtgttaaaaaaaagatcatacaagttatacgtcatttcatctgtggtattcttgtcattgaaggataaactcgtactaatctcttctttaacagcctgttcaaatttatatcctatatacgaaaaaatagcaaccagtgtttgatcatccgcgtcaatattctgttctatcgtagtgtataacaatcgtatatcttcttctgtgatagtcgatacgttataaaggttgataacgaaaatatttttatttcgtgaaataaagtcatcgtaggattttggacttatattcgcgtctagtagatatgcttttatttttggaatgatctcaattagaatagtctctttagagtccatttaaagttacaaacaactaggaaattggtttatgatgtataatttttttagtttttatagattctttattctatacttaaaaaatgaaaataaatacaaaggttcttgagggttgtgttaaattgaaagcgagaaataatcataaattatttcattatcgcgatatccgttaagtttgtatcgtaatggcgtggtcaattacaaataaagcggatactagtagcttcacaaagatggctgaaatcagagctcatctaaaaaatagcgctgaaaataaagataaaaacgaggatattttcccggaagatgtaataattccatctactaagcccaaaaccaaacgagccactactcctcgtaaaccagcggctactaaaagatcaaccaaaaaggaggaagtggaagaagaagtagttatagaggaatatcatcaaacaactgaaaaaaattctccatctcctggagtcagcgacattgtagaaagcgtggccgctgtagagctcgatgatagcgacggggatgatgaacctatggtacaagttgaagctggtaaagtaaatcatagtgctagaagcgatctttctgacctaaaggtggctaccgacaatatcgttaaagatcttaagaaaattattactagaatctctgcagtatcgacggttctagaggatgttcaagcagctggtatctctagacaatttacttctatgactaaagctattacaacactatctgatctagtcaccgagggaaaatctaaagttgttcgtaaaaaagttaaaacttgtaagaagtaaatgcgtgcacttttttataaagatggtaaactctttaccgataataattttttaaatcctgtatcagacgataatccagcgtatgaggttttgcaacatgttaaaattcctactcatttaacagatgtagtagtatatgaacaaacgtgggaggaggcgttaactagattaatttttgtgggaagcgattcaaaaggacgtagacaatacttttacggaaaaatgcatgtacagaatcgcaacgctaaaagagatcgtatttttgttagagtatataacgttatgaaacgaattaattgttttataaacaaaaatataaagaaatcgtccacagattccaattatcagttggcggtttttatgttaatggaaactatgttttttattagatttggtaaaatgaaatatcttaaggagaatgaaacagtagggttattaacactaaaaaataaacacatagaaataagtcccgatgaaatagttatcaagtttgtaggaaaggacaaagtttcacatgaatttgttgttcataagtctaatagactatataagccgctattgaaactgacggatgattctagtcccgaagaatttctgttcaacaaactaagtgaacgaaaggtatacgaatgtatcaaacagtttggtattagaatcaaggatctccgaacgtatggagtcaattatacgtttttatataatttttggacaaatgtaaagtccatatctcctcttccatcaccaaaaaagttaatagcgttaactatcaaacaaactgctgaagtggtaggtcatactccatcaatttcaaaaagagcttacatggcaacgactattttagaaatggtaaaggataaaaattttttagatgtagtatctaaaactacgttcgatgaattcctatctatagtcgtagatcacgttaaatcatctacggatggatgatatagatctttacacaaataattacaagaccgataaatggaaatggataagcgtatgaaatctctcgcaatgacagctttcttcggagagctaaacacattagatattatggcattgataatgtctatatttaaacgccatccaaacaataccattttttcagtggataaggatggtcagtttatgattgatttcgaatacgataattataaggcttctcaatatttggatctgaccctcactccgatatctggagatgaatgcaagactcacgcatcgagtatagccgaacaattggcgtgtgtggatattattaaagaggatattagcgaatatatcaaaactactccccgtcttaaacgatttataaaaaaataccgcaatagatcagatactcgtatcagtcgagatacagaaaagcttaaaatagctctagctaaaggcatagattacgaatatataaaagacgcttgttaataagtaaatgaaaaaaaactagtcgtttataataaaacacaatatggatgccaacatagtatcatcttctactattgcaacgtatatagacgctttagcaaagaatgcttcagaattagaacagaggtctaccgcatacgaaataaataatgaattggaactagtatttattaagccgccattaattactttgacaaatgtagtgaatatctctacgattcaggaatcgtttattcgatttaccgttactaataaggaaggtgtcaaaattagaactaagattccattatctaaggtacatggtctagatgtaaaaaatgtacagttagtagatgctatagataacatagtttgggaaaagaaatcattagtgacggaaaatcgtcttcacaaagaatgcttgttgagactatcgacagaggaacgtcatatatttttggattacaagaaatatggatcctctatccgactagaattagtcaatcttattcaagcaaaaacaaaaaactttacgatagactttaagctaaaatattttctaggatccggtgcccaatctaaaagttctttgttgcacgctattaatcatccaaagtcaaggcctaatacatctctggaaatagaattcacacctagagacaatgaaaaagttccatatgatgaactaataaaggaattgacgactctatcacgtcatatatttatggcttctccagagaatgtaattctttctccgcctattaacgcacctataaagacttttatgttgcctaaacaagatatagtaggtctggatctggaaaatctatatgccgtaactaagactgacggcattcctataactatcagagttacatcaaacgggttgtattgttattttacacatcttgggtatattattagatatccagttaagagaataatagattccgaagtagtagtctttggtgaggcagttaaggataagaactggaccgtatatctcattaagctaatagagcctgtgaatgcaatcaatgatagactagaagaaagtaagtatgttgaatctaaactagtggatatttgtgatcggatagtattcaagtcaaagaaatatgaaggtccgtttactacaactagtgaagtcgtcgatatgttatctacatatttaccaaagcaaccagaaggtgttattctgttctattcaaagggacctaaatctaacattgattttaaaattaaaaaggaaaatactatagaccaaactgcaaatgtagtatttaggtacatgtccagtgaaccaattatctttggagaatcgtctatctttgtagagtataagaaatttagcaacgataaaggctttcctaaagaatatggttctggtaagattgtgttatataacggcgttaattatctaaataatatctattgtttggaatatattaatacacataatgaagtgggtattaagtccgtggttgtacctattaagtttatagcagaattcttagttaatggagaaatacttaaacctagaatcgataaaaccatgaaatatattaactcagaagattattatggaaatcaacataatatcatagtcgaacatttaagagatcaaagcatcaaaataggagatatctttaacgaggataaactatcggatgtgggacatcaatacgccaataatgataaatttagattaaatccagaagttagttattttacgaataaacgaactagaggaccgttgggaattttatcaaactacgtcaagactcttcttatttctatgtattgttccaaaacatttttagacgattccaacaaacgaaaggtattggcgattgattttggaaacggtgctgacctggaaaaatacttttatggagagattgcgttattggtagcgacggatccggatgctgatgctatagctagaggaaatgaaagatacaacaaattaaactctggaattaaaaccaagtactacaaatttgactacattcaggaaactattcgatccgatacatttgtctctagtgtcagagaagtattctattttggaaagtttaatatcatcgactggcagtttgctatccattattcttttcatccgagacattatgctaccgtcatgaataacttatccgaactaactgcttctggaggcaaggtattaatcactaccatggacggagacaaattatcaaaattaacagataaaaagacttttataattcataagaatttacctagtagcgaaaactatatgtctgtagaaaaaatagctgatgatagaatagtggtatataatccatcaacaatgtctactccaatgactgaatacattatcaaaaagaacgatatagtcagagtgtttaacgaatacggatttgttcttgtagataacgttgatttcgctacaattatagaacgaagtaaaaagtttattaatggcgcatctacaatggaagatagaccgtctacaaaaaactttttcgaactaaatagaggagccattaaatgtgaaggtttagatgtcgaagacttacttagttactatgttgtttatgtcttttctaagcggtaaataataatatggtatgggttctgatatccccgttctaaatgcattaaataattccaatagagcgatttttgttcctataggaccttccaactgtggatactctgtattgttaatagatatattaatacttttgtcgggtaacagaggttctacgtcttctaaaaataaaagtttgataacatctggcctgttcataaataaaaacttggcgattctatatatactcttattatcaaatctagccattgtcttatagatgtgagctactgtaggtgtaccatttgattttctttctaatactatatatttctctcgaagaagttcttgcacatcatctgggaataaaatactactgttgagtaaatcagttattttttttatatcgatattgatggacatttttatagttaaggataataagtatcccaaagtcgataacgacgataacgaagtatttatacttttaggaaatcacaatgactttatcagatcaaaattaacaaaattaaaggagcatgtatttttttctgaatatattgtgactccagatacatatggatctttatgcgtcgaattaaatgggtctagttttcagcacggtggtagatatatagaggtggaggaatttatagatgctggaagacaagttagatggtgttctacatccaatcatatatctgaagatatacccgaagatatacacactgataaatttgtcatttatgatatatacacttttgacgctttcaagaataaacgattggtattcgtacaggtacctccgtcgttaggagatgatagctatttgactaatccgttattgtctccgtattatcgtaattcagtagccagacaaatggtcaatgatatgatttttaatcaagattcatttttaaaatatttattagaacatctgattagaagccactatagagtttctaaacatataacaatagttagatacaaggataccgaagaattaaatctaacgagaatatgttataatagagataagtttaaggcgtttgtattcgcttggtttaacggcgtttcggaaaatgaaaaggtactagatacgtataaaaaggtatctaatttgatataatgaattcagtgactgtatcacacgcgccatatactattacttatcacgatgattgggaaccagtaatgagtcaattggtagagttttataacgaagtagccagttggctgctacgagacgagacgtcgcctattcctgataagttctttatacagttgaaacaaccgcttagaaataaacgagtatgtgtgtgcggtatagatccgtatccgaaagatggaactggtgtaccgttcgaatcaccaaattttacaaaaaaatcaattaaggagatagcttcatctatatctagattaaccggagtaattgattataaaggttataaccttaatataatagacggggttataccctggaattattacttaagttgtaaattaggagaaacaaaaagtcacgcgatctactgggataagatttccaagttactgctgcagcatataactaaacacgttagtgttctttattgtttgggtaaaacagatttctcgaatatacgggcaaagttagaatccccggtaactaccatagtgggatatcatccagcggctagagaccgtcaattcgagaaagatcgatcatttgaaattatcaacgttttactggaattagacaacaaggtacctataaattgggctcaagggtttatttattaatgctttagtgaaattttaacttgtgttctaaatggatgcggctattagaggtaatgatgttatctttgttcttaagactataggtgtcccgtcagcgtgcagacaaaatgaagatccaagatttgtagaagcatttaaatgcgacgagttagaaagatatattgagaataatccagaatgtacactattcgaaagtcttagggatgaggaagcatactctatagtcagaattttcatggatgtagatttagacgcgtgtctagacgaaatagattatttaacggctattcaagattttattatcgaggtgtcaaactgtgtagctagattcgcgtttacagaatgcggcgccattcatgaaaatgtaataaaatccatgagatctaatttttcattgactaagtctacaaatagagataaaacaagttttcatattatctttttagacacgtataccactatggatacattgatagctatgaaacgaacactattagaattaagtagatcatctgaaaatccactaacaagatcgatagacactgccgtatataggagaaaaacaactcttcgggttgtaggtactaggaaaaatccaaattgcgacactattcatgtaatgcaaccacctcatgataatatagaagattacctattcacttacgtggatatgaacaacaatagttattacttttctctacaacgacgattggaggatttagttcctgataagttatgggaaccagggtttatttcattcgaagacgctataaaaagagtttcaaaaatattcattaattctataataaactttaatgatctcgatgaaaataattttacaacggtaccactggtcatagattacgtaacaccttgtgcattatgtaaaaaacgatcgcataaacatccgcatcaactatcgttggaaaatggtgctattagaatttacaaaactggtaatccacatagttgtaaagttaaaattgttccgttggatggtaataaactgtttaatattgcacaaagaattttagacactaactctgttttattaaccgaacgaggagaccatatagtttggattaataattcatggaaatttaacagcgaagaacccttgataacaaaactaattttgtcaataagacatcaactacctaaggaatattcaagcgaattactctgtccaagaaaacgaaagactgtagaagctaacatacgagacatgttagtagattcagtggagaccgatacctatccggataaacttccgtttaaaaatggtgtattggacctggtagacggaatgttttactctggagatgatgctaaaaaatatatgtgtactgtatcaaccggatttaaatttgacgatacaaagttcgtcgaagacagtccagaaatggaagagttaatgaatatcattaacgatatccaaccattaacggatgaaaataagaaaaatagagagctatatgaaaaaacattatctagttgtttatgcggtgctaccaaaggatgtttaacattcttttttggagaaactgcaactggaaagtcgacaaccaaacgtttgttaaagtctgctatcggtgacctgtttgttgagacgggtcaaacaattttaacagatgtattggataaaggacctaatccatttatcgctaacatgcatttgaaaagatctgtattctgtagcgaactacctgattttgcatgtagtgggtcaaagaaaatcagatctgataatattaaaaagttgacagaaccttgtgtcattggaagaccgtgtttctccaataaaattaataatagaaaccatgcgacaatcattatcgatactaattacaaacctgtttttgataggatagataacgcattaatgagaagaattgccgtcgtgcgattcagaacacacttttctcaaccttctggtagagaggctgctgaaaataatgacgcgtacgataaagtcaaactattagacgaggggttagatggtaaaatacaaaataatagatatagattcgcatttctatacttgttggtgaaatggtacagaaaatatcatgttcctattatgaaactatatcctacacccgaagagattcctgactttgcattctatctcaaaataggtactctgttggtatctagctctgtaaagcatattccattaatgacggacctctccaaaaagggatatatattgtacgataatgtggtcactcttccgttgactactttccaacagaaaatatccaagtattttaattctagactatttggacacgatatagagagcttcatcaatagacataagaaatttgccaatgttagtgatgaatatctgcaatatatattcatagaggatatttcatctccgtaaatatatgctcatatatttatagaagatatcacatatctaaatgaataccggaattatagatttatttgataatcatgttgatagtataccaactatattacctcatcagttagctactctagattatctagttagaactatcatagatgagaacagaagcgtgttattgttccatattatgggatcaggtaaaacaataatcgctttgttgttcgccttggtagcttccagatttaaaaaggtttacattctagtgccgaacatcaacatcttaaaaattttcaattataatatgggtgtagctatgaacttgtttaatgacgaattcatagctgagaatatctttattcattccacaacaagtttttattctcttaattataacgataacgtcattaattataacggattatctcgctacaataactctatttttatcgttgatgaggcacataatatctttgggaataatactggagaacttatgaccgtgataaaaaataaaaacaagattccttttctactattgtctggatctcccattactaacacacctaatactctgggtcatattatagatttaatgtccgaagagacgatagattttggtgaaattattagtcgtggtaagaaagtaattcagacacttcttaacgaacgcggtgtgaatgtacttaaggatttgcttaaaggaagaatatcatattacgaaatgcctgataaagatctaccaacgataagatatcacggacgtaagtttctagatactagagtagtatattgtcacatgtctaaacttcaagagagagattatatgattactagacgacagctatgttatcatgaaatgtttgataaaaatatgtataacgtgtcaatggcagtattgggacaacttaatctgatgaataatttagatactttatttcaggaacaggataaggaattgtacccaaatctgaaaataaataatggcgtgttatacggagaagaattggtaacgttaaacattagttccaaatttaaatactttattaatcggatacagacactcaacggaaaacattttatatacttttctaattctacatatggcggattggtaattaaatatatcatgctcagtaatggatattctgaatataatggttctcagggaactaatccacatatgataaacggcaaaccaaaaacatttgctatcgttactagtaaaatgaaatcgtctttagaggatctattagatgtgtataattctcctgaaaacgatgatggtagtcaattgatgtttttgttttcatcaaacattatgtccgaatcctatactctaaaagaggtaaggcatatttggtttatgactatcccagatactttttctcaatacaaccaaattcttggacgatctattagaaaattctcttacgccgatatttctgaaccagttaatgtatatcttttagccgccgtatattccgatttcaatgacgaagtgacgtcattaaacgattacacacaggatgaattaattaatgttttaccatttgacatcaaaaagctgttatatctaaaatttaagacgaaagaaacgaatagaatatactctattcttcaagagatgtctgaaacgtattctcttccaccacatccatcaattgtaaaagttttattgggagaattggtcagacaatttttttataataattctcgtattaagtataacgataccaagttacttaaaatggttacatcagttataaaaaataaagaagacgctaggaattacatagatgatattgtaaacggtcacttctttgtatcgaataaagtatttgataaatctcttttatacaaatacgaaaacgatattattacagtaccgtttagactttcctacgaaccatttgtttggggagttaactttcgtaaagaatataacgtggtatcttctccataaaactgatgagatatataaagaaataaatgtcgagctttgttaccaatggataccttccagttacattggagccacacgagctgacgttagacataaaaactaatattaggaatgccgtatataagacgtatctccatagagaaattagtggtaaaatggccaagaaaatagaaattcgtgaagacgtggaattacctctcggcgaaatagttaataattctgtagttataaacgttccgtgtgtaataacctacgcgtattatcacgttggggatatagttagaggaacattaaacatcgaagatgaatcaaatgtaactattcaatgtggagatttaatctgtaaactaagtagagattcgggtactgtatcatttagcgattcaaagtactgcttttttcgaaatggtaatgcgtatgacaatggcagcgaagtcactgccgttctaatggaggctcaacaaggtatcgaatctagttttgtttttctcgcgaatatcgtcgactcataagaaagagaatagcggtaagtataaacacgaatactatggcaataattgcgaatgttttattcccttcgatatatttttgataatatgaaaaacatgtctctctcaaatcggacaaccatctcataaaatagttatctcgcgctggcgaggtggttgccgctcgtataatctccccagaataatatacttgcgtgtcgtcgttcaatttatacggatttctatagttctctgttatataatgcggttttccatcatgattagacgacgacaatagtgttctaaatttagatagttgatcagaatgaatgtttattggcgttggaaaaattatccatgctgcgtctgcagagtggttgatagttgttcctagatatgtaaaataatccaacgtactaggtagcaaattgtctagataaaatactgaatcaaacggcgcagacgtattagcggatctaatggaatccaattgattgactatcttttgaaaatatacatttttatgatccgatacttgtaagaatatagaaataatgataagtccatcatcgtgtttttttgcctcttcataagaactatattttttcttattccaatgaacaagattaatctctccagagtatttgtacacatctatcaagtgattggatccataatcgtcttcctttccccaatatatatgtagtgatgataacacatattcattggggagaaaccctccacttatatatcctcctttaaaattaatccttactagttttccagtgttctggatagtggttggtttcgactcattataatgtatgtctaacggcttcaatcgcgcgttagaaattgcttttttagtttctatattaataggagatagttgttgcggcatagtaaaaatgaaatgataactgtttaaaaatagctcttagtatgggaattacaatggatgaggaagtgatatttgaaactcctagagaattaatatctattaaacgaataaaagatattccaagatcaaaagacacgcatgtgtttgctgcgtgtataacaagtgacggatatccgttaataggagctagaagaacttcattcgcgttccaggcgatattatctcaacaaaattcagattctatctttagagtatccactaaactattacggtttatgtactacaatgaactaagagaaatctttagacggttgagaaaaggttctatcaacaatatcgatcctcactttgaagagttaatattattgggtggtaaactagataaaaaggaatctattaaagattgtttaagaagagaattaaaagaggaaagtgatgaacgtataacagtaaaagaatttggaaatgtaattctaaaacttacaacacgggataaattatttaataaagtatatataggttattgcatggcgtgttttattaatcaatcgttggaggatttatcgcatactagtatttacaatgtagaaattagaaagattaaatcattaaatgattgtattaacgacgataaatacgaatatctgtcttatatttataatatgctagttaatagtaaatgaacttttacagatctagtataattagtcagattattaagtataatagacgactagctaagtctattatttgcaaggatgactctcaaattattacactcacggcattcgttaaccaatgcctatggtgtcataaacgagtatccgtgtccgctattttattaactactgataacaaaatattagtatgtaacagacgagatagttttctctattctgaaataattagaactagaaacatgtttagaaagaaacgattatttctgaattattccaattatttgtccaaacaggaaagaagtatactatcgtcatttttttctctatatccagctactgctgataatgatagaatagacgctatttatccgggtggcatacccaaaaggggtgagaatgttccagagtgtctatccagggaaatcaaagaagaagttaatatagacaattcttttgtattcatagacactcggttttttattcatggtatcatagaagataccattatcaacaaattttttgaggtaattttctttgtcggaagaatatctctaacgagtgatcaaattattgatacctttaaaagtaatcatgaaatcaaggatctaatatttttagatccgaattcaggtaatggactccaatacgaaattgcaaaatatgctctagatactgcaaaacttaaatgttacggccatagaggatgttattatgaatcattaaaaaaattaactgaggatgattgattagaaaatataaattaatttaccatcgtgtatttttataacgggattgtccggcatatcatgtagatagttaccgtctacatcgtatactcgaccatctacgcctttaaatcctctatttattgacattaatctattagaattggaataccaaatattagtaccctcaattagtttattggtaatattttttttagacgatagatcgatggctcttgaaaccaaggttttccaaccggactcattgtcgatcggtgagaagtctttttcattagcatgaatccattctaatgatgtatgtttaaacactctaaacaattggacaaattcttttgatttgctttgaatgatttcaaataggtcttcgtctacagtaggcataccattagataatctagccattataaagtgcacgtttacatatctacgttctggaggagtaagaacgtgactattgagacgaatggctcttcctactatctgacgaagagacgcctcgttccatgtcatatctaaaatgaagatatcattaattgagaaaaaactaataccctcgcctccactagaagagaatacgcatgttttaatgcattctccgttagtgtttgattcttggttaaactcagccaccgccttgattctagtatcttttgttctagatgagaactctatattagagataccaaagactttgaaatatagtaataagatttctattcctgactgattaacaaatggttcaaagactagacatttaccatgggatgctaatattcccaaacatacatctataaatttgacgcttttctcttttaattcagtaaatagagagatatcagccgcactagcatcccctttcaatagttctccctttttaaaggtatttaatgcggatttagaaaactctctatctcttaatgaatttttaaaatcattatatagtgttgctatctcttgcgcgtattcgccgggatcacgattttgtctttcaggaaagctatcgaacgtaaacgtagtagccatacgtctcagaattctaaatgatgatataccagtttttatttctgcgagtttagccttttgataaatctcttcttgcttttttgacatattaacgtatcgcattaatactgttttcttagcgaatgatgcagacccttctacgttatcaaaaatagaaaactcgttattaactatgtacgaacataggcctcctagtttggagactaattctttttcatcgactagacgtttattctcaaatagtgattggtgttgtaaggatcctggtcgtagtaagttaaccaacatggtgaattcttgcacactattgacgataggtgtagccgataaacaaatcatcttatggttttttaatgcgatggtcttggataaaaaattatatactgaacgagtaggacggatcttaccatcttctttgattaatgatttagaaatgaagttatgacattcatcaataatgacgcatattctactcttggaattaatagttttgatattagtaaaaaatttatttctaaaattttgatcatcgtaattaataaaaatacaatccttcgttatctctggagcgtatctgagtatagtgttcatccaaggatcttctatcaaagcctttttcaccaataagataatagcccaattcgtataaatatccttaagatgtttgagaatatatacagtagtcattgttttaccgacacccgtttcatggaacaataaaagagaatgcatactgtctaatcctaagaaaactcttgctacaaaatgttgataatccttgaggcgtactacgtccgaccccatcatttcaacgggcatattagtagttctgcgtaaggcataatcgatataggccgcgtgtgatttactcatttatgagtgataagtaataactatgttttaaaaatcacagcagtagtttaactagtcttctctgatgtttgttttcgatactttttgaatcagaagtcatactagaataaagcaacgagtgaacgtaatagagagcttcgtatactctattcgaaaactctaagaacttattaatgaattccgtatccactggattgtttaaaatactaaattgaacactgttcacatccttccaagaagaagacttagtgacggacttaacatgagacataaataaatccaaattttttttacaaacatcactagccaccataatggcgctatctttcaaccagctatcgcttacgcattttagcagtctaacatttttaaagagactacaatatattctcatagtatcgattacacctctaccgaataaagttggaagtttaataatacaatatttttcgtttacaaaatcaaataatggtcgaaacacgtcgaaggttaacatcttataatcgctaatgtatagattgttttcagtgagatgattattagatttaatagcatctcgttcacgtttgaacagtttattgcgtgcgctgaggtcggcaactacggcgtccgctttagtactcctcccataatactttacgctattaatctttaaaatttcatagactttatctagatcgctttctggtaacatgatatcatgtgtaaaaagttttaacatgtcggtcggcattctatttagatcattaactctagaaatctgaagaaagtaattagctccgtattccagactaggtaatgggcttttacctagagacagattaagttctggcaatgtttcataaaatggaagaaggacatgcgttccctcccggatattttttacaatttcatccatttacaactctatagtttgttttcattattattagttattatctcccataatcttggtaatacttaccccttgatcgtaagataccttatacaggtcattacatacaactaccaattgtttttgtacataatagattggatggttgacatccatggtggaataaactactcgaacagatagtttatctttccccctagatacattggccgtaatagttgtcggcctaaagaatatctttggtgtaaagttaaaagttagggttcttgttccattattgctttttgtcagtagttcattataaattctcgagatgggtccgttctctgaatatagaacatcatttccaaatctaacttctagtctagaaataatatcggtcttattcttaaaatctattcccttgatgaagggatcgttaatgaacaaatccttggcctttgattcggctgatctattatctccgttatagacgttacgttgactagtccaaagacttacaggaatagatgtatcgatgatgttgatactatgtgatatgtgagcaaagattgttctcttagtggcatcactatatgttccagtaatggcggaaaactttttagaaatgttatatataaaagaattttttcgtgttccaaacattagcagattagtatgaagataaacactcatattatcaggaacattatcaatttttacatacacatcagcatcttgaatagaaacgataccatcttctggaacctcaacaatctcggcagactccggataaccagtcggtggaccatcgctaacaataactagatcatccaacaatctactcacatatgcatctatataatctttttcatcttgtgagtaccctggatacgaaataaatttattatccgtatttccataataaggtttagtataaacagagagcgatgttgccgcatgaacttcagttacagtcgccgttggttggtttatttgacctattactctcctaggtttctctataaacgatggtttaatttgtacattcttaaccatatatccaataaagctcaattcaggaacataaacaaattctttgttgaacgtttcaaagtcgaacgaagagtcacgaataacgatatcggatactggattgaaggttaccgttacggtaatttttgaatcggatagtttaagactgctgaatgtatcttccacatcaaacggagttttaatataaacgtatactgtagatggttctttaatagtgtcattaggagttaggccaatagaaatatcattaagttcactagaatatccagagtgtttcaaagcaattgtattattgatacaattattatataattcttcgccctcaatttcccaaataacaccgttacacgaagagatagatacgtgattaatacatttatatccaacatatggtacgtaaccgaatcttcccatacctttaacttctggaagttccaaactcagaaccaaatgattaagcgcagtaatatactgatccctaatttcgaagctagcgatagcctgattgtctggaccatcgtttgtcataactccggatagagaaatatattgcggcatatataaagttggaatttgactatcgactgcgaagacattagaccgtttaatagagtcatccccaccgatcaaagaattaatgatagtattattcattttctatttaaaatggaaaaagcttacaataaactccgtagagaaatatctataatttgtgagttttccttaaagtaacagcttccgtaaacgccgtctttatctcttagtaagtttattgtatttataaccttttccttatcttcatagaatactaaaggcaacaaagaaatttttggttcttctctaagagctacgtgagacttaaccatagaagccaacgaatccctacatattttagaacagaaataccctacttcaccacccttgtatgtctcaatactaataggtctaaaaaccaaatcttgattacaaaaccaacacttatcaattacactatttgtcttaatagacacatctgccatagatttataatactttggtagtatacaagcgagtgcttcttctttagcgggcttaaagactgctttaggtgctgaaataaccacatctggaaggcttactcgcttagccatttaattacggaactatttttttatacttctaatgagcaagtagaaaacctctcatctacaaaaacatactcgtgtccataatcctctaccatagttacacgttttttagatctcatatgtgctaaaaagttttcccatactaattggttactattatttttcgtataatttttaacagtttgaggttttagatttttagttacagaagtgatatcgaatattttatccaaaaagaatgaataattaattgtcttagaaggagtgttttcttggcaaaagaataccaagtgcttaaatatttctactacttcattaatcttttctgtactcagattcagtttctcatcttttacttgattgattatttcaaagactaacttataatcctttttatttattctctcgttagccttaagaaaactagatacaaaatttgcatctacatcatccgtggatatttgatttttttccatgatatccaagagttccgagataatttctccagaacattgatgagacaataatctccgcaatacatttctcaaatgaataagtttattagacacgtggaagtttgactttttttgtacctttgtacatttttgaaataccgactcgcaaaaaatacaatattcatatccttgttcagatactataccgttgtgtctacaaccgctacataatcgtagattcatgttaacactctacgtatctcgtcgtccaatattttatataaaaacattttatttctagacgttgccagaaaatcctgtaatacttttagttttttgggctgtgaataaagtatcgccctaatatggttaccgtcctccgccaatatagtagttaaattatccgcacatgcaaaagaacaccgcttaggcggattcagtacaatgttatatttttcgtaccaactcatttaaatatcataatctaaaatagttctgtaatatgtctagcgctaatatattgatcataatcctgtgcataaattaagatacaacaatgtctcgaaatcatcgacatggcttcttccatagttagaagatcgtcgtcaaagttagcaacgtgattcatcaacatttgctgttttgaggcagcaaatactgaaccgtcgccattcaaccattcataaaaaccatcgtctgaatccattgataatttcttgtactggtttttgagagctcgcatcaatctagcatttctagctcccggattgaaaacagaaagaggatcgtacatccagggtccattttctgtaaatagaatcgtataatgtcccttcaagaagatatcagacgatccacaatcaaagaattggtctccgagtttgtaacaaactgcggactttaacctatacatgataccgtttagcataatttctggtgatacgtcaatcggagtatcatctattagagatctaaagccggtgtaacattctccaccaaacatattcttattctgacgtcgttctacataaaacatcattgctccattaacgataacaggggaatgaacagcactacccatcacattagttcccaatggatcaatgtgtgtaactccagaacatcttccatagcctatgttaggaggagcgaacaccactcttccactattgccatcgaatgccatagaataaatatccttggaattgatagaaatcggactgtcggatgttgtgatcatcttcataggattaacaacgatgtatggtgccgcctgaagtttcatatcgtaactgatgccgttcataggtctagccacagaaaccaacgtaggtctaaatccaactatagacaaaatagaagccaatatctgttcctcatctgtcataacttgagagcatccagtatgaataatcttcattagatggggatctaccgcatcatcatcgttacaataaaaaattcccattctaatgttcataattgcttttctaatcatggtatgcatgtttgctctctgaatctctgtggaaattagatctgatacacctgtaatcactatcggattatcctccgtaagacgattaaccaacaacatataattataagactttacttttctaaattcataaagttgctggattaggctataggtgtctccatgtacatacgcgttctcgagcgcaggaagtttaataccgaatagtgccatcagaataggatgaatatagtaattagtttctggttttctataaataaaagacaaatcttgtgaactagacatatcggtaaaatgcatggattggaatcgtgtagtcgacagaagaatatgatgattagatggagagtatattttatctaactctttgagttggtcaccgattctaggactagctcgagaatgaataagtactaaaggatgagtacatttcacagaaacactagcattgttcaatgtgctctttacatgggtaaggagttgaaatagctcgtttctatttgttctgacaatatttagtttattcataatgttaagcatatcctgaatagtaaagttagatgtgtcatacttgttagtagttagatatttagcaattgcattcccatcatttctcaatctcgtactccaatcatgcgtggatgctacttcgtcgatggaaaccatacaatcctttttgataggctgttgagattgattatttcctgcacgtttaggtttggtacgttgatttctagcccctgcggatataaagtcatcgtctacaatttgggacaatgaattgcatacactacaagacaaagatttatcagaagtgtgaatatgatcttcatctaccaaagaaagagtttgattagtataactagattttagtcctgcgttagatgttaaaaaaacatcgctattgaccacggcttccattatttatattcgtagtttttactcgaaagcgtgattttaatatccaatcttattacttttggaatcgttcaaaacctttgactagttgtagaatttgatctattgccctacgcgtatactcccttgcatcatatacgttcgtcaccagatcgtttgtttcggcctgaagttggtgcatatctttttcaacactcgacatgagatccttaagggccatatcgtctagattttgttgagatgctgctcctggatttggattttgttgtgctgttgtacatactgtaccaccagtaggtgtaggagtacatacagtggccacaataggaggttgaggaggtgtaaccgttggagtagtacaagaaatatttccatccgattgttgtgtacatgtagttgttggtaacgtctgagaaggttgggtagatggcggtgtcgtcgtcttttgatctttattaaatttagagataatatcctgaacagcattgctcggcgtcaacgctggaaggagtgaactcgccggcgcatcagtatctgcagacagccaatcaaaaagattagacatatcagatgatgtattagtttgttgtcgtggttttggtgtaggagcagtactactaggtagaagaataggagccgatgtaggtgtcggaaccggctgtggagttatatgaatagttggttgtagcggttggataggctgtctgctggcggccatcatattatctctagctagttgttctcgcaactgtctttgataatacgactcttgagactttagtcctatttcaatcgcttcatcctttttcgtatccggatccttttcttcagaataatagattgacgactttggtgtagaggattctgccagcccctgtgagaacttgttaaagaagtccatttaaggctttaaaattgaattgcgattataagattaaatggcagacacagacgatattatcgactatgaatccgatgatctcactgaatacgaggatgatgaagaagaggaagaagatggagagtcactagaaactagtgatatagatcccaaatcttcttataagattgtagaatcagcatccactcatatagaagatgcgcattccaatcttaaacatatagggaatcatatatctgctcttaaacgacgctatactagacgtataagtctatttgaaatagcgggtataatagcagaaagctataacttgcttcaacgaggaagattacctctagtttcagaattttctgacgaaacgatgaagcaaaatatgctacatgtaattatacaagagatagaggagggttcttgtcctatagtcatcgaaaagaacggagaattgttgtcggtaaacgattttgacaaagatggtctaaaattccatctagactatattatcaaaatttggaaacttcaaaaacgatattagaatttatacgaatatcgttctctaaatgtcacaatcaagtctcgcatgttcagcaatttattgtcgtactttatatcgtgttcattaacgatatcttgcaaaatagtaatgattctatcttccttcgatagatattcttcagagattattgtcttatattctttcttgttatcagatatgaatttgataagactttgaacattattgatacccgtctgtttaattttttctacagatattttagttttggcagattctatcgtatctgtcaatagacatccaacatcgacattcgacgtcaattgtctataaatcaacgtataaattttagaaataacattagcgaattgttgtgcattgatgtcgttattctgaaacagtatgattttaggtagcattttcttaacaaagagaacgtatttattgttactcagttgaacagatgatatatccagattactaacgcatctgattccgtataccaaactttcagaagaaatggtatacaattgtttgtattcattcaatgtctctttttcagaaattagtttagagtcgaatactgcaataattttcaagagatagttttcatcagataagattttatttagtgtagatatgataaaactattgttttgttggagaacttgatacgccgcgttctctgtagtcgacgctctcaaatgggaaacgatctccattatttttttggaatcggatactatatcttcggtatcttgacgcagtctagtatacatagagttaagagagattagagtttgtacattaagcaacatgtctctaaatgtggctacaaacttttccttttccacatcatctagtttattatataccgatttcacaacggcaccagatttaaggaaccagaatgaaaaactctgataactacaatatttcatcatagttacgattttatcatcttctatagttggtgtaatagcgcatacctttttctccaagactggaaccaacgtcataaaaatgtttaaatcaaaatccatatcaacatctgatgcgctaagaccagtctcgcgttcaagattatctttactaatggtgacgaactcatcgtatagaactctaagtttgtccattatttatttacagatttagttgtttaatttatttgtgctcttccagagttgggatagtatttttctaacgtcggtattatattattaggatctacgttcatatgtatcataatattaatcatccacgttttgataaatctatctttagcttctgaaataacgtatttaaacaaaggagaaaaatatttagctacggcatcagacgcaataacattttttgtaaatgtaacgtatttagacgacagatcttcgttaaaaagttttccatctatgtagaatccatcagttgttaacaccattcccgcgtcagattgaataggagtttgaatagtttgttttggaaatagatccttcaataacttatagttgggtgggaaaaaatcgattttatcactagactctttcttttttactatcattacctcatgaactatttcttgaatgagtatatgtattttctttcctatatcggacgcgttcattggaaaatataccatgtcgttaactataagaatatttttatcctcgtttacaaactgaataatatcagatgtagttcgtaaacgaactatatcatcaccagcacaacatctaactatatgatatccactagtttcctttagtcgtttattatcttgttccatattagcagtcattccatcatttaagaaggcgtcaaagataatagggagaaatgacattttggattctgttacaactttaccaaaattaaggatatacggacttactatctttttctcaacgtcaatttgatgaacacacgatgaaaatgtacttcgatgagattgatcatgtagaaaacaacaagggatacaatatttccgcatatcatgaaatatattaagaaatcccaccttattatatttccccaaaggatccatgcacgtaaacattatgccgttatcattaataaagacttctttctcatcggatctgtaaaagttgttactgatttttttcattccaggatctagataattaataatgatgggttttctattcttattctttgtattttggcatatcctagaccagtaaacagtttccactttggtaaaatcagcagacttttgaacgctattaaacatggcattaatggcaataactaaaaatgtaaaatatttttctatgttaggaatatggtttttcactttaatagatatatggtttttggccaaaatgatagatatttttttatccgaggatagtaaaatattattagtcgccgtctctataaaaatgaagctagtctcgatatccaattttattctagaattgataggagtcgccaaatgtaccttatacgttatatctcccttgatgcgttccatttgtgtatctatatcggacacaagatctgtaaatagttttacgttattaatcatcacggtatcgccgtcgctagataatgctaatgtaccatccaagtcccaaatggagagatttaactgttcatcgtttagaataaaatgattaccggtcatattaataaagtgttcatcgtatctagataacaacgacttataattaatgtccaagtcttgaactcgctgaatgatcttttttaacccagttagttttagattggtacgaaatatattgttaaactttgattctacagtaatgtccaaatctagttgtggaaatacttccatcaacattgtttcaaacttgataatattattatctacatcttcatacgatccaaattccggaatagatgtatcacatgctcttgccacccagataaccaaaaagtcacacgctccaggatatacattgtataaaaagctatcgtttttaagtagggtttttttctgcgtgtatacgaagggattaaaaatagtattatcaacgtaactatattccaaattattcttatgagaatagataataatatcgtccttaatatctaacaaatttcctaaatatccctttaattgagtcattcgaagcgtcaatagaatatgtctcttaactatttccggctgttgtatatttaaatgacttcgtaaaaaataatatatgggcgacttctcatctatgtaatcatatggagtgagatatagggctcgttctacctcctgccccttacccacctgtaataccaattgcggacttactatatatcgcatatttatatcgtggggtaaagtgaaaatctactaccgatgatgtaagtcttacaatgttcgaaccagtaccagatcttaatttggaggcctccgtagaactaggggaggtaaatatagatcaaacaacacctatgataaaggaaaatagcggttttatatcccgtagtagacgtctattcgcccatagatctaaggatgatgagagaaaactagcactacgattctttttacaaagactttattttttagatcatagagagattcattatttgttcagatgcgttgacgctgtaaaagacgtcactattaccaaaaaaaataacattatcgtggcgccttatatagcacttttaactatcgcatcaaaaggatgcaaacttacagaaacaatgattgaagcattctttccagaactatataatgaacatagtaagaaatttaaattcaactctcaagtatccatcatccaagaaaaactcggataccagtttggaaactatcacgtttatgattttgaaccgtattactctacagtagctctggctattcgagatgaacattcatctggcatttttaatatccgtcaagagagttatctggtaagttcattatctgaaataacatatagattttatctaattaatctaaaatctgatcttgttcaatggagtgctagtacgggcgctgtaattaatcaaatggtaaatactgtattgattacagtgtatgaaaagttacaactggtcatagaaaatgattcacaatttacatgttcattggctgtggaatcagaacttccaataaaattacttaaagatagaaatgaattatttacaaaattcatcaacgagttaaaaaagaccagttcattcaagataagcaaacgcgataaggatacgctactaaaatattttacttaggactggagttagaatttatagacgactcatttcgtttatcattattactaccatcattattagtattcttcttgttatcttgttcagaaatatacagcaatgctatgcctaatactaaatacattatcatgcttgcaatggctctaacaacgacgaaccaaaatgaatttggtcgtagcttttgttcacaaaaatacataaagaaatgtctacataaatctatggcgccattggctacttgaaatagcgccagtcctcctacagattttaatatagctgtataacatgacatttattcatcatcaaaagagacagagtcaccatctgtcatatttagattttttttcatgtgttcaaagtatcctctactcatttcattataatagtttatcatacttagaattttaggacggatcaatgagtaagacttgactagatcgtcagtagtaatttgtgcatcgtctattctgcatccgcttcgtcgaataatgtatagcatcgctttgagattctccatagctatcaagtctttatacaatgacatggaaatatctgtgaatactttatacttctccaacatcgatgccttaacatcatcgcctactttagcattgaaaatacgttctattgtgtagatggatgtagcaagatttttaaacaacaatgccatcttacacgatgattgcctcaagtctccaatcgtttgtttagaacgattagctacagagttcaacgcttggctgactagcatattattatctttagaaattgtattcttcaatgaagcgtttatcatatctgtgatttcgttagtcatattacagtctgactgggttgtaatgttatccaacatatcacctatggatacggtacacgtaccagcatttgtaataatcctatctaagatgttgtatggcattgcgcagaaaatatcttctcctgtaatatctccactctcgataaatctactcagattattcttaaatgccttattctctggagaaaagatatcagtgtccatcatttcattaatagtatacgcagaaaagataccacgagtatcaattctatccaagatacttatcggttccgagtcacagataatggtttcctctccttcgggagatcctgcatagaaatatctaggacaatagtttctatactgtctgtaactctgataatctctaaagtcactaactgataccatgaaattgagaagatcaaacgctgaagtaatcaatttttctgcctcgtttttactacaactagttttcatcaatgtagtgacgatgtattgtttagttactcttggtctaatactgatgatagagatattattacttcccataatggatcttctagtagtcaccttaaagcccattgatgcaaatagcagatagataaagtcttggtatgactcctttctaatatagtacggactacctttgtcacccaactttatacccacataagccataacaacctctttaatagccgtttcatgaggtttatcagccatgagcctgagtagttggaagaatctcatgaatcccgtctcagaaagtcctatatgcatgatagatttatctttcctgggaaactctcgtatagtcatagatgaaatactcttcaaagtttctgaaataagattagtaacagtcttacctccgactactctgggtaacaaacatactctaataggtgttttctctgcggagataatatcagaaaggatagagcaataagtagtattattgtgattataaagaccgaatacataacaggtagaatttataaacatcatgtcctgaaggtttttagacttgtattcctcgtaatccataccgtcccaaaacatggatttggtaactttgatagccgtagatctttgttccttcgccaacaggttaaagaaattaataaagaatttgttgtttctatttatgtccacaaattgcacgtttggaagcgtaactgttacgttcactgcagcattttgaggatcgcgagtatgaagtacgatgttattgtttactggtatatctggaaagaaatctaccagtctaggaataagagattgatatcgcatagaaatagtaaagtttataatctcatcatcgaagagcattttgttaccattgtaataaatatccactctgtcatatgtataaatgaagtactgttcaaacatgatgagatgtttatatgttggcatagtagtgagatcgacgtttggtaatggcaatgtattaagattaactccataatgtctagcagcatctgcgatgttataagtgtcgtcaaagcggggtcgatcttgtgctgttatatattgtctaacacctataagattatcaaaatcttgtctgcttaatacaccgttaacaatttttgccttgaattcttttattggtgcattaataacatccttatagaggatgttaaacaaataagtgttatcaaagttaagatctggatatttcttttctgctagaacatccattgagtcggagccatctggtttaatataaccaccgataaatctagctctgtattctgtatccgtcaatctaatattaagaaggtgttgagtgaaaggtggaagatcgtaaaagctgtgagtattaatgataggattagtttccgaactaatgttaattggggtattaataatatctatatttccagcgttaagtgtaacattaaacagttttaattcacgtgacgtggtatcaattaaataattaatgcccaatttggatatagcagcctgaagctcatcttgtttagttacggatcctaatgagttattaagcaatatatcgaacggatgaacgaaggttgttttaagttggtcacatactttgtaatctagacatagatgcggaagaacggtagaaactatacgaaataaatattcagagtcctctaattgatcaagagtaactattgacttaataggcatcatttatttagtattaaatgacgaccgtaccagtgacggatatacaaaacgatttaattacagagttttcagaagataattatccatctaacaaaaattatgaaataactcttcgtcaaatgtctattctaactcacgttaacaacgtggtagatagagaacataatgccgccgtagtgtcatctccagaggaaatatcctcacaacttaatgaagatctatttccagatgatgattcaccggccactattatcgaacgagtacaacctcatactactattattgacgatactccacctcctacttttcgtagagagttattaatatcggaacaacgtcaacaacgagaaaaaagatttaatattacagtatcgaaaaatgctgaagcaataatggaatctagatctatgataacttctatgccaacacaaacaccatccttgggagtagtttatgataaagataaaagaattcagatgttagaggatgaagtggttaatcttagaaatcaacgatctaatacaaaatcatctgataatttagataattttaccaaaatactatttggtaagactccgtataaatcaacagaagttaataagcgtatagccatcgttaattatgcaaatttgaacgggtcccccttatcagttgaggacttggatgtttgttcggaggatgaaatagatagaatctataaaacgattaaacaatatcacgaaagtagaaaacgaaaaattatcgtcactaacgtgattattattgtcataaacattatcgagcaggcattgctaaaactcggatttgaagaaatcaaaggactgagtaccgatatcacttcagaaattatcgatgtggagatcggagatgactgcgatgctgtagcatctaaactaggaatcggtaacagtccggttcttaatattgtattgtttatactcaagatattcgttaaacgaattaaaattatttaatttaatacattcccatatccagacaacaatcgtctggattaatctgttcctgtcgtctcataccggacgacatattaatctttttattagtaggcatctttttagatggtttctttttcccagcattaactgagtcgatacctagaagatcgtgattgatctctccgaccattccacgaacttctaattggccgtctctgacggtaccataaactattttaccagcattagtaacagcttggacaatctgaccatccattgcgttgaatgatgtagttgctgttgttctacgtttaggagcaccagaagtatttttggagcccttggaggctgatgtagaagaagacgaggattttgatttacatgtaatacattttgtactctttgattttgtatcacatgcgccggcagtcacatttgtttgagaattaagattattgttgcctcctttgacggctgcatctccaccgatttgcgctagtagatttttaagctgtggtgtaatcttattaactgtttcgatataatcatcgtaactgcttctaacggctaaattttttttatccgccatttagaagctaaaaatatttttatttatgcagaagatttaactagattatacaatgaactaatatgatccttttccagattatttacaaacttggtattttttggttctggaggaggcgaatttaaattcggacttggattcggattttgtgagttcttgatcttattatacatcgagtataggatggcgacggtaactgctacgcaaataccgatcaacaaaagaataccaatcatttattgacaataacttcactattgatcaagtatgcaatatatcatcttttcactaaataagtagtaataatgattcaacaatgtcgagatatatggacgataataatttagttcatggaaatatcgctatgattggtatgaatgactccgctaactctgtggggtgcgcagtgctttccccacatagaataaattagcattccgactgtgataataataccaagtataaacgccataatactcaatactttccatgtacgagtgggactggtagacttactaaagtcaataaaggcgaagatacacgaaagaatcaaaagaatgattccagcgattagcacgccggaaaaataatttccaatcataagcatcatgtccatttaactaataaaaattttaaatcgccgaatgaacaaagtggaatataaaccatataaaaacaatagtttgtactgcaaaaataatatctatttttgttttcgaagatatggtaaaattaaatagtagtacacagcatgttataactaacagcagcaacggctcgtaattacttatcatttactagacgaaaaggtggtgggatattttcttgctcaaataatacgaatatatcacccatccattttatgcgatgtttatatactctaatctttaatagatctatagacgacgggtttaccaacaatatagattttatcgattcatctaatttaaacccttccttaaacgtgaatgatctattatctggcataacgatgactctacctgatgaatcggacaatgtactgggccatgtagaataaattatcaacgaattatcgtctacgaacatttatatcatttgttttaattttaggacgcgaataaatggatataaaatagaaaataacagatattacaaccaatgttatggccgcgcccaaccaggtaggcagttttattttatcttttactacaggttctcctggatgtacgtcaccaacggcggacgtagttctagtacaattagacgtaagttctgcttgggaattttttaacgctaaagagttaacgttaatcgtgcacccaacgtatttacatctagttctttgaacatcttgattataatataaccattttctatctctagattcgtcggtgcactcatgtaaccaacataccctaggtcctaaatatttatctccggaattagattttggataattcgcgcaccaacaatttctatttcctttatgatcgttacaaaagacgtataatgccgtatccccaaaagtaaaataatcaggacgaataattctaataaactcagaacaatatctcgcatccatatgtttggagcaaatatcggaataagtagacatagccggtttccgttttgcacgtaaccattctaaacaattggggtttccaggatcgtttctacaaaatccagtcatgaaatcatcacaatgttctgtcttgtaattattattaaatatttttggacagtgtttggtatttgtcttagaacaacattttgccacgctatcactatcgcccaggagataatccttttttataaaatgacatcgttgcccggatgctatataatcagtggcgtgttttaaatccttaatatattcaggagttacctcgttctgataatagattaatgatccaggacgaaatttgaaagaactacatggttctccatgaattaatacatattgtttagcaaattcaggaactataaaactactacaatgatctatcgacataccatctatcaaacaaaacttgggtttaatttctcccggagatgtttcataatagtacgtataactttcttctgcaaacttaacagctctattatattcaggataattaaaacctaattccatatatttgtctcgtatatctgctattcctggtgctattttaattctattaagagtaacggctgcccccattcttaataatcgtcagtatttaaactgttaaatgttggtatatcaacatctaccttatttcccgcagtataaggtttgttgcaggtatactgttcaggaatggttacatttatacttcttctatagtcctgtctttcgatgttcatcacatatgcaaagaacagaataaacaaaataatgtaagaaataatattaaatatctgtgaattcgtaaatacattgattgccataataattacagcagctacaatacatacaatagacattcccacagtgttgccattacctccacgatacatttgagttactaagcaataggtaataactaagctagtaagaggcaatagaaaagatgagataaatatcatcaatatagagattagaggagggctatatagagccaagacgaacaaaatcaaaccgagtaacgttctaacatcattatttttgaagattcccaaataatcattcattcctccataatcgttttgcattatacctccatctttaggcataaacgattgctgctgttcctctgtaaataaatctttatcaagcactccagcacccgcagagaagtcgtcaagcatattgtaatatcttaaataactcatttatatattaaaaaatgtcactattaaagatggagtataatctttatgccgaactaaaaaaaatgacttgtggtcaacccctaagtctttttaacgaagacggggatttcgtagaagttgaaccgggatcatcctttaagtttctgatacctaagggattttacgcctctccttccgtaaagacgagtctagtattcgagacattaacaacgaccgataataaaatcactagtatcaatccaacaaatgcgccaaagttatatcctcttcaacgcaaagtcgtatctgaagtagtttctaatatgaggaaaatgatcgaatcaaaacgtcctctatacattactcttcacttggcgtgtggatttggtaagactattaccacgtgttatcttatggctacacacggtagaaaaaccgtcatttgcgtacccaataaaatgttaatacatcaatggaagacacaggtagaggcagtcggattggaacataagatatctatagatggagtaagtagtctattaaaggaactaaagactcaaagtccggatgtattaatagtagtcagtagacatctgacaaacgatgccttttgtaaatatatcaataagcattatgatttgttcatcttggatgaatcacatacgtataatctgatgaacaatacagcagttacaagatttttagcgtattatcctccgatgatgtgttattttttaactgctacacctagaccagctaaccgaatttattgtaacagtattattaatattgccaagttatccgatctaaaaaaaactatctatgcggtagatagtttttttgagccatattccacagacaatattagacatatggtaaaacgactagatggaccatctaataaatatcatatatatactgagaagttattatctgtagacgagcctagaaatcaacttattcttgataccctggtagaagaattcaagtcaggaactattaatcgaattttagttattactaaactacgtgaacatatggtattcttctacaaacgattattagattttttcggatcagaggttgtatttataggagacgcccaaaatagacgtactccagatatggtcaaatcaatcaaggaactaaatagatttatattcgtatccaccttattttattccggtactggtttagatattcctagtttggattcgttgttcatttgctcggcagtaatcaacaatatgcaaatagagcaattactagggagggtatgtcgagaaacagaactattagataggacggtatatgtatttcctaacacatccatcaaagaaataaagtacatgataggaaatttcatgcaacgaattattagtctgtctgtagataaactaggatttaaacaaaaaagttatcggaaacatcaagaatccgatcccacttctgtatgtacaacatcctccagagaagaacgtgtattaaatagaatatttaactcgcaaaatcgttaagaagtttaagcgacgatccgcatgctgcgcaggccagtgtattacccctcatagtattaatataatccaatgatacttttgtgatgtcggaaatcttaaccaatttagactgacaggcagaacacgtcatgcaatcatcatcgtcatcgataactgtagtcttgggcttctttttgcggctcttcattccggaacgcacattggtgctatccatttaggtagtaaaaaataagtcagaatatgccctatagcacgatcgtgcaaaacctggtatatcgtctctatctttatcacaatatagtgtatcgacatttttattattattgacctcgtttatcttggaacatggaatgggaacatttttgttatcaacggccatctttgccttaattccagatgttgtaaaattataactaaacagtctatcatcgacacaaatgaaattcttgtttagacgtttgtagtttacgtatgcggctcgttcgcgtctcattttttcagatattgcaggtactataatattaaaaataagaatgaaataacataggattaaaaataaagttatcatgacttctagcgctgatttaactaacttaaaagaattacttagtctgtacaaaagtttgaaattttcagattctgcggctatagaaaagtataattctttggtagaatggggaacatctacttactggaaaataggcgtgcaaaaggtagctaatgtcgagacgtcaatatctgattattatgatgaggtaaaaaataaaccgtttaatattgatccgggatattacattttcttaccggtatattttggaagcgtctttatttattcgaagggtaaaaatatggtagaacttggatctggaaactcttttcaaataccagatgatatgcgaagtgcgtgtaacaaagtattagacagcgataacggaatagactttctgagatttgttttgttaaacaatagatggataatggaagatgctatatcaaaatatcagtctccagttaatatatttaaactagctagtgagtacggattaaacatacccaaatatttagaaattgaaatagaggaagacacattatttgacgacgagttatactctattatagaacgctctttcgatgataaatttccaaaaatatccatatcgtatattaagttgggagaacttagacggcaagttgtagactttttcaaattctcgttcatgtatattgagtccatcaaggtagatcgtataggagataatatttttattcctagcgttataacaaaatcaggaaaaaagatattagtaaaagatgtagaccatttaatacgatccaaggttagagaacatacatttgtaaaagtaaaaaagaaaaacacattttccattttatacgactatgatggaaacggaacagaaactagaggagaagtaataaaacgaattatagacactataggacgagactattatgttaacggaaagtatttctctaaggttggtagtgcaggcttaaagcaattgactaataaattagatattaatgagtgcgcaactgtcgatgagttagttgatgagattaataaatccggaactgtaaaacgaaaaataaaaaaccaatcagcatttgatttaagcagagaatgtttgggatatccagaagcggattttataacgttagttaataacatgcggttcaaaatagaaaattgtaaggttgtaaatttcaatattgaaaatactaattgtttaaataacccgagtattgaaactatatatggaaactttaaccagttcgtctcaatctttaatatcgtcaccgatgtcaaaaaaagattattcgagtgaaataatatgcgcctttgatataggtgcaaaaaatcctgccagaactgttttagaagtcaaggataactccgttagggtattggatatatcaaaattagactggagttctgattgggaaaggcgcatagctaaagatttgtcacaatatgaatacactacagttcttctagaacgtcagcctagaaggtcgccgtacgtcaaatttatctattttattaaaggctttttatatcatacatcggctgccaaagttatttgcgtctcgcctgtcatgtctggtaattcatatagagatcgaaaaaagagatcggtcgaagcatttcttgattggatggacacattcggattgcgagactccgttccggatagacgcaaattagacgatgtagcggatagtttcaatttggctatgagatacgtattagataaatggaatactaattatacaccttataataggtgtaaatctagaaattacataaaaaaaatgtaataacgttagtaacgccattatggataatctatttacctttctacatgaaatagaagatagatatgccagaactatttttaactttcatctaataagttgcgatgaaataggagatatatatggtcttatgaaagaacgcatttcctcagaggatatgtttgataatatagtgtataataaagatatacatcatgccattaagaaactagtgtattgcgacatccaacttactaaacacattattaatcagaatacgtatccggtatttaacgattcttcacaagtgaaatgttgtcattatttcgacataaactcagataatagcaatattagctctcgtacagtagagatatttgagagggaaaagtcatctcttgtatcatatattaaaactaccaataagaagagaaaggtcaattacggcgaaataaagaaaactgttcatggaggcactaatgcaaattacttttccggtaaaaagtctgacgagtatctgagtactacagttagatccaacattaatcaaccttggatcaaaaccatctctaagaggatgagagttgatatcattaatcactctatagtaacgcgtggaaaaagctctatattacaaactatagaaattatttttactaatagaacatgtgtgaaaatattcaaggattctactatgcacattattctatccaaggacaaggatgaaaaggggtgtatacacatgattgacaaattattctatgtctattataatttatttctgttgttcgaggatatcatccaaaacgagtactttaaagaagtagctaatgttgtaaaccacgtacttacggctacggcattagatgagaaattattcctaattaagaaaatggctgaacacgatgtttatggagttagcaatttcaaaatagggatgtttaacctgacatttattaagtcgttggatcataccgttttcccctctctgttagatgaggatagcaaaataaagttttttaaggggaaaaagctcaatattgtagcattacgatctctggaggattgtataaattacgtgactaaatccgagaatatgatagaaatgatgaaggaaagatcgactattttaaatagcatagatatagaaacggaatcggtagatcgtctaaaagaattgcttctaaaatgaaaaaaaacactgattcagaaatggatcaacgactcggatataagtttttggtgcctgatcctaaagccggagttttttatagaccgttacatttccaatatgtatcgtattctaattttatattgcatcgattgcatgaaatcttgaccgtcaagcggccactcttatcgtttaagaataatacagaacgaattatgatagaaattagcaatgttaaagtgactcctccagattactcacctataatcgcgagtattaaaggtaagagttatgacgcattagccacgttcactgtaaatatctttaaagaggtaatgaccaaagagggtatatccatcactaaaataagtagttatgagggaaaagattctcatttgataaaaattccgctactaataggatacgggaataaaaatccacttgatacagccaagtatcttgttcctaatgtcataggtggagtctttatcaataaacaatctgtcgaaaaagtaggaattaatctagtagaaaagattacaacatggccaaaatttagggttgttaagccaaactcattcactttctcgttttcctccgtatcccctcctaatgtattaccgacaagatatcgccattacaagatatctctggatatatcacaattggaagcgtcgaatatatcatcgacaaagacatttataacggtcaatattgttttgctgtctcaatatttatctagagtgagtctagaattcattagacgtagcttatcatacgatatgcctccagaagttgtctatctagtaaacgcgataatagatagtgctaaacgaattactgaatctattactgactttaatattgatacatacattaatgacctggtggaagctgaacacattaaacaaaaatctcagttaacgatcaacgagttcaaatatgaaatgctgcataactttttacctcatatgaactatacacccgatcaactaaagggattttatatgatatctttactaagaaagtttctctactgtatctaccacacttctagatatccagatagagattcgatggtttgtcatcgtatactaacatacggcaaatattttgagacgttggcacatgatgaattagagaattacataggcaacatccgaaacgatatcatgaacaatcacaagaacagaggcacttacgcggtaaacattcatgtactaacaactcctggacttaatcatgcattttctagtctattgagtggaaagttcaaaaagtcagacggtagttatcgaacacatcctcactattcatggatgcagaatatttctattcctaggagtgttggattttatccggatcaagtaaagatttcaaagatgttttctgtcagaaaataccatccaagtcaatatctttacttttgttcatcagacgttccggaaagaggtcctcaggtaggtttagtatctcaattgtctgtcttgagttccattacaaatatactaacgtctgagtatttggatttggaaaagaaaatttgtgagtatatcagatcatattataaagatgatataagttactttgaaacaggatttccaatcactatagaaaatgctctagtcgcatctcttaatccaaatatgatatgtgattttgtaactgactttagacgtagaaaacggatgggattcttcggtaacttggaggtaggtattactttagttagggatcacatgaatgaaattcgcattaatattggagcgggaagattagtcagaccattcttggttgtggataacggagagctcatgatggatgtgtgtccggagttagaaagcagattagacgacatgacattctctgacattcagaaagagtttccgcatgtcatcgaaatggtagatatagaacaatttacttttagtaacgtatgtgaatcggttcaaaaatttagaatgatgtcaaaggatgaaagaaagcaatacgatttatgtgactttcctgccgaatttagagatggatatgtggcatcttcattagtgggaatcaatcacaattctggacccagagctattcttggatgtgctcaagctaaacaagctatctcttgtctgagctcggatatacgaaataaaatagacaatggaattcatttgatgtatccagagaggccaatcgtgattagtaaggctttagaaacttcaaagattgcggctaattgcttcggccaacatgttactatagcattaatgtcgtacaaaggtatcaatcaagaggatggaattatcatcaaaaaacaatttattcagagaggcggtctcgatattgttacagccaagaaacatcaagtagaaattccattggaaaactttaataacaaagaaagagataggtctaacgcctattcaaaattagaaagtaatggattagttagactgaatgctttcttggaatccggagacgctatggcacgaaatatctcatcaagaactcttgaagatgattttgctagagataatcagattagcttcgatgtttccgagaaatataccgatatgtacaaatctcgcgttgaacgagtacaagtagaacttactgacaaagttaaggtacgagtattaaccatgaaagaaagaagacccattctaggagacaaatttaccactagaacgagtcaaaagggaacagtcgcgtatgtcgcggatgaaacggaacttccatacgacgaaaatggtatcacaccagatgtcattattaattctacatccatcttctctagaaaaactatatctatgttgatagaggttattttaacagccgcatattctgctaagccgtacaacaataagggagaaaaccgacctgtctgttttcctagtagtaacgaaacatccatcgatacatatatgcaattcgctaaacaatgttatgagcattcaaatccgaaattgtctgatgaagaattatcggataaaatcttttgtgaaaagattctctatgatcctgaaacggataagccttatgcatccaaagtattttttggaccaatttattacttgcgtctgagacatttaactcaggacaaggcaaccgttagatgtagaggtaaaaagacgaagctcattagacaggcgaatgagggacgaaaacgtggaggaggtatcaagttcggagaaatggagagagactgtttaatagcgcatggtgcagccaatactattacagaagttttgaaagattcggaagaagattatcaagatgtgtatgtttgtgaaaattgtggagacatagcagcacaaatcaagggtattaatacatgtcttagatgttcaaaacttaatctctctcctctcttaacaaaaattgataccacacacgtatctaaagtatttcttactcaaatgaacgccagaggcgtaaaagtcaaattagatttcgaacgaagacctccttcgttttataaaccattagataaagttgatctcaaaccgtcttttctggtctaatattgtttagtagatacttatcaacatcatcaagattatcaagattatcaagattatcaagataagctaattcactaaacacattatcgatttcggtatcgttactcgcagaataaagttcgttatgatcctgatattcggaaatctgtggagtttcaggttttggtggatgtgtaacagctacttgagataccgaagtctgatattcagaaagctgtggatgttctggttcggcatccaccgatggtgttacaccactactaattggttcagtaacgtctgtggacgatggaggcaccacttctacaggttctggttctttatcctcagtcatcaacggagctacttcaatgcgaggaaatgtataatttggtaatggtttctcatgtggatctgaagaagaggtaagatatctactagaaagataccgatcacgttctagttctcttttgtagaacttaactttttctttctcagcatctagttgatattccaacctcttcacgttactacgttcagatttcaattcacgttcgcatgggttacctccgcagtttttacgagcgatttcacgttcagccttcatgcgtctctccctctctctatcgagtttatcagagcagtctttctgaaggcgatcgaactccataaatttctccaacgctttgattgtttccatagatttccgaagttcagcttttaggactgtgattctttttctttcgaattcacagctggatgtacaaccgtttccattaccgccatctctaagtttcttttctagatcggcaacatttcatccccatgccttttacattcctcgagtctactgtcgtcgaaatatcgttccagctccttttcgacatcaataactttagcacgttgtctctcaagctctcttttgtagttatctgattccctggcacgtttaagatcttcatgcaattgagtcagctcttaacacaatctcttgcttcttcgtcatagtacgcgcaatcactgtgagatccattgttaccacgtctacactcggcgagctcgcgtttaagagattcaatttcccgtttgtattggtccatgtttccattgctaccaccattagatttacaggctgctagttgtcgttcgagatcagaaatacgggttttcttggaattgatttcgtcgatgtacttggcatcgaaacacttattaagttctttttccaattctacgattttatttctttcgcgagtcaattccctcctgtagtaactatctgttttgtcagattcacgctctctacgtagactttcttgcaagttactaatttgttccctagcacgtccgagtttagttttatatgctgaatagagttctgattcatcctttgagcagatctctagcgatcgtttaagattcctgattctagtctttagcctatttacctcctcagaagatgttccgttaccgttgcgtttacactcgttaagctgtctatcaagatccatgattctatctctaagacgttgcatctctctttccatatcagcattgctttcattattacgtctgcagtcactcaactgtctttcaatatctgagattctatctctaagacgtcgcatctctctctgtttcggcattggtttcattattacgtctacagtcgttcaactgtctttcaagatctgatattctagattggagtctgctaatctctgtagcattttcacggcattcactcagttgtctttcaagatctgaaattttagattggagtctgctaatctctgtaagatttcctcctccgctctcgatgcagtcggtcaacttattctctagttctctaatacgcgaacgcagtgcatcaacttcttgcgtgtcttcctggttgcgtgtacattcatcgagtctagattcgagatctctaacgcgtcgtcgttcttcctcaagttctctgcgtactacagaaagcgtgtccctatcttgttgatatttagcaatttctgattctagagtactgattttgcttacgtagttactaatatttgtcttggccttatcaagatcctccttgtatttgtcgcattccttgatatccctacgaagtctggacagttcccattcgacattacgacgtttatcgatttcagctcggagatcgtcatcgcgttgttttagccacatacgactgagttcaagttctcgttgacaagatccatctacttttccattcctaatagtatccagttccttttctagttctgaacgcatttctcgttccctatcaagcgattctctcaattctcggatagtcttcttatcaatttctaataaatctgaaccatcatctgtcccattttgaatatccctgtgttctttgatctcttttgtaagtcggtcgattctttcggttttataaacagaatccctttccaaagtcctaatcttactgagtttatcactaagttctgcattcaattcggtgagttttctcttggcttcttccaactctgttttaaactctccactatttccgcattcttcctcgcatttatctaaccattcaattagtttattaataactagttggtaatcagcgattcctatagccgttcttgtaattgtgggaacataattaggatcttctaatggattgtatggcttgatagcatcatctttatcattattagggggatggacaaccttaattggttggtcctcatctcctccagtagcgtgtggttcttcaatagccgtgttagtaataggcttaggcaaatgcttgtcgtacgcgggcacttcctcatccatcaagtatttataatcgggttctacgtctgaatattcttttctaagagacgcaacttctggagttagtagaagaactctgtttctatatctatcaacgctggaatcaatactcaagttaaggatagcgaatacctcatcgtcatcatccgtatcctctgaaacgccatcatatgacatttcatgaagtctaacgtattgataaacagaatcagatttagtattaaacagatccttaacctttttagtaaatgcatatgtatattttagatctccagatttcataatatggtcgcatgccttaaatgtcagtgcttccataatatagtctggaacactaattggtgatgaaaaagataccggaccatatgctacgttgataaataactctgagccactaactagataatgattaatgttaaggaagaggaaatattcagtgtataggtatgtcttggcgtcatatcttgtactaaacacgctaaacagtttgttaatgtgatcaatttccaatagattaattagagcagcaggaataccaacaaacatattaccacatccgtattttctatgaatatcacatatcatgttaaaaaatcttgatagaagagcgaatatctcgtctgacttaatgagtcgtagttcagcagcaacataagtcataactgtaaatagaacatactttcctgtagtgttgattctagactccacatcaacaccattattaaaaatagttttatatacatctttaatctgctctccgttaatcgtcgaacgttctagtatacggaaacactttgatttcttatctgtagttaatgacttagtgatatcacgaagaatattacgaattacatttcttgtttttcttgagagacctgattcagaactcaactcatcgttccatagtttttttacctcagtggcgaaatctttggagtgcttggtacatttttcaataaggttcgtgacctccatttattataaaaaaattttattcaaaacttaactacaatcgggtaattataaaatcgtagatctcccatgtggtggaatactaccatctatcgcatgtggatggacagtaggtaatggccatgggaacagtaatgtttgcatatttatctttcttgccagtattactgcatattgtcccaatgtttcgatgtgatgttctaacctatcaactgccgctgtatcacaacaatagtgtccgatgaaattaagattatgatccaatgtgtttaatatatgattatcaagtcttatacgatccgcgtcttttttgacaggatcaggttcttctacaggaagaagtttcggcctcttatgatattcatgtctgggaaacggtggtctagggtgaggctccggtatcggagtgggttttggattataatcatcatcgtctatgacatcatcttcgacttcgatatttattttgctatcttgatgatgtcctgtatcagttgcattttcagcactcgactgaatattagcgcattcattgtttattattaccatatttctaaacccaaaatgtatatgttgaacatcagtactatcgttgatgagtcttatagcatgaattcgcttatcgttatcgggtttagcttctgtcaccttagcaattccttttttattaaactctacataatcatatccatttctattgtttgttctaatataaacgagtatagcatcattgctaaatttttcaatagtatcgaaaacagaatatcctaaaccatataatatatattcaggaacactcaaactaaatgtccaggattctcctaaatacgtaaactttaatagtgcgaaatcattcaaaaatctaccacttatagatagatagtacataaatgcgtatagtagtctacctatctctttattatgaaaaccggcattacgatcatatatgtcgtgatatacctgtgatccgtttacgttaaaccataaatacatgggtgatcctataaacatgaatttatttctaattctcagagctatagttaattgaccgtgtaatatttgcttacatgcatacttgatacgctcattaataagatttttatcattgctcgttatctcagaatcgtatatataaggagtaccatcgtgattcttaccagatattatacaaaatactatatataaaatatattgaccaacgttagtaatcatataaatgtttaacgttttaaattttgtattcaatgatccattatcatacgctagcatggtcttatgatattcattctttaaaatataatattgtgttagccattgcattggggctcctaatggagattttttattctcatccattttaggataggctttcataaagtccctaataacttcgtgaataatgtttctatgttttctactgatgcatgtatttgcttcgatttttttatcccatgtttcatctatcatagatttaaacgcagtaatgctcgcaacattaacatcttgaaccgttggtacaattccgttccataaatttataatgttcgccatttatataactcattttttgaatatacttttaattaacaaaagagttaagttactcatatggacgccgtccagtctgaacatcaatctttttagccagagatatcatagccgctcttagagtttcagcgtgattttccaacctaaatagaacttcatcgttgcgtttacaacacttttctatttgttcaaactttgttgttacattagtaatctttttttccaaattagttagccgttgtttgagagtttcctcattgtcgtcttcatcggctttaacaattgcttcgcgtttagcctctggctttttagcagcctttgtagaaaaaaattcagttgctggaattgcaagatcgtcatctccggggaaaagagttccgtccatttaaagtacagattttagaaactgacactctgcgttatttatatttggtacaacacatggattataaatattgatgttaataacatcagaaaatgtaaagtctatacattgttgcatcgtgttaaattttctaatggatctagtattattgggtccaacttctgcctgaaatccaaatatggaagcggatacaaaaccgtttcctggataaaccacacatctccacttttgctttacatcagaaattgtgtcattgacatcttgaactctcctatctaatgccggtgttccacctatagattttgaatattcgaatgctgcatgagtagcattaaattccttaatattgccataattttcatatattgagtaaccctggataaaaagtaaacacaccgcagccgtcgctaccacaataaaaaaaattgatagagagttcatttataatctattagaagctgacaaaatttttttacacgcatcagacaatgctttaataaatagttcaacatctacttttgtcatatcgaaccgatggtatgattctaacctagaattacatccgaaaaagttgactatgttcatagtcattaagtcattaacaaacaacattccagactctggattataagacgatactgtttcgtcacaattacctaccttaatcatgtgattatgaatattggctattagagcaccttctaagaaatctataatatctttgaaacacgatttaaaatcaaaccacgaatatacttctacgaagaaagttagtttacccataggagaaataactataaatggagatctaaatacaaaatccggatctatgatagttttaacattattatattctctattaaatacctccacatctaaaaatgttaattttgaaactatgtcttcgtttattaccgtacctgaactaaacgctataagctctattgtttgagaactctttaaacgatattcttgaaatacatgtaacaaagtttcctttaactcggtcggtttatctaccatagttacagaatttgtatccttatctataatataataatcaaaatcgtataaagttatataattatcgcgttcagattgtgatcttttcaaatagactaaaaaccccatttctctagtaagtatcttatgtatatgtttgtaaaatatcttcatggtgggaatatgctctaccgcagttagccattcctcattgacagcggtagatgtattagacaaaactattccaatgtttaacaagggccattttacgagattattaaatccttgtttgataaatgtagccaatgagggttcgagttcaacgacgattgaattctcttcccgcggatgctgcatgatgaacgacgggatgttgttcgattgatttggaattctttttcgactttttgtttatattaaatattttaaaatttatagctgatagcaattcatgtactacggataatgtagacgcgtattgcgcatcgatatctttattattagataaatttatcaataaatgtgagaagtttgcctcgttaaggtcttccatttaaatattatataaacatttgtgtttgtatcttattcgtcttttatggaatagttttttactagtaaagctgcaattacacactttgtccgtaaaacataaatataaacaccagcttttatcaatcgttccaaaaagtcgacggcggacatttttaacatggcatctattttaaatacacttaggtttttggaaaaaacatcattttataattgtaacgattcaataactaaagaaaagattaagattaaacataagggaatgtcatttgtattttataagccaaagcattctaccgttgttaaatacttgtctggaggaggtatatatcatgatgatttggttgtattggggaaggtaacaattaatgatctaaagatgatgctattttacatggatttatcatatcatggagtgacaagtagtggagcaatttacaaattgggatcgtctatcgatagactttctctaaataggactattgttacaaaagttaataattatgatgatacattttttgacgacgatgattgatcgctattgcacaattttgtttttttactttctaatatagcgtttagattctttttcatgtgcgaatattgatttactaaaatatcgatgtttaacttttgttctatgacgtccttatcagcggtatcggtacatatacgtaattcaccttcacaaaatacggagtcttcgataataatagccaatcgattattggatctagcggtctgtatcatattcaacatgtttaatatatcctttcgtttcccctttacaggcatcgatcgtagcatattttccgcgtctgagatggaaatgttaaaactacaaaaatgcgtaatgttagcccgtcctaatattggtacgtgtctataagtttggcatagtagaataatagacgtgtttaaatgccttccaaagtttaagaattctattagagtattgcattttgatagtttatcgcctacatcatcaaaaataagtaaaaagtgtgctgattttttatgattttgtgcgacagcaatacatttttctatgttacttttagttcgtatcagattatattctagagattcctgactactaacgaaattaatatgatttggccaaatgtatccatcataatctggattataaacgggtgtaaacaagaatatatgtttatattttttaactagtgtagaaaacagagatagtaaatagatagtttttccagatccagatcctcccgttaaaaccattctaaacggcatttttaataaattttctcttgaaaattgtttttcttggaaacaattcataattatatttacagttactaaattaatttgataataaatcaaaatatggaaaactaaggtcgttagtagggaggagaacaaagaaggcatatcgtgatataaataacatttattatcatgatgacaccagaaaacgacgaagagcagacatctgtgttctccgctactgtttacggagacaaaattcagggaaagaataaacgcaaacgcgtgattggtctatgtattagaatatctatggttatttcactactatctatgattaccatgtccgcgtttctcatagtgcgcctaaatcaatgcatgtctgctaacgaggctgctattactgacgccgctgttgccgttgctgctgcatcatctactcatagaaaggttgcgtctagcactacgcaatatgatcacaaagaaagctgtaatggtttatattaccagggttcttgttatatattacattcagactaccagttattctcggatgctaaagcaaattgcactgcggaatcatcaacactacccaataaatccgatgtcttgattacctggctcattgattatgttgaggatacatggggatctgatggtaatccaattacaaaaactacatccgattatcaagattctgatatatcacaagaagttagaaagtatttttgtgttaaaacaatgaactaatatttatttttgtacattaataaatgaaatcgcttaatagacaaactgtaagtaggtttaagaagttgtcggtgccggccgctataatgatgatactctcaaccattattagtggcataggaacatttctgcattacaaagaagaactgatgcctagtgcttgcgccaatggatggatacaatacgataaacattgttatctagataccaacattaaaatgtctacagataatgcggtttatcagtgtcgtaaattacgagctagattgcctagacctgatactagacatctgagagtattgtttagtattttttataaagattattgggtaagtttaaaaaagaccaataataaatggttagatattaataatgataaagatatagatattagtaaattaacaaattttaaacaactaaacagtacgacggatgctgaagcgtgttatatatacaagtctggaaaactggttgaaacagtatgtaaaagtactcaatctgtactatgtgttaaaaaattctacaagtgacaacaaaaaatgaattaataataagtcgttaacgtacgccgccatggacgccgcgtttgttattactccaatgggtgttgactataacagatacattgtatgatgatctcgatatctcaatcatggactttataggaccatacattataggtaacataaaaactgtccaaatagatgtacgggatataaaatattccgacatgcaaaaatgctactttagctataagggtaaaatagttcctcaggattctaatgatttggctagattcaacatttatagcatttgtgccgcatacagatcaaaaaataccatcatcatagcatgcgactatgatatcatgttagatatagaagataaacatcagccattttatctattcccatctattgatgtttttaacgctacaatcatagaagcgtataacctgtatacagctggagattatcatctaatcatcaatccttcagataatctgaaaatgaaattgtcgtttaattcttcattctgcatatcagacggcaatggatggatcataattgatgggaaatgcaatagtaattttttatcataaaagttgtaaagtaaataataaaacaataaatattgaactagtagtacgtatattgagcaatcagaaatgatgctggtacctcttatcacggtgaccgtagttgcgggaacaatattagtatgttatatattatatatttgtaggaaaaagatacgtactgtctataatgacaataaaattatcatgacaaaattaaaaaagataaagagttctaattccagcaaatctagtaaatcaactgatagcgaatcagactgggaggatcactgtagtgctatggaacaaaacaatgacgtagataatatttctaggaatgagatattggacgatgatagcttcgctggtagtttaatatgggataacgaatccaatgttatggcgcctagcacagaacacatttacgatagtgttgctggaagcacgctgctaataaataatgatcgtaatgaacagactatttatcagaacactacagtagtaattaatgaaacggagactgttaaagtacttaatgaagataccaaacagaatcctaactattcatccaatcctttcgtaaattataataaaaccagtatttgtagcaagtcaaatccgtttattacagaacttaacaataaatttagtgagaataatccgtttagacgagcacatagcgatgattatcttaataagcaagaacaagatcatgaacacgatgatatagaatcatcggtcgtatcattggtgtgattagtttcctttttataaaattgaagtaatatttagtattattgctgccgtcacgttgtacaaatggagatattccctgtattcggcatttctaaaattagcaattttattgctaataatgactgtagatattatatagatacagaacatcaaaaaattatatctgatgagatcaatagacagatggatgaaacggtacttcttaccaacatcttaagcgtagaagttgtaaatgacaatgagatgtaccatcttattcctcatagattatcgacgattatactctgtattagttctgtcggaggatgtgttatctctatagataatgacgtcaatggcaaaaatattctaacctttcccattgatcatgctgtaatcatatccccactgagtaaatgtgtcgtagttagcaagggccctacaaccatactggttgctaaagcggatatacccagcaaacgattggtaacatcgtttacaaacgacatactgtatgtaaacaatctatcactgattaattatttgccgttgtctgtattcattattagacgagtcaccgactatttggatagacacatatgcgatcagatatttgctaataataagtggtattcccttataaccatcgacgataagcaatatcctattccatcaaattgtataggtatgtcttctgccaagtacataaattctagcatcgagcaagatactttaatacatgtttgtaacctcgagcatccattcgacttagtatacaaaaaaatgcagtcgtacaattctgtacctatcaaggaacaaatattgtacggtagaattgataatataaatatgagcattagtatttctgtggattaatagatttctagtatggggatcattaatcatctctaatctctaaatacctcataaaacgaaaaaaaagctattatcaaatactgtacggaatagattcattctcttctctttttatgaaactctgttgtatatctactgataaaactggaagcaaaaaatctgataaaaagaataagatcaagatcaaggattatatggaacacgattattataaaataacaatagttcctggttcctcttccacgtctactagctcgtggtattatacacatgcctagtaatagtctctttgcgttgatggaaagcagactagaaataacaggctaaaatgttcagacaccataatagttcccaacccagataataacagagtaccatcaacacattcctttaaactcaatcccaaacccaaaaccgttaaaatgtatccggccaattgatagtagataatgaggtgtacagcgcatgataatttacacagtaaccaaaatgaaaatactttagtaattataagaaatatagatggtaacgtcatcatcaacaatccaataatatgccggagagtaaacattgacggataaaacaaaaatgctccgcataactctatcatggcaataacacaaccaaatacttgtaagattcctaaattagtagaaaatacaacggatatcgatgtataagtgatctcgagaaataataagaataaagtaatgcccgtaaagataaacatcaacattgtttggtaatcattaaaccaattagtatgacgttgaactaatttcacagtaaattttattccagtattatccccgcatgtataagtacctggtaagatatctttatattccataatcaatgagacatcactatctgataacgaatgaagtctagcactagtatgccatttacttaatattgtcgtcttggaagttttattataagttaaaatatcatggttatccaatttccatctaatatactttgtcggattatctatagtacacggaataatgatggtatcattacatgctgtatactctatggtctttgtagttgttataacaaccaacgtatagaggtatatcaacgatattctaactcttgacattttttatttatttaaaatgatacctttgttatttattttattctattttgctaacggtattgaatggcataagtttgaaacgagtgaagaaataatttctacttacttattagacgacgtattatacacgggtgttaatggggcggtatacacattttcaaataataaactaaacaaaactggtttaactaataataattatataacaacatctataaaagtagaggatgcggataaggatacattagtatgcggaaccaataacggaaatcccaaatgttggaaaatagacggttcagacgacccaaaacatagaggtagaggatacgctccttatcaaaatagcaaagtaacgataatcagtcacaacggatgtgtactatctgacataaacatatcaaaagaaggaattaaacgatggagaagatttgacggaccatgtggttatgatttattcacggcggataacgtaattccaaaagatggtttacgaggagcattcgtcgataaagacggtacttatgacaaagtttacattcttttcactgatactatcggctcaaagagaattgttaaaattccgtatatagcacaaatgtgcctaaacgacgaaggtggtccatcatcgttgtctagtcatagatggtcgacgtttctcaaagtcgaattagaatgtgatatcgacggaagaagttatagataaattattcattctaaaactataaaaacagataatgatacgatactatatgtattcttcgatagtccgcattatgtacctattctatgaataccattaaacaatctttttctacgtcaaaattggaaggatatacaaagcaattgccgtctccagctcctggtatatgtctaccagctggaaaagttgttccacataccacgtttgaagtcatagaaaaatataatgtactagatgatattataaagcctttatctaaccaacctatcttcgaaggaccgtctggtgttaaatggttcgatataaaggagaaggaaaatgaacatcgggaatatagaatatacttcataaaagaaaattctatatattcgttcgatacaaaatctaaacaaactcgtagctcgcaagtcgatgcgcgactattttcagtaatggtaacttcgaaaccgttatttatagcagatatagggataggagtaggaatgccacaaatgaaaaaaatacttaaaatgtaatcttaatcgagtacaccacacgacaatgaacaaacataagacagattatgctggttatgcttgctgcgtaatatgcggtctaattgttggaattatttttacagcgacactattaaaagttgtagaacgtaaattagttcatacaccatcaatagataaaacgataaaagatgcatatattagagaagattgtcctactgactggataagctataataataaatgtatccatttatctactgatcgaaaaaacctgggaggaaggacgtaatgcatgcaaagctctaaatccaaattcggatctaattaagatagagactccaaacgagttaagttttttaagaagccttagacgaggctattgggtaggagaatccgaaatattaaaccagacaaccccatataattttatagctaaaaatgccacgaagaatggaactaaaaaacggaaatatatttgtagtacaacgaatactcccaaactgcattcgtgttacactatataacaattacactacatttttatcataacactacttcggttagatgttttagaaaaaaataaatatcgccgtaccgttcttgtttttataaaaataacaattaacaattatcaaattttttctttaatattttacgtggttgaccattcttggtggtaaaataatctcttagtgttggaatggaatgctgtttaatgtttccgcactcatcgtatattttgacgtatgcagtcacatcgtttacgcaatagtcagactgtagttctatcatgcttcctacatcagaaggaggaacagttttaaagtctcttggttttaatctattgccattagttttcatgaaatcctttgttttatccacttcacattttaaataaatgtccactatacattcttctgttaattttactagatcgtcatgggtcatagaatttataggttccgtagtccatggatccaaactagcaaacttcgcgtatacggtatcgcgattagtgtatacaccaactgtatgaaaattaagaaaacagtttaataaatcaacagaaatatttaatcctccgtttgatacagatgcgccatatttatggatttcggattcacacgttgtttgtctgaggtgttcgtctagtgttgcttctacgtaaacttcgattcccatatattctttattgtcagaatcgcataccgatttatcatcatacactgtttgaaaactaaatggtatacacatcaaaataataaataataacgagtacattctgcaatattgttatcgtaattggaaaattagtgttcgagtgagtcggattatgtgagtactggattgtatattttattttatattttgtaataagaataaaatgctaatgtcaagtttattccaatagatgtcttattaaaaaacatatataataaataacaatggctgaatggcataaaattatcgaggatatctcaaaaaataataagttcgaggatgccgccatcgttgattacaagactacaaagaatgttctagctgctattcctaacagaacatttgccaagattaatccgggtgaaattattcctctcatcactaatcgtaatattctaaaacctcttattggtcagaaatattgtattgtatatactaactctctaatggatgagaacacgtatgctatggagttgcttactgggtacgcccctgtatctccgatcgttatagcgagaactcataccgcacttatatttttgatgggtaagccaacaacatccagacgtgatgtgtatagaacgtgtagagatcacgctacccgtgtacgcgcaactggtaattaaaataaaaagtaatattcatatgtagtgtcaattttaaatgatgatgatgaaatggataatatccatattgacgatgtcaataatgccggtattggcatacagctcatcgatttttagatttcattcagaggatgtggaattatgttatgggcatttgtattttgataggatctataatgtagtaaatataaaatataatccgcatattccatatagatataattttattaatcgcacgttaaccgtagatgaactagacgataatgtcttttttacacatggttattttttaaaacacaaatatggttcacttaatcctagtttgattgtctcattatcaggaaacttaaaatataatgatatacaatgctcagtaaatgtatcgtgtctcattaaaaatttggcaacgagtacatctactatattaacatctaaacataagacttattctctacatcggtccacgtgtattactataataggatacgattctattatatggtataaagatataaatgacaagtataatgacatctatgattttactgcaatatgtatgctaatagcgtctacattgatagtgaccatatacgtgtttaaaaaaataaaaatgaactcttaattatgctatgctattagaaatggataaaatcaaaattacggttgattcaaaaattggtaatgttgttaccatatcgtataacttggaaaagataactattgatgttacacctaaaaagaaaaaagaaaaggatgtattattagcgcaatcagttgctgtcgaagaggcaaaagatgtcaaggtagaagaaaaaaatattatcgatattgaagatgacgatgatatggatgtagaaagcgcataatacgatctataaaaataagtatataataaatactttttatttacggtactcttgtagtggtgataccctactcaattatttttttaaaaaaatacttattctgattcttctagccatttccgtgttcgttcgaatgccacatcgacgttaaagataggggagtagttgaaatctagttctgcattgttggtacgcacctcaaatgtagtgttggatatcttcaacgtatagttgttgagtagtgatggttttctaaatagaattctcttcatatcattcttgcacgcgtacatttttagcatccatcttggaattctagatccttgttctattcccaatggtttcatcaatagaagattaaacatatcgtacgaacacgatggagagtaatcgtagcaaaagtaagcatttcctttaatcttagatcccggatactggatatattttgcagccaacacgtgcatccatgcagcatttcctacatatacccggctatgcaccgcgtcatcatcgactgtacgatacataatgttaccgtgttgcttacattgctcgtaaaagactttcgtcaatttgtctccttctccgtaaattccagtgggtcttaggcaacaagtatacaattttgctccattcatgattacggaattattggctttcataaccagttgctcggccatacgtttactttttgcgtatacatgtcctggtgatatatcataaagggtatgctcatggccgatgaatggatcaccgtgtttattgggtcctattgcttccatgctactagtatagatcaaatacttgattcctaggtccacacaagctgccaatatagtctgtgttccataatagtttactttcatgatttcattatcggtgtattttccaaatacatccactagagcagccgtatgaataatcagatttaccccatctagcgcttctctcaccttatcaaagtcgtttatatcacattgtatatagtttataaccttaactttcgaggttattggttgtggatcttctacaatatctatgactctgatttcttgaacatcatctgcactaattaacagttttactatatacctgcctagaaatccggcaccaccagtaaccgcgtacacggccattgctgccactcataatatcagactacttattctattttactaaataatggctgtttgtataatagaccacgataatatcagaggagttatttactttgaaccagtccatggaaaagataaagttttaggatcagttattggattaaaatccggaacgtatagtttgataattcatcgttacggagatattagtcaaggatgtgattccataggcagtccagaaatatttatcggtaacatctttgtaaacagatatggtgtagcatatgtttatttagatacagatgtaaatatatttacaattattggaaaggcgttatctatttcaaaaaatgatcagagattagcgtgtggagttattggtatttcttacataaatgaaaagataatacattttcttacaattaacgagaatggcgtttgatatatcagttaatgcgtctaaaacaataaatgcattagtttacttttctactcagcaaaataaattagtcatacgtaatgaagttaatgatacacactacactgtcgaatttgatagggacaaagtagttgacacgtttatttcatataatagacataatgacaccatagagataagaggggtgcttccagaggaaactaatattggttgcgcggttaatacgccggttagtatgacttacttgtataataagtatagttttaaactgattttagcagaatatataagacacagaaatactatatccggcaatatttattcggcattgatgacactagatgatttggctattaaacagtatggagacattgatctattatttaatgagaaacttaaagtagactccgattcgggactatttgactttgtcaactttgtaaaggatatgatatgttgtgattctagaatagtagtagctctatctagtctagtatctaaacattgggaattgacaaataaaaagtataggtgtatggcattagccgaacatatatctgatagtattccaatatctgagctatctagactacgatacaatctatgtaagtatctacgcggacacactgagagcatagaggatgaatttgattattttgaagacgatgattcgtctacatgttctgccgtaaccgacagggaaacggatgtataattttttttatagcgtgaaggatatgataaaaaatataattgttgtatttatcccattccaatcaccttatatgattctgtaaaaaaattatactgtaacacaataaaggagtcttatagatgtatagaggtcagatactggtttgataaactgtttattccacataagtatgtttgactttatggttagacccgcatactttaacaaatcactgaaaattggagttaggtattgacctctcagaatcagttgccgttctggaacattaaatgtattttttatgatatactccaacgcatttatgtgggcatacaacaagtcattactaatggagtattccaagagttttagttgtctagtatttaacaagagaagagatttcaacagactgtttatgaactcgaacgccgcctcattgtcgcttatattgatgatgtcgaattctcccaatatcatcactgatgagtagctcatcttgttatcgggatccaagttttctaaagatgtcattaaaccctcgatcatgaatggatttatcatcatcgtttttatgttggacatgagcttagtccgtttgtccacatctatagacgacgatttctgaattatttcatatatccctctctttaactccaggaacttgtcaggatggtctactttaatatgttctcgtctaagagatgaaaatctttggatggttgcacgcgacttttctttaaaggatgacgttgcccaagatcctctcttaaatgaatccatcttatccttggacaagatggacagtctattttccttagatggtttaatatttttgttacccatgatctataaaggtagacctaatcgtctcggatgaccatatatttattttcagttttattatacgcataaattgtaaaaaatatgttaggtttacaaaaatgtctcgtggggcattaatcgtttttgaaggattggacaaatctggaaaaacaacacaatgtatgaacatcatggaatctataccggcaaacacgataaaatatcttaactttcctcagagatccactgtcactggaaagatgatagatgactatctaactcgtaaaaaaacctataatgatcatatagttaatctattattttgtgcaaatagatgggagtttgcatcttttatacaagaacaactagaacagggaattactttaatagttgatagatacgcattttctggagtagcgtatgccgccgctaaaggcgcgtcaatgactctcagtaagagttatgaatctggattgcctaaacccgacttagttatattcttggaatctggtagcaaagaaattaatagaaacgtcggcgaggaaatttatgaagatgttacattccaacaaaaggtattacaagaatataaaaaaatgattgaagaaggagatattcattggcaaattatttcttctgaattcgaggaagatgtaaagaaggagttgattaagaatatagttatagaggctatacacacggttactggaccagtggggcaactgtggatgtaatagtgaaattacattttttataaatagatgttagtacagtgttataaatggatgaagcatattactctggcaacttggaatcagtactcggatacgtgtccgatatgcataccgaactcgcatcaatatctcaattagttattgccaagatagaaactatagataatgatatattaaacaaggacattgtaaattttatcatgtgtagatcaaacttggataatccatttatctctttcctagatactgtatatactattatagatcaagagatctatcagaccgaattgattaattcattagacgacaatgaaattatcgattgtatagttaacaagtttatgagcttttataaggataacctagaaaatatagtagatgctatcattactctaaaatatataatgaataatccagattttaaaactacgtatgccgaagtactcggttccagaatagccgatatagatattaaacaagtgatacgtaagaatatactacaattgtctaatgatatccgcgaacgatatttgtgaaaaatattaaaaaaaaatactttttttattaaatgacgtcgcttcgcgaatttagaaaattatgctgtgatatatatcacgcatcaggatataaagaaaaatctaaattaattagagactttataacagatagggatgataaatatttgatcattaagctattgcttcccggattagacgatagaatttataacatgaacgataaacaaattataaaattatatagtataatatttaaacaatctcaggaagatatgctacaagatttaggatacggatatataggagacactattaggactttcttcaaagagaacacagaaatccgtccacgagataaaagcattttaactttagaagaagtggatagttttttaactacgttatcatccgtaactaaagaatcgcatcaaataaaattattgactgatgtagcatctgtttgtacatgtaatgatttaaaatgtgtagtcatgcttattgataaagatctaaaaattaaagcgggccctcggtacgtacttaacgctattagtcctcatgcctatgatgtgtttagaaaatctaataacttgaaagagataatagaaaatgcatctaaacaaaatctagactctatatctatttctgttatgactccaattaatcccatgttagcggaatcgtgtgattctgtcaataaggcgtttaaaaaatttccatcaggaatgtttgcggaagtcaaatacgatggtgaaagagtacaagttcataaaaataataacgagtttgccttctttagtagaaacatgaaaccagtactctctcataaagtggattatctcaaagaatacataccgaaagcatttaaaaaagctacgtctatcgtattggattctgaaattgttcttgtagacgaacataatgtaccgctaccgtttggaagtttaggaatacacaaaaagaaagaatataaaaactctaacatgtgtttgttcgtgtttgactgtttgtactttgatggattcgatatgacggacattccattgtacgaacgaagatcttttctcaaagatgttatggttgaaatacccaatagaatagtattctcagagttgacgaatattagtaacgagtctcagttaactgacgtattggatgatgcactaacgagaaaattagaaggattggtcttaaaagatattaatggagtatacgaaccgggaaagagaagatggttaaaaataaagcgagactatttgaacgagggttccatggcagattctgccgatttagtagtactaggtgcctactatggtaaaggagcaaagggtggtatcatggcagtctttctaatgggttgttacgacgatgaatccggtaaatggaagacggttaccaagtgttcaggacacgatgataatacgttaagggagttgcaagaccaattaaagatgattaaaattaacaaggatcccaaaaaaattccagagtggttagtagttaataaaatctatattcccgattttgtagtagaggatccgaaacaatctcagatatgggaaatttcaggagcagagtttacatcttccaagtcccataccgcaaatggaatatccattagatttcctagatttactaggataagagaggataaaacgtggaaagaatctactcatctaaacgatttagtaaacttgactaaatcttaatagttacatacaaactgaaaattaaaataacaccatttagttggtggtcgccatggatggtgttattgtatactgtctaaacgcgttagtaaaacatggcgaggaaataaatcatataaaaaatgatttcatgattaaaccatgttgtgaaagagtttgtgaaaaagtcaagaacgttcacattggcggacaatctaaaaacaatacagtgattgcagatttgccatatatggataatgcggtatccgatgtatgcaattcactgtataaaaagaatgtatcaagaatatccagatttgctaatttgataaagatagatgacgatgacaagactcctactggtgtatataattattttaaacctaaagatgttattcctgttatcatatctataggaaaggataaagatgtctgtgaactattaatctcatcagacatatcgtgtgcatgcgtggagttaaattcatatcacgtagccattcttcccatgaatgtttccttttttaccaaaggaaatgcctcgttgattattctcctgtttgatttctctatcgatgcagcacctctcttaagaagtgtaaccgataataatgttattatatctagacaccagcgtctacatgacgagcttccgagttccaattggttcaagttttacataagtataaagtccgactattgttctatattatatatggttgttgatggatctgtgatgcatgcgatagctgataatagaactcacgcaattattagcaaaaatatattagacaatactacaattaacgatgagtgtagatgctgttattttgaaccacagattaggattcttgatagagatgagatgctcaatggatcatcgtgtgatatgaacagacattgtattatgatgaatttacctgatgtaggcgaatttggatctagtatgttggggaaatatgaacctgacatgattaagattgctctttcggtggctggtaatttaataagaaatcgagactacattcccgggagacgaggctatagctactacgtttacggtatagcctctagataatttttttaagcacgaaataaaaaacataattttaaaccaatctatttcatactattttgtgtgatcaccatggacataaagatagatattagtatttctggtgataaatttacggtgactactaggagggaaaatgaagaaagaaaaaaatatctacctctccaaaaagaaaaaactactgatgttatcaaacctgattatcttgagtacgatgacttgttagatagagatgagatgtttactattctagaggaatattttatgtacagaggtctattaggcctcagaataaaatatggacgactctttaacgaaattaaaaaattcgacaatgatgcggaagaacaattcggtactatagaagaactcaagcagaaacttagattaaattctgaagagggagcagataactttatagattatataaaggtacaaaaacaggatatcgtcaaacttactgtatacgattgcatatctatgataggattgtgtgcatgcgtggtagatgtttggagaaatgagaaactgttttctagatggaaatattgtttacgagcgattaaactgtttattaatgatcacatgcttgataagataaaatctatactgcagaatagactagtatatgtggaaatgtcatagaaagttaatgagagcaaaaatatataaggttgtattccatatttgttattttttctgtaatagttaaaaaaatacattcgatggtctatctatcagattattatgtgttataaggtactttttctcataataaactagagtatgagtaagatagtgtttttcaaaacatataaatctaaaattgatggatgagatatacagctattaatttcgaaaatatataaatctaaaattgatggataagatatacagctattaatttcgaaaatatattttaatctgataactttaaacatggatttttgatggtggtttaacgttttaaaaaaagattttgttattgtagtatatgataatattaaaagatggatataaagaatttgctgactgcatgtactattttttacattactacattggctacggcagatatacctactccgccaccaacgggtcatgtgacaagggagaatatcttgataagaggcataatcaatgttgtaatcggtgtccacctggagaatttgccaaggttagatgtaatggtaacgataacacaaaatgtgaacgctgcccacctcatacatataccacaatccccaattattctaatggatgtcatcaatgtagaaaatgcccaaccggatcatttgataaggtaaagtgtaccggaacacagaacagtaaatgttcgtgtcttcctggttggtattgcgctactgattcttcacagactgaagattgttgaaattgtgtaccaaaaaggagatgtccatgcggatactttggtggaatagatgaacaaggaaatcctatttgtaaatcgtgctgtattggtgaatattgcaactacctacgtaattatagacttgatccattttctccatgcaaactatctaaatgtaattaattatgattttgatgataatgttaccatacattatatcgctacttggttagtgtattattcagtatgaagacctattaataattacttatcttttgacgatcttgttataattataatataaaaacttatggcatagtaactcataattgctgacgcgataaattcgtaataatctgttttgttcaaatttttataaggaatctacaggcataaaaataaaaatataatttataatatactcttacagcgcgccatcatgaatagcagcagtaaattaattgctgttattaatggatttagaaatagtggacgattttgtgatattaatatagttattaatgatgaaaggataaacgctcacagactcatcctatctggagcctccgaatatttttccattctgttttccaataattttatcgattctaatgaatacgaagttaatctaagtcatttagattatcaaagtgttaacgatttgatcgattacatttatgggatacctttgagcctaactaacgataacgtgaaatatattctttcaaccgctgattttttacaaattggatctgccattactgagtgcgaaaaatacatacttaaaaatctttgttctagaaactgtatcgatttctacatatacgctgataaatataataacaagaaaatagaatcagcgtcgtttaacacaatattacgaaatattttgagactcatcaacgatgaaaactttaaatacttaacagaggaatcaatgataaaaattttaagcgatgatatgttaaatataaaaaatgaggattttgcaccactaattctcattaaatggttagagagtactcaacaatcatgcaccgtcgagttacttagatgcctcagaatatcattgctttccccacaagttataaaatcactttatagtcatcaactggttagttcaatctacgaatgtataacattcttaaacaatatagcattcttggatgaatcatttcctagataccatagcatcgagttgatatctatcggtataagtaattcgcatgataagatttccataaactgctacaatcataaaaaaaatacatgggaaatgatatcttcacgtagatataggtgtagtttcgcagtggccgtcctggataatattatctatatgatgggtggatatgatcagtccccgtatagaagttcaaaggttatagcgtacaatacatgtacaaattcttggatatatgatataccagagctaaaatatcctcgttctaattgtgggggactggctgatgacgaatacatttattgtataggcggcatacgcgatcaggattcatcgttgacatctagtattgatagatggaagccatcaaaaccatattggcagaagtatgctaaaatgcgcgaaccaaaatgtgatatgggggttgcgatgttaaacggattaatatatgtcatgggtggaatcgttaaaggtgacacgtgtaccgacgcactagagagtttatcagaagatggatggatgaagcatcaacgtcttccaataaaaatgtccaatatgtcgacgattgttcatgatggcaagatttatatatctggaggttacaacaatagtagtgtagttaatgtaatatcgaatctagtccttagctataatccgatatatgatgaatggaccaaattatcatcattaaacattcctagaattaatcccgctctatggtcagcgcataataaattatatgtaggaggaggaatatctgatgatgttcgaactaatacatctgaaacatacgataaagaaaaagattgttggacattggataatggtcacgtgttaccacgcaattatataatgtataaatgcgaaccgattaaacataaatatccattggaaaaaacacagtacacgaatgattttctaaagtatttggaaagttttataggtagttgatagaacaaaatacataattttgtaaaaataaatcactttttatactaatatgacacgattaccaatacttttgttactaatatcattagtatacgctacaccttttcctcagacatctaaaaaaataggtgatgatgcaactctatcatgtaatcgaaataatacaaatgactacgttgttatgagtgcttggtataaggagcccaattccattattcttttagctgctaaaagcgacgtcttgtattttgataattataccaaggataaaatatcttacgactctccatacgatgatctagttacaactatcacaattaaatcattgactgctagagatgccggtacttatgtatgtgcattctttatgacatcaactacaaatgacactgataaagtagattatgaagaatactccacagagttgattgtaaatacagatagtgaatcgactatagacataatactatctggatctacacattcaccagaaactagttctgagaaaccagaggatatagataattttaattgctcgtcggtattcgaaatcgcgactccggaaccaattactgataatgtagaagatcatacagacaccgtcacatacactagtgatagcattaatacagtaagtgcatcatctggagaatccacaacagacgagactccggaaccaattactgataaagaagaagatcatacagtcacagacactgtctcatacactacagtaagtacatcatctggaattgtcactactaaatcaaccaccgatgatgcggatctttatgatacgtacaatgataatgatacagtaccaccaactactgtaggcggtagtacaacctctattagcaattataaaaccaaggactttgtagaaatatttggtattaccgcattaattatattgtcggccgtggcaatattctgtattacatattatatatataataaacgttcacgtaaatacaaaacagagaacaaagtctagatttttgacttacataaatgtctgggatagtaaaatctatcatattgagcggaccatctggttcaggaaagacagccatagccaaaagactatgggaatatatttggatttgtggtgtcccataccactagatttcctcgtcctatggaacgagaaggtgtcgattaccattacgttaacagagaggccatctggaagggaatagccgccggaaactttctagaacatactgagtttttaggaaatatttacggaacttctaaaactgctgtgaatacagcggctattaataatcgtatttgtgtgatggatctaaacatcgatggcgttagaagtcttaaaaatacgtacctaatgccttactcggtgtatataagacctacctctcttaaaatggttgagaccaagcttcgttgtagaaacactgaagcggatgatgagattcatcgtcgtgtgatgttggcaaaaactgacatggatgaggcaggtgaagccggtctattcgacactattatcattgaagatgatgtgaatttagcatatagtaagttaattcagatactacaggaccgtattagaatgtattttaacactaattagagacttaagacttaaaacttgataattaataatataactcgtttttatatgtggctatttcaacgtctaatgtattagttaaatattaaaacttaccacgtaaaacttaaaatttaaaatgatatttcattgacagatagatcacacattatgaactttcaaggacttgtgttaactgacaattgcaaaaatcaatgggtcgttggaccattaataggaaaaggtggattcggtagtatttatactactaatgacaataattatgtagtaaaaatagagcccaaagctaacggatcattatttaccgaacaggcattttatactagagtacttaaaccatccgttatcgaagaatggaaaaaatctcacaatataaagcacgtaggtcttatcacgtgcaaggcatttggtctatacaaatccattaatgtggaatatcgattcttggtaattaatagattaggtgcagatctagatgcggtgatcagagccaataataatagattaccaaaaaggtcggtgatgttgatcggaatcgaaatcttaaataccatacaatttatgcacgagcaaggatattctcacggagatattaaagcgagtaatatagtcttggatcaaatagataagaataaattatatctagtggattacggattggtttctaaattcatgtctaatggcgaacatgttccatttataagaaatccaaataaaatggataacggtactctagaatttacacctatagattcgcataaaggatacgttgtatctagacgtggagatctagaaacacttggatattgtatgattagatggttgggaggtatcttgccatggactaagatatctgaaacaaagaattgtgcattagtaagtgccacaaaacagaaatatgttaacaatactgcgactttgttaatgaccagtttgcaatatgcacctagagaattgctgcaatatattaccatggtaaactctttgacatattttgaggaacccaattacgacgagtttcggcacatattaatgcagggtgtatattattaagtgtggtgtttggtcgatgtaaaatttttgtcgataaaaattaaaaaataacttaatttattattgatctcgtgtgtacaaccgaaatcatggcgatgttttacgcacacgctctcggtgggtacgacgagaatcttcatgcctttcctggaatatcatcgactgttgccaatgatgtcaggaaatattctgttgtgtcagtttataataacaagtatgacattgtaaaagacaaatatatgtggtgttacagtcaggtgaacaagagatatattggagcactgctgcctatgtttgagtgcaatgaatatctacaaattggagatccgatccatgatcaagaaggaaatcaaatctctatcatcacatatcgccacaaaaactactatgctctaagcggaatcgggtacgagagtctagacttgtgtttggaaggagtagggattcatcatcacgtacttgaaacaggaaacgctgtatatggaaaagttcaacatgattattctactatcaaagagaaggccaaagaaatgaatgcactcagttcaggacctatcatcgattaccacgtctggataggagattgtatctgtcaagttactgctgtggacgtacatggaaaggaaattatgagaatgagattcaaaaagggtgcggtgctacagatcccaaatctggtaaaagttaaacttggggagaatgatacagaaaatctttcttctactatatcggcggcaccatcgaggtaaccacctctcaagaagaccgcgtgaataatgtactcatgaaacgtttggaaactatacgccatatgtggtctgttgtatatgatcattttgatattgtgaatggtaaagaatgctgttatgtgcatacgcattcatctaatcaaaatcctataccgagtactgtaaaaacaaatttgtacatgaagactatgggatcatgcattcaaatggattccatggaagctctagagtatcttagcgaactgaaggaatcaggtggatggagtcccagaccagaaatgcaggaatttgaatatccagatggagtggaagacactgaatcaattgagagattggtagaggagttcttcaatagatcagaacttcaggctggtaaattagtcaaatttggtaattctattaattgttaaacatacatctgtttcagctaagcaactaagaacacgtatacggcagcagcttccttttatactctcatcttttaccaacacaaagggtggatatttgttcattggagttgataataatacacacaaagtatttggattcacggtgggttacgactacctcagactgatagagaatgatatagaaaagcatatcaaaagactttgtgttgtgcatttctgtgagaagaaagaggacatcaagtacacgtgtcgattcatcaaggtatataaacctggggatgaggctacctcgacatacgtgtgcgctatcaaagtggaaagatgctgttgtgctgtgtttgcagattggccagaatcatggtatatggatactaatggtatcaagaagtattctccagatgaatgggtgtcacatataaaattttaattaatgtaactatagagaacaaataataggttgtaatatcatatagacaataactaacaattaattagtaactgttatctcttttttaactaaccaactaactatatacctattaatacatcgtaattatagttcttaacatctattaatcattgattcgcttctttaattttttataaactaacattgttaattgaaaagggataacatgttacagaatataaattatatatggatttttttaaaaaggaaatacttgactggagtgtatatttatctcttcattatatagcacgcgtgtgttccaattcttccacatcccatataatacaggattataatctcgttcgaacatacgagaaagtggataaaacaatagttgattttttatctaggttgccaaatttattccatattttagaatatggggaaaatattctacatatttattctatggatgatgctaatacgaatattataattttttttctagatagagtattaaatattaataagaacgggtcatttatacacaatctcaggttatcatcatccattaatataaaagaatatgtatatcaattagttaataatgatcatccagataataggataagactaatgcttgaaaatggacgtagaacaagacattttttgtcctatatatcagatacagttaatatctatatatgtattttaataaatcatggattttatatagatgcagaagacagttacggttgtacattattacatagatgtatatatcactataagaaatcagaatcagaatcatacaatgaattaattaagatattgttaaataatggatccgatgtagataaaaaagatacgtacggaaacacaccttttatcctattatgtaaacacgatatcaacaacgtggaattgtttgagatatgtttagagaatgctaatatagactctgtagactttaatagatatacacctcttcattatgtctcatgtcgtaataaatatgattttgtaaagttattaatttctaaaggagcaaatgttaatgcgcgtaataaattcggaactactccattttattgtggaattatacacggtatctcgcttataaaactatatttggaatcagacacagagttagaaatagataatgaacatatagttcgtcatttaataatttttgatgctgttgaatctttagattatctattatccagaggagttattgatattaactatcgtactatatacaacgaaacatctatttacgacgctgtcagttataatgcgtataatacgttggtctatctattaaacagaaatggtgattttgagacgattactactagtggatgtacatgtatttcggaagcagtcgcaaacaacaacaaaataataatggaagtactattgtctaaacgaccatctttgaaaattatgatacagtctatgatagcaattactaaaaataaacaacataatgcagatttattgaaaatgtgtataaaatatactgcgtgtatgaccgattatgatactcttatagatgtacagtcgctacagcaatataaatggtatattttaaaatgtttcgatgaaatagatatcatgaagagatgttatataaaaaataaaactgtattccaattagttttttgtatcaaagacattaatactttaatgagatatggtaaacatccttctttcgtgaagtgcactagtctcgacgtatacggaagtcgtgtacgtaatatcatagcatctattagatatcgtcagagattaattagtctattatccaagaagctggatgcgggagataaatggtcgtgttttcctaacgaaataaaatataaaatattggaaaactttaacgataacgaactatccacatatctaaaaatcttataaacactattaaaatataaaatctaagtaggataaaatcacactacatcattgtttccttttagtgctcgacagtgtatactatttttaacactcataaataaaaatgaaaacgatttccgttgttacgttgttatgcgtactacctgctgttgtttattcaacatgtactgtacccactatgaataacgctaaattaacgtctaccgaaacatcgtttaatgataaacagaaagttacatttacatgtgatcagggatatcattctttggatccaaatgctgtctgcgaaacagataaatggaaatacgaaaatccatgcaagaaaatgtgcacagtttctgattatgtctctgaattatatgataagccattatacgaagtgaattccaccatgacactaagttgcaacggcgaaacaaaatattttcgttgcgaagaaaaaaatggaaatacttcttggaatgatactgttacgtgtcctaatgcggaatgtcaacctcttcaattagaacacggatcgtgtcaaccagttaaagaaaaatactcatttggggaatatatgactatcaactgtgatgttggatatgaggttattggtgcttcgtacataagttgtacagctaattcttggaatgttattccatcatgtcaacaaaaatgtgatataccgtctctatctaatggattaatttccggatctacattttctatcggtggcgttatacatcttagttgtaaaagtggttttatactaacgggatctccatcatccacatgtatcgacggtaaatggaatcccatactcccaacatgtgtacgatctaacgaaaaatttgatccagtggatgatggtcccgacgatgagacagatttgagcaaactctcgaaagacgttgtacaatatgaacaagaaatagaatcgttagaagcaacttatcatataatcatagtggcgttaacaattatgggcgtcatatttttaatctccgttatagtattagtttgttcctgtgacaaaaataatgaccaatataagttccataaattgctaccgtaaatataaatccgttaaaataattaataatttaataacaaacaagtatcaaaagattaaagacttatagctagaatcaattgagatgtcttcttcagtggatgttgatatctacgatgccgttagagcatttttactcaggcactattataacaagagatttattgtgtatggaagaagtaacgccatattacataatatatacaggctatttacaagatgcgccgttataccgttcgatgatatagtacgtactatgccaaatgaatcacgtgttaaacaatgggtgatggatacacttaatggtataatgatgaatgaacgcgatgtttctgtaagcgttggcaccggaatactattcatggaaatgtttttcgattacaataaaaatagtatcaacaatcaactaatgtatgatataattaatagcgtatctataattctagctaatgagagatatagaagcgcttttaacgacgatggtatatacatccgtagaaatatgattaacaagttgtacggatacgcatctctaactactattggcacgatcgctggaggtgtttgttattatctgttgatgcatctagttagtttgtataaataattatttcaatatactagttaaaattttaagattttaaatgtataaaaaactaataacgtttttatttgtaataggtgcattagcatcctattcgaataatgagtacactccgtttaataaactgagtgtaaaactctatatagatggagtagataatatagaaaattcatatactgatgataataatgaattggtgttaaattttaaagagtacacaatttctattattacagagtcatgcgacgtcggatttgattccatagatatagatgttataaacgactataaaattattgatatgtataccattgactcgtctactattcaacgcagaggtcacacgtgtagaatatctaccaaattatcatgccattatgataagtacccttatattcacaaatatgatggtgatgagcaacaatattctattactgcagagggaaaatgctataaaggaataaaatatgaaataagtatgatcaacgatgatactctattgagaaaacatactcttaaaattggatctacttatatatttgatcgtcatggacatagtaatacatattattcaaaatatgatttttaaaaatttaaaatatattatcacttcagtgacagtagtcaaataacaaacaacaccatgagatatattataattctcgcagttttgttcattaatagtatacacgctaaaataactagttataagtttgaatccgtcaattttgattccaaaattgaatggactggggatggtctatacaatatatcccttaaaaattatggcatcaagacgtggcaaacaatgtatacaaatgtaccagaaggaacatacgacatatccgcatttccaaagaatgatttcgtatctttctgggttaaatttgaacaaggcgattataaagtggaagagtattgtacgggactatgcgtcgaagtaaaaattggaccaccgactgtaacattgactgaatacgacgaccatatcaatttgtacatcgagcatccgtatgctactagaggtagcaaaaagattcctatttacaaacgcggtgacatgtgtgatatctacttgttgtatacggctaacttcacattcggagattctaaagaaccagtaccatatgatatcgatgactacgattgcacgtctacaggttgcagcatagactttgtcacaacagaaaaagtgtgcgtgacagcacagggagccacagaagggtttctcgaaaaaattactccatggagttcgaaagtatgtctgacacctaaaaagagtgtatatacatgcgcaattagatccaaagaagatgttcccaatttcaaggacaaaatggccagagttatcaagagaaaatttaataaacagtctcaatcttatttaactaaatttctcggtagcacatcaaatgatgttaccacttttcttagcatgcttaacttgactaaatattcataactaatttttattaatgatacaaaaacgaaataaaactgcatattatacactggttaacgcccttataggctctaaccattttcaagatgaggtccctgattatagtccttctgttcccctctatcatctactccatgtctattagacgatgtgagaagactgaagaggaaacatggggattgaaaatagggttgtgtataattgccaaagatttctatcccgaaagaactgattgcagtgttcatctcccaactgcaagtgaaggattgataactgaaggcaatggattcagggatatacgaaacaccgataaattataaaaaaagcaatgtgtccgctgtttccgttaataatactattttcgtaactggcggattattcataaataactctaatagcacgatcgtggttaacaatatggaaaaacttgacatttataaagacaaacaatggtcgattatagaaatgcctatggctagggtatatcacggcatcgactcgacatttggaatgttatattttgccggaggtctatccgttaccgaacaatatggtaatttagagaaaaacaacgagatatcttgttacaatcctagaacgaataagtggtttgatatttcatatactatttataagatatccatatcatcattgtgtaaactaaataacgtcttctatgtatttagtaaggacattggatatgtggaaaagtatgatggtgcatggaagttagtacatgatcgtctccccgctataaaggcattatcaacttctccttattgattgaaaatgaaaatataaatagtttttatgtatagcagtattaccctatagttttattgcttactactaacatggatacagatgttacaaatgtagaagatatcataaatgaaatagatagagagaaagaagaaatactaaaaaatgtagaaattgaaaataataaaaacattaacaagaatcatccaagtggatatattagagaagcactcgttattaatacaagtagtaatagtgattccattgataaagaagttatagaatgtatcagtcacgatgtaggaatatagatcatatctactaatttttataatcgatacaaaacataaaaaacaactcgttattacatagcaggcatggaatccttcaagtattgttttgataacgatggcaagaaatggattatcggaaatactttatattctggtaattcaatactatataaggtcagaaaaaatttcactagttcgttctacaattacgtaatgaaaatagatcacaaatcacacaagccattgttgtctgaaatacgattctatatatctgtattggatcctttgactatcgacaactggacacgggaacgtggtataaagtatttggctattccagatctgtatggaattggagaaaccgatgattatatgttcttcgttataaagaattcgggaagagtattcgccccaaaggatactgaatcagtcttcgaagcatgcgtcactatgataaacacgttagagtttatacactctcgaggatttacccatggaaaaatagaaccgaggaatatactgattagaaataaacgtctttcactaattgactattctagaactaacaaactatacaagagtggaaactcacatatagattacaacgaggacatgataacttcaggaaatatcaattatatgtgtgtagacaatcatcttggagcaacagtttcaaaacgaggagatttagaaatgttgggatattgcatgatagaatggttcggtggcaaacttccatggaaaaacgaaagtagtataaaagtaataaaacaaaaaaaagaatataaaaaatttatagctactttctttgaggactgttttcctgaaggaaatgaacctctggaattagttagatatatagaattagtatacacgttagattattctcaaactcctaattatgacagactacgtaaactgtttatacaagattgaaattatattctttttttatagagtgtggtagtgttacggatatctaatattaatattagactatctctatcgcgctacacgaccaatatcgattactatggatatcttcagggaaatcgcatcttctatgaaaggagagaatgtattcatttctccagcgtcaatctcgtcagtattgacaatactgtattatggagctaatggatccactgctgaacagctatcaaaatatgtagaaacggaggagaacacggataaggttagcgctcagaatatctcattcaaatccatgaataaagtatatgggcgatattctgccgtgtttaaagattcctttttgagaaaaattggcgataagtttcaaactgttgacttcactgattgtcgcactatagatgcaatcaacaagtgtgtagatatctttactgaggggaaaatcaatccactattggatgaaccattgtctcctgatacctgtctcctagcaattagtgccgtatactttaaagcaaaatggttgatgccattcgaaaaggaatttaccagtgattatcccttttacgtatctccgacggaaatggtagatgtaagtatgatgtctatgtacggcaaggcatttaatcacgcatctgtaaaggaatcattcggcaacttttcaatcatagaactgccatatgttggagatactagtatgatggtcattcttccagacaagattgatggattagaatccatagaacaaaatctaacagatacaaattttaagaaatggtgtaactctctggaagctacgtttatcgatgttcacattcccaagtttaaggtaacaggttcgtataatcttgtggatactctagtaaagtcaggactgacagaggtgttcggttcaactggagattatagcaatatgtgtaattcagatgtgagtgtcgacgctatgattcacaaaacgtatatagatgtcaatgaagagtatacagaagcagctgcagcaacttgtgcactggtgtcagactgtgcatcaacaattacaaatgagttctgtgtagatcatccgttcatctatgtgattaggcatgttgatggaaaaattcttttcgttggtagatattgctctccgacaactaattgttaaccattttttttaaaaaaatagaaaaaacatgtggtattagtgcaggtcgttgttcttccaattgcaattggtaagatgacggccaactttagtacccacgtcttttcaccacagcactgtggatgtgacagactgaccagtattgatgacgtcagacaatgtttgactgaatatatttattggtcgtcctatgcataccgcaacaggcaatgcgctggacagttgtattccacactcctctcttttagagatgatgcggaatcagtgttcatcgacattcgcgagctggtaaaaaatatgccgtgggatgatgtcaaagattgtacagaaatcatccgttgttatataccggatgagcaaaaaaccatcagagagatttcggccatcatcggactttgtgcatatgctgctacttactggggaggtgaagaccatcccactagtaacagtctgaacgcattgtttgtgatgcttgagatgctcaattacgtggattataacatcatattccggcgtatgaattgatgagttgtacatcttgacattttctttcttctcttctccctttcttctcttctcccttcctccctcttctccctttcccagaaacaaacttttttacccactataaaataaaatgagtatactacctattatatttcttcctatatttttttattcttcattcgttcagacttttaacgcgcctgaatgtatcgacaaagggcaatattttgcatcattcatggagttagaaaacgagccagtaatcttaccatgtcctcaaataaatacgctatcatccggatataatatattagatattttatgggaaaaacgaggagcggataatgatagaattataccgatagataatggtagcaatatgctaattctgaacccgacacaatcagactctggtatttatatatgcattaccacgaacgaaacctactgtgacatgatgtcgttaaatttgacaatcgtgtctgtctcagaatcaaatatagatcttatctcgtatccacaaatagtaaatgagagatctactggcgaaatggtatgtcccaatattaatgcatttattgctagtaacgtaaacgcagatattatatggagcggacatcgacgccttagaaataagagacttaaacaacggacacctggaattattaccatagaagatgttagaaaaaatgatgctggttattatacatgtgttttagaatatatatacagaggtaaaacatataacgtaaccagaattgtaaaattagaggtacgggataaaataataccttctactatgcaattaccagatggcattgtaacttcaataggtagtaatttgactattgcgtgtagagtatcgttgagacctcccacaacggatgcagacgtcttttggataagtaatggtatgtattacgaagaagatgatggggacggagacggtagaataagtgtagcaaataaaatctatatgaccgataagagacgtgttattacatcccggttaaacattaatcctgtcaaggaagaagatgctacaacgtttacgtgtatggcgtttactattcctagcatcagcaaaacagttactgttagtataacgtgaatgtatgttgttacatttccatgtcaattgagtttataagaatttttatacattatcttccaacaaacaattgacgaacgtattgctatgattaactcccacgatactatgcatattattaatcattaacttgcagactatacctagtgctattttgacatactcatgttcttgtgtaattgcggtatctatattattaaagtacgtaaatctagctatagttttattatttaattttagataatataccgtctccttatttttaaaaattgccacatcctttattaaatcatgaatgggaatttctatgtcatcgttagtatattgtgaacaacaagagcagatatctataggaaagggtggaatgcgatacattgatctatgtagttttaaaacacacgcgaactttgaagaatttatataaatcattccatcgatacatccttctatgttgacatgtatatatccaggaattcttttattaatgtcaggaaatgtataaactaaaacattgcccgaaagcggtgcctctatctgcgttatatccgttcttaacttacaaaatgtaaccaatacctttgcatgacttgttttgttcggcaacgttagtttaaacttgacgaatggattaattacaatagcatgatccgcgcatctattaagtttttttactttaacgcccttgtatgtttttacagagactttatctaaatttctagtacttgtatgtgttataaatataacgggatatagaactgaatcacctaccttagatacccaattacattttatcagatccagataataaacaaattttgtcgccctaactaattctatattgttatatattttacaattggttatgatatcatgtaataacttggagtctaacgcgcatcgtcgtacgtttatacaattgtgatttagtgtagtatatctacacatgtatttttccgcactatagtattctggactagtgataaaactatcgttatatctgtcttcaatgaactcatcgagatattgctctctgtcatattcatacacctgcataaactttctagacatcttacaatccgtgttattttaggatcatatttacatatttacgggtatatcaaagatgttagattagttaatgggaatcgtctataataatgaatattaaacaattatatgaggacttttaccacaaagcatcataaaaatgagtcgtcgtctgatttatgttttaaatatcaaccgcaaatcaactcataaaatacaagagaatgaaatatatacatattttagtcattgcaatatagaccatacttctacagaacttgattttgtagttaaaaactatgatctaaacagacgacaacatgtaactgggtatactgcactacactgctatttgtataataattactttacaaacgatgtactgaagatattattaaatcatgacgtaaatgtaacgatgaaaaccagtagcggacgtatgcctgtttatatattgcttactagatgttgcaatatttcacatgatgtagtgatagatatgatagacaaagataaaaaccacttattacatagagactattccaacctattactagagtatataaaatctcgttacatgttattaaaggaagaggatatcgatgagaacatagtatccactttattagataagggaatcgatcctaactttaaacaagacggatatacagcgttacattattattatttgtgtctcgcacacgtttataaaccaggtgagtgtagaaaaccgataacgataaaaaaggccaagcgaattatttctttgtttatacaacatggagctaatctaaacgcgttagataattgtggtaatacaccattccatttgtatcttagtattgaaatgtgtaataatattcatatgactaaaatgctgttgacttttaatccgaatttcaaaatatgtaataatcatggattaacgcctatactatgttatataacttccgactacatacaacacgatattcttgttatgttaatacatcactatgaaacaaatgttggagaaatgccgatagatgagcgtcgtatgatcgtattcgagtttatcaaaacatattctacacgtccggcagattcgataacttatttgatgaataggtttaaaaatataaatatttatacccgctatgaaggaaagacattattacacgtagcatgtgaatataataatacacacgtaatagattatcttatacgtatcaacggagatataaatgcgttaaccgacaataacaaacacgctacacaactcattatagataacaaagaaaattccccgtataccatcgattgtttactgtatatacttagatatattgtagataagaatgtgataagatcgttggtggatcaacttccatctctacctatcttcgatataaaatcatttgagaaattcatatcctactgtatacttttagatgacacattttacgataggcacgttaagaatcgcgattctaaaacgtatcgatacgcattttcaaaatacatgtcgtttgataaatacgatggtataataactaaatgtcacgacgaaacaatgttactcaaactgtccactgttctagacactacactatatgcagttttaagatgccataattcgaaaaagttaagaagatacctcaacgagttaaaaaaatataataacgataagtcctttaaaatatattctaatattatgaatgagagataccttaatgtatattataaagatatgtacgtgtcaaaggtatatgataaactatttcctgttttcacagataaaaattgtctactaacattactaccttcagaaattatatacgaaatattatacatgctgacaattaacgatctttataatatatcgtatccacctaccaaagtatagttgtatttttctcatgcgatgtgtgtaaaaaaactgatattatataaatattttagtgccgtataataaagatgacgatgaaaatgatggtacatatatatttcgtatcattattgttattgctattccacagttacgccatagacatcgaaaatgaaatcacagaattcttcaataaaatgagagatactctaccagctaaagactctaaatggttgaatccagcatgtatgttcggaggcacaatgaatgatatagccgctctaggagagccattcagcgcaaagtgtcctcctattgaagacagtcttttatcgcacagatataaagactatgtggttaaatgggagaggctagaaaagaatagacggcgacaggtttctaataaacgtgttaaacatggtgatttatggatagccaactatacatctaaattcagtaaccgtaggtatttgtgtaccgtaactacaaagaatggtgactgtgttcagggtatagttagatctcatattaaaaaacctccttcatgcattccaaaaacatatgaactaggtactcatgataagtatggcatagacttatactgtggaattctttacgcaaaacattataataatataacttggtataaagataataaggaaattaatatcgacgacattaagtattcacaaacgggaaagaaattaattattcataatccagagttagaagatagtggaagatacaactgttacgttcattacgacgacgttagaatcaagaatgatatcgtagtatcaagatgtaaaatacttacggttataccgtcgcaagaccacaggtttaaactaatactagatccaaaaatcaacgtaacgataggagaacctgccaatataacatgcactgctgtgtcaacgtcattattgattgacgatgtactgattgaatgggaaaatccatccggatggcttataggattcgattttgatgtatactctgttttaactagtagaggcggtattaccgaggcgaccttgtactttgaaaatgttactgaagaatatataggtaatacatataaatgtcgtggacacaactattattttgaaaaaacccttacaactacagtagtattggagtaaatacacaatgcatttttatatacattactgaataattattattattatttatatcgtatttgtgctataacgcgactatctaggtatttgtatctcactgatagagaacatataaatatagactctattaaacagttgtgtaaaatatcaaatcctaatagatgtggatgtacggctttacatgagtacttttataattatagatcagtcaacggaaaatacaagtatagatacaacggttactatcaatattatttatctagcgattatgaaaattataatgaatattattatgatgattatgatagaactggtatgaacagtgagagtgataatatatcaatcaaaacagaatatgaattctatgatgaaacacaagatcaaagtacacaactagtaggttacgacattaaactcaaaaccaatgaggatgattttatggctatgatagatcagtgggtgtccatgattatatagatgaatcaattaataaagtagtatatggaagagagtctcacgtaagatggcgggatatatggcaagaacataatgatggcgtatacagtataggaaaggagtgcatagataatatatacgaagacaaccataccgtagacgaattctacaagatagacagcgtatcagatgtagatgacgcggaacacatatctccgataactaatgatgtatctacacaaacatgggaaaagaaatcagagttagatagatacatggaaatgtatcctcgtcatagatatagtaagcattctgtctttaagggattttctgacaaagttagaaaaaatgatttagacatgaatgtggtaaaagaattactttctaacggtgcatctctaacaattaaggatagcagtaataaggatccaataaccgtttattttcgaagaacgataatgaatttagaaatgattgatattattaacaaacatacaactattgatgaacgaaagtatatagtacactcctatctaaaaaattataaaaatttcgattatccatttttcaggaagttagttttgactaataaacattgtctcaacaattattataatataagcgacagcaaatatggaacaccgctacatatattggcgtctaataaaaaattaataactcctaattacatgaagttattagtgtataacggaaatgatataaacgcacgaggtgaagatacacaaatgcgaactccattacacaaatatttgtgtaaatttgtatatcataatattgaatatggtatccgatactataatgaaaagattatagacgcatttatagagttaggagccgatctaactattccaaataacgatggaatgataccagtagtttactgtatacactcaaatgcagaatatggttataacaatattactaacataaagataatacgtaaactacttaatcttagtagacgtgcgtcacataatctatttagagatcgagtcatgcacgattatataagtaatacatatattgatcttgagtgtttagatattattagatcgttggatggattcgatatcaatggttactttgaaggacgtacaccacttcattgcgctatacaacataacttcactcagattgctaagtacttattagatcgaggagctgatatagtcgtacccaacacattgattatacatcagtacatacagtaaatagcatagatatggaggaggatacaaatatttcaaataaagttataaggtacaacactgtcaataatatatggaagacattacctaacttctggactggaactataaatccaggcgtggtctcgcataaagatgatatatatgttgtatgcgacatcaaagatgaaaaaaatgttaagacttgtatatttagatataacacgaatacgtataacggatgggaattggttacgacgacagaaagcagattatcagctctgcatactattcttcatgacaataccataatgatgttacattgttatgaatcgtatatgttacaagatacatttaatgtgtacactcgcgaatggaatcatatgtgtcatcaacattcgaatagttatatcatgtacaatatactacccatctactaaatataatagaataaaataaatgagtatgatcattttagataacgattgattttatcattaccgcttcattcttatattctttgcttacggaacctatatttagaaacatctactaacgattttttatgcttgcattattaatggtatgtaatatgattgattgtgtacgcaataccaatttgttaagtatgaatacggggtacaaacataaactgaaatttaacattatttatttatgatatatatcgttatcgttattgtttggtctataccatggatatctttaaagaactaatcttaaaacaccctgatgaaaatgttttgatttctccagtttctattttatctactttatctattctaaatcatggagcagctggttctacagctgaacaactatcaaaatatatagagaatatgaatgagaatacacccgatgataagaaggatgacaataatgacatggacgtagatattccgtattgtgcgacactagctaccgcaaataaaatatacggtagcgatagtatcgagttccacgcctccttcctacaaaaaataaaagacgattttcaaactgtaaactttaataatgctaaccaaacaaaggaactaatcaacgaatgggttaagacgatgacaaatggtaaaattaattccttattgactagtccgctatccattaatactcgtatgacagttgttagcgccgtccattttaaagcaatgtggaaatatccattttctaaacatcttacatatacagacaagttttatatttctaagaatatagttaccagtgttgatatgatggtgggtaccgagaataacttgcaatatgtacatattaatgaattattcggaggattctctattatcgatattccatacgagggaaactctagtatggtaattatactaccggacgacatagaaggtatatataacatagaaaaaaatataacagatgaaaaatttaaaaaatggtgtggtatgttatctactaaaagtatagacttgtatatgccaaagtttaaagtggaaatgacagaaccgtataatctggtaccgattttagaaaatttaggacttactaatatattcggatattatgcagattttagcaagatgtgtaatgaaactatcactgtagaaaaatttctacatacgacgtttatagatgttaatgaggagtatacagaagcatcggccgttacaggagtatttatgactaacttttcgatggtatatcgtacgaaggtctacataaaccatccattcatgtacatgattaaagacaacacaggacgtatactttttatagggaaatactgctatccgcaataaatataaacaaatagacttttatcacgtttatctatgtctaaatattacaaatagtaatagtataaactaaagctgataatacttaaaaaaataataatatcatttacaattaatagtataaactaaaaattaaacaaatcgttattataagtaatatcaaaatgatgatatacggattaatagcgtgtcttatattcgtgacttcatccatcgctagtccactttatattcccgttattccacccattacggaagataaatcgttcaatagtgtagaggtattagtttccttgtttagagatgaccaaaaagactatacggtaacttctcagttcaataactacactatcgataccaaagactggactatcggcgtactatccacacctgatggtttggatataccattgactaatataacttattggtcacggtttactataggtcgtgcattgttcaaatcagagtctgaggatattttccaaaagaaaatgagtattctaggtgtttctatagaatgtaagaagtcgtcgacattacttacttttttgaccgtgcgtaaaatgactcgagtatttaataaatttccagatatggcttattatcgaggagactgtttaaaagccgtttatgtaacaatgacttataaaaatactaaaactggagagactgattacacgtacctctctaatggggggttgcctgcatactatcgtaatggggtcgatggttgattattgattagtatattccttattcacacaaaaagaacatttttataaacatgaaaccactgtctaaatgtaattatgatcttgatttatagatgaagatcagcctttagaggattttaaccagtatgtttaatatgaaaaaaataaacataacatattttgagattaagcgctattgtgcttaattattttgctctataaactgaatatatagccacaattattgacgggcttgtttatgaccggcaatcatgaatttacagaaattatctctggctatatatcttactgcgacatgttcgtggtgttatgaaacatgcataagaaaaactgcgttgtatcatgacattcaattggagcatgtagaagacaataaagatagtgtagcgtcgctaccgtacaagtagtcaatcaaagagaacgtagtagattgttggctacatttaattggacagatatagctgagggtgttagaaatgagttcattaaaatatgtgatatcaacggaacatatttatataattatactattgctgttagtataattattgattccacggaagaactaccaacagttactccaattacaacaacatatgaaccttctacatataattatactatcgatgatagcactgttattactactgaagaactacaagtgactcctcatatggatctccatcgatgatacatgtattaaaatactttccgaataagtcttttaaatattgtattaattatgaaaaactatgctatgcgagtatgatgcaaagatgtttaatgatacgatactagattttatctctagcgagagatgtcgttagaatcatttatcataactacgtttaataataattcatcaacgaatatcgataacatgtgtcatttatacgttaaagtctgtccgtcttctctattgtttagactgtttgtagaatgctgtgatataaacaaactagtagaaggtacgactccgttacactgttatctaatgaatgaaggatttgaatcatctgttttaaaaaacctattaaaggagtatgtcatgaatacgtttaatgttcatgacatccattacacaaatatttaactcatgatgaagttgagaatgatatgctttctgatagtatagatagctttagctaatataaaaatatattaatccactatatattctagacttgatttaaaaccgataaactactactacgtactgtataagttgttaaaaaaaggagcagaccctaattatgtagatgatagaggtaatacttttcttcattacttctgcatctatatgtccacttatgagaaaacgtcatttaataagatgcatcgtgaaaagaaatttattaaagagttggtaaaatatgaaaccgaaagtaaataatataggaaatacacctctacataactacgtatctcaatatgatatcactctcattcctcatccacaacccattaaaaaaatggaaattaaagccctctattagcataaacggctacaggtctacctttacaatggcctctccttgtgcccagttcagaccctgtcattgccacgctactaaggactccctgaataccgtggccgacgtcagacattgtctgactgaatacatcctgtgggtttctcatagatggacccatagagaaagcgcagggtctctctacaggcttctcatctctttcagaactgatgcaacggagctctttggtggtgagttgaaggattcacttccgtgggacaatatcgacaattgcgtggagatcattaaatgtttcatcagaaatgactccatgaaaaccgccgaagaacttcgtgcaatcattggactttgtactcaatcagctatcgtctctggaagagtcttcaacgataagtatatcgacatactacttatgctgcgaaagattctgaacgagaacgactatctcaccctcttggatcatatccgcactgctaaatactaaatctccttcatgctctctcactacactttttatcatcttatgaggaatgattgccttcatcatttttcgtgaaataggaataattagcaccagaatagctatggattgcacatgtattctatgtcgtctactggatgaagatgtgacgtacaaaaaaataaaactagaaattgaaacgtgtcacaacttatcaaaacatatagatagacgaggaaacaatgcgctacattgttacgtcttcaataaatgcgatacagacattaagattgttcgactgttactctctcgcggagtcgagagactttgtagaaacaacgaaggattaactccgctaggagcatacagtaagcatagatacgtaaaatctcaaattgtgcatctactgatatccagctattcgaattcctctaacgaactcaagtcgaatataaatgatttcgatctgtattcgtatatgtcttcggataatatcgacttacgtctgctaaaatacctaattgtggataaacggatacgtccgtccaagaatacgaattatgcaatcaatggtctcggattggtggatatatacgtaacgacgcctaatccgagaccagaagtattgctatggcttcttaaatcagaatgttacagcaccggttacgtatttcgtacctgtatgtacgacagtgatatgtgtaagaactctcttcattactatatatcgtctcatagagaatctcaatctctatccaaggatgtaattaaatgtttgatcaataacaatgtttccatccatggcagagacgaaggaggatctttacccatccaatactactggtcttgctcaaccatagatatagagattgttaaattattaataaaggatgtggacacgtgtagagtatacgacgtcagccctatattagaggcggattatctaaacaagcgatttagagtaaccccatataatgtagacatggaaatcgttaatcttcttattgagagacgtcatactcttgtcgacgtaatgcgtagtattacttcttacgattccagagactataaccactacatcatcgataacattctaaagagatttagacaacaggatgaatccatcgtacaagccatgttgataaactacttacattacggcgatatggtcgttcgatgcatgttagataacggacaacaactatcctctgcacgactactttgttaataataatctcgtcgatgtaaacgtcgtaaggtttatcgtggaaaataatggacacatggctgtaaatcacgtatcgaacaatggccgtctatgtatgtacggtctgatattatcgagatttaataattgcgggtatcactgttatgaaaccatactaatagatgtatttgatatactaagcaagtacatggataatatagatatgatcgataatgagaataaaactctactatattacgcggtcgatgtcaataatatacaatttgcaaagcggttattggaatatggagcgagtgttacaacatcacgctcgataatcaatacggccatccagaaaagtagttacagaagagaaaacaaaacgaggatagttgatttattacttagctaccatcccactctagagactatgattgacgcatttaatagagatatacgctatctatatcctgaaccattattcgcctgtatcagatacgccttaatcctagatgatgattttccttctaaagtaagtatgatatctccggtcgtcataaggaactaaagcgctatagagtagacattaatagaatgaagaatgcctacatatcaggcgtctccatgtttgatatattatttaaacgaagcaaacgccacagattgagatacgcaaagaatccgacatcaaatggtacaaaaaagaactaacgtccatcattacagaaactgtaaagaacaatgagaggatcgactccatagtggacaacattaatacagacgataacttgatttcgaaattacccatggagatactttattactccattaaataatttatcatggagcgataatgtcctgtttcatttgtttccatgacatattacaaaatcgattccgtccaagatgataaaaacatttaccggcatcataaacacggagtttattttatatgtctcgcataaacattactaaaaaaatatattgttcggttttctttcacatctttaattatgaaaaagtaaatcattatgagatggacgagattgtacgcatcgttcgcgacagtatgtggtacatacctaacgtatttatggacgacggtaagaatgaaggtcacgtttctgtcaacaatgtttgtcatatgtattttacgttctttgatgtggatacatcgtctcatctgtttaagctagttattaaacactgcgatctgaataaacgaggtaactctccattacattgctatacgatgaatacacgatttaatccatctgtattaaagatattgttacaccacggcatgcgtaactttgatagcaaggatgaaaaaggacatattcctctacaccactatctgattcattcactatcaatcgataacaagatctttgatatactaacggacaccattgatgactttagtaaatcatccgatctattgctgtgttatcttagatataaattcaatgggagcttaaactattacgttctgtacaaaggatccgaccctaattgcgtcgacgaggatggactcacttctcttcattactactgtaaacacatatccacgttctacaaaagcaattattacaagttaagtcacactaagatgcgagccgagaagcgattcatctacgcgataatagattatggagcaaacattaacgcggttacacacttaccttcaacagtataccaaacatagtcctcgtgtggtgtatgctcttttatctcgaggagccgatacgaggatacgtaataatcttgattgtacacccatcatggaacgattgtgcaacaggtcatattctcataatgttactcaattggcacgaacaaaaggaagaaggacaacatctactttatctattcataaaacataatcaaggatacactctcaatatactacggtatctactagataggttcgacattcagaaagacgaatactataataccgcctttcaaaattgtaacaacaatgttgcctcatacatcggatacgacatcaaccttccgactaaagacggtattcgacttggtgtttgaaaacagaaacatcatatacaaggcggatgttgtgaatgacatcatccaccacagactgaaagtatctctacctatgattaaatcgttgttctacaagatgtcagaattctctccctacgacgattactacgtaaaaaagatactagcctactgcctattaagggacgagtcattcgcggaactacatagtaaattctgtttaaacgaggactataaaagtgtatttatgaaaaatatatcattcgataagatagattccatcatcgtgacataagtcgccttaaagagattcgaatctccgacaccgacctgtatacggtatcacagctatcttaaagccatacattcggacagacacatttcatttcccatgtacgacgatctcatagaacagtgccatctatcgatggagcataaaagtaaactcgtcgacaaagcactcaataaattagagtctaccatcggtcaatctagactatcgtatttgcctccggaaattatgcgcaatatcatctaaacagtatgttgtacggaaagaaccattacaaatattatccatgatagaaagaaaatatctatatgattggagaagtaggaaacaggaacaagacgacgattactacattattaaatcatgaagtccgtattatactcgtatatattgtttctctcatgtataataataaacggaagagatatagcaccgcatgcaccatccgatggaaagtgtaaagacaacgaatacaaacgccataatttgtgtccgggaacatacgcttccagattatgcgatagcaagactaacacacgatgtacaccctgtggttcgggtaccttcacatctcgcaataatcatttacccgcttgtctaagttgtaacggaagacgcgatcgtgtaacacgactcacaatagaatctgtgaatgctctcccggatattattgtcttctcaaaggatcatccggatgcaaggcatgtgtttcccaaacaaaatgtggaataggatacggagtatccggagacgtcatctgttctccgtgtggtctcggaacatattctcacaccgtctcttccgcagataaatgcgaacccgtacccagtaatacctttaactatatcgatgtggaaattaatctgtatcccgtcaacgacacgtcgtgtactcggacgaccactaccggtctcagtgaatccatctcaacgtcggaactaactattactatgaatcataaagactgtaatcccgtatttcgtgaggaatacttctctgtccttaataaggtagcaacttcaggtttctttacaggagaaaggtgtgcactctgaatttcgagattaaatgcaataacaaagattcttcctccaaacagttaacgaaagcaaagaatgatgacggtatcatgccgcattcggagacagtaactctagtgggcgactgtatatctagcgtcgacatctatatactatatagtaataccaatactcaagactacgaaactgatacaatctcttatcatgtgggtaatgttctcgatgtcgatagccatatgcccggtagttgcgatatacataaactgatcactaattccaaacccacccgctttttatagtaagtttttcacccataaataataaatacaataattaatttctcgtaaaagtagaaaatatattctaatttattgcatggtaaggaagtagaatcataaagaacagtactcaatcaatagcaattatgaaacaatatatcgtcctggcatgcatgtgcctgccagtcttcagcaatcatcctcatcctcatcctcgtgtacggaagaagaaaacaaacatcatatgggaatcgatgttattatcaaagtcacaaagcaagaccaaacaccgaccaatgataagatttgccaatccgtaacggaaattacagagtccgagtcagatccaaatcccgaggtggaatcagaagatgattccacatcagtcgaggatgtagatcctcctaccacttattactccatcatcggtggaggtctgagaatgaactttggattcaccaaatgtcctcagattaaatccatctcagaatccgctgatggaaacacagtgaatgctagattgtccagcgtgtccccaggacaaggtaaggactctcccgcgatcactcatgaagaagctcttgctatgatcaaagactgtgaggtgtctatcgacatcagatgtagcgaagaagagaaagacagcgacatcaagacccatccagtactcgggtctaacatctctcataagaaagtgagttacgaagatatcatcggttcaacgatcgtcgatacaaaatgtgtcaagaatctagagtttagcgttcgtatcggagacatgtgcaaggaatcatctgaacttgaggtcaaggatggattcaagtatgtcgacggatcggcatctgaaggtgcaaccgatgatacttcactcatcgattcaacaaaactcaaagcgtgtgtctgaatcgataactctattcatctgaaattggatgagtagggttaatcgaacgattcaggcacaccacgaattaaaaaagtgtaccggacactatattccggtttgcaaaacaaaaatgttcttaactacattcacaaaaagttacctctcgcgacttcttctttttctgtctcaatagtgtgatacgattatgacactattcctattcctattcctatttcctttcagggtatcacaaaaatattaaacctctttctgatggtctcataaaaaaagttttacaaaaatatttttattctctttctctctttgatggtctcataaaaaaagttttacaaaaatatttttattctctttctctctttgat

SEQ ID NO: 9 - DNA, 196382 bp, Vaccinia virus
  source 1..196382: mol_type = other DNA
  misc_feature 1..196382: note = VIR42
atcaaagagagaaagagaataaaaatatttttgtaaaactttttttatgagaccatcaaagagagaaagagaataaaaatatttttgtaaaactttttttatgagaccatcagaaagaggtttaatatttttgtgataccctgaaaggaaataggaataggaataggaatagtgtcataatcgtatcacactattgagacagaaaaagaagaagtcgcgagaggtaactttttgtgaatgtagttaagaacatttttgttttgcaaaccggaatatagtgtccggtacacttttttaattcgtggtgtgcctgaatcgttcgattaaccctactcatccaatttcagatgaatagagttatcgattcagacacacgctttgagttttgttgaatcgatgagtgaagtatcatcggttgcaccttcagatgccgatccgtcgacatacttgaatccatccttgacctcaagttcagatgattccttgcacatgtctccgatacgaacgctaaactctagattcttgacacattttgtatcgacgatcgttgaaccgatgatatcttcgtaactcactttcttatgagagatgttagacccgagtactggatgggtcttgatgtcgctgtctttctcttcttcgctacatctgatgtcgatagacacctcacagtctttgatcatagcaagagcttcttcatgagtgatcgcgggagagtccttaccttgtcctggggacacgctggacaatctagcattcactgtgtttccatcagcggattctgagatggatttaatctgaggacatttggtgaatccaaagttcattctcagacctccaccgatgatggagtaataagtggtaggaggatctacatcctcgactgatgtggaatcatcttctgattccacctcgggatttggatctgactcggactctgtaatttccgttacggattggcaaatcttatcattggtcggtgtttggtcttgctttgtgactttgataataacatcgattcccatatgatgtttgttttcttcttccgtacacgaggatgaggatgaggatgattgctgaagactggcaggcacatgcatgccaggacgatatattgtttcataattgctattgattgagtactgttctttatgattctacttccttaccatgcaataaattagaatatattttctacttttacgagaaattaattattgtatttattatttatgggtgaaaaacttactataaaaagcgggtgggtttggaattagtgatcagtttatgtatatcgcaactaccgggcatatggctatcgacatcgagaacattacccacatgataagagattgtatcagtttcgtagtcttgagtattggtattactatatagtatatagatgtcgacgctagatatacagtcgcccactagagttactgtctccgaatgcggcatgataccgtcatcattctttgctttcgttaactgtttggaggaagaatctttgttattgcatttaatctcgaaattcagagtgcacacctttctcctgtaaagaaacctgaagttgctaccttattaaggacagagaagtattcctcacgaaatacgggattacagtctttatgattcatagtaatagttagttccgacgttgagatggattcactgagaccggtagtggtcgtccgagtacacgacgtgtcgttgacgggatacagattaatttccacatcgatatagttaaaggtattactgggtacgggttcgcatttatctgcggaagagacggtgtgagaatatgttccgagaccacacggagaacagatgacgtctccggatactccgtatcctattccacattttgtttgggaaacacatgccttgcatccggatgatcctttgagaagacaataatatccgggagagcattcacagattctattgtgagtcgtgttacacgatcgcgtcttccgttacaacttagacaagcgggtaaatgattattgcgagatgtgaaggtacccgaaccacagggtgtacatcgtgtgttagtcttgctatcgcataatctggaagcgtatgttcccggacacaaattatggcgtttgtattcgttgtctttacactttccatcggatggtgcatgcggtgctatatctcttccgtttattattatacatgagagaaacaatatatacgagtataatacggacttcatgatttaataatgtagtaatcgtcgtcttgttcctgtttcctacttctccaatcatatagatattttctttctatcatggataatatttgtaatggttctttccgtacaacatactgtttagatgatattgcgcataatttccggaggcaaatacgatagtctagattgaccgatggtagactctaatttattgagtgctttgtcgacgagtttacttttatgctccatcgatagatggcactgttctatgagatcgtcgtacatgggaaatgaaatgtgtctgtccgaatgtatggctttaagatagctgtgataccgtatacaggtcggtgtcggagattcgaatctctttaaggcgacttatgtcacgatgatggaatctatcttatcgaatgatatatttttcataaatacacttttatagtcctcgtttaaacagaatttactatgtagttccgcgaatgactcgtcccttaataggcagtaggctagtatcttttttacgtagtaatcgtcgtagggagagaattctgacatcttgtagaacaacgatttaatcataggtagagatactttcagtctgtggtggatgatgtcattcacaacatccgccttgtatatgatgtttctgttttcaaacaccaagtcgaataccgtctttagtcggaaggttgatgtcgtatccgatgtatgaggcaacattgttgttacaattttgaaaggcggtattatagtattcgtctttctgaatgtcgaacctatctagtagataccgtagtatattgagagtgtatccttgattatgttttatgaatagataaagtagatgttgtccttcttccttttgttcgtgccaattgagtaacattatgagaatatgacctgttgcacaatcgttccatgatgggtgtacaatcaagattattacgtatcctcgtatcggctcctcgagataaaagagcatacaccacacgaggactatgtttggtatactgttgaaggtaagtgtgtaaccgcgttaatgtttgctccataatctattatcgcgtagatgaatcgcttctcggctcgcatcttagtgtgacttaacttgtaataattgcttttgtagaacgtggatatgtgtttacagtagtaatgaagagaagtgagtccatcctcgtcgacgcaattagggtcggatcctttgtacagaacgtaatagtttaagctcccattgaatttatatctaagataacacagcaatagatcggatgatttactaaagtcatcaatggtgtccgttagtatatcaaagatcttgttatcgattgatagtgaatgaatcagatagtggtgtagaggaatatgtcctttttcatccttgctatcaaagttacgcatgccgtggtgtaacaatatctttaatacagatggattaaatcgtgtattcatcgtatagcaatgtaatggagagttacctcgtttattcagatcgcagtgtttaataactagcttaaacagatgagacgatgtatccacatcaaagaacgtaaaatacatatgacaaacattgttgacagaaacgtgaccttcattcttaccgtcgtccataaatacgttaggtatgtaccacatactgtcgcgaacgatgcgtacaatctcgtccatctcataatgatttactttttcataattaaagatgtgaaagaaaaccgaacaatatatttttttagtaatgtttatgcgagacatataaaataaactccgtgtttatgatgccggtaaatgtttttatcatcttggacggaatcgattttgtaatatgtcatggaaacaaatgaaacaggacattatcgctccatgataaattatttaatggagtaataaagtatctccatgggtaatttcgaaatcaagttatcgtctgtattaatgttgtccactatggagtcgatcctctcattgttctttacagtttctgtaatgatggacgttagttcttttttgtaccatttgatgtcggattctttgcgtatctcaatctgtggcgtttgcttcgtttaaataatatatcaaacatggagacgcctgatatgtaggcattcttcattctattaatgtctactctatagcgctttagttccttatgacgaccggagatatcatacttactttagaaggaaaatcatcatctaggattaaggcgtatctgatacaggcgaataatggttcaggatatagatagcgtatatctctattaaatgcgtcaatcatagtctctagagtgggatggtagctaagtaataaatcaactatcctcgttttgttttctcttctgtaactacttttctggatggccgtattgattatcgagcgtgatgttgtaacactcgctccatattccaataaccgctttgcaaattgtatattattgacatcgaccgcgtaatatagtagagttttattctcattatcgatcatatctatattatccatgtacttgcttagtatatcaaatacatctattagtatggtttcataacagtgatacccgcaattattaaatctcgataatatcagaccgtacatacatagacggccattgttcgatacgtgatttacagccatgtgtccattattttccacgataaaccttacgacgtttacatcgacgagattattattaacaaagtagtcgtgcagaggatagttgttgtccgttatctaacatgcatcgaacgaccatatcgccgtaatgtaagtagtttatcaacatggcttgtacgatggattcatcctgttgtctaaatctctttagaatgttatcgatgatgtagtggttatagtctctggaatcgtaagaagtaatactacgcattacgtcgacaagagtatgacgtctctcaataagaagattaacgatttccatgtctacattatatggggttactctaaatcgcttgtttagataatccgcctctaatatagggctgacgtcgtatactctacacgtgtccacatcctttattaataatttaacaatctctatatctatggttgagcaagaccagtagtattggatgggtaaagatcctccttcgtctctgccatggatggaaacattgttattgatcaaacatttaattacatccttggatagagattgagattctctatgagacgatatatagtaatgaagagagttcttacacatatcactgtcgtacatacaggtacgaaatacgtaaccggtgctgtaacattctgatttaagaagccatagcaatacttctggtctcggattaggcgtcgttacgtatatatccaccaatccgagaccattgattgcataattcgtattcttggacggacgtatccgtttatccacaattaggtattttagcagacgtaagtcgatattatccgaagacatatacgaatacagatcgaaatcatttatattcgacttgagttcgttagaggaattcgaatagctggatatcagtagatgcacaatttgagattttacgtatctatgcttactgtatgctcctagcggagttaatccttcgttgtttctacaaagtctctcgactccgcgagagagtaacagtcgaacaatcttaatgtctgtatcgcatttattgaagacgtaacaatgtagcgcattgtttcctcgtctatctatatgttttgataagttgtgacacgtttcaatttctagttttatttttttgtacgtcacatcttcatccagtagacgacatagaatacatgtgcaatccatagctattctggtgctaattattcctatttcacgaaaaatgatgaaggcaatcattcctcataagatgataaaaagtgtagtgagagagcatgaaggagatttagtatttagcagtgcggatatgatccaagagggtgagatagtcgttctcgttcagaatctttcgcagcataagtagtatgtcgatatacttatcgttgaagactcttccagagacgatagctgattgagtacaaagtccaatgattgcacgaagttcttcggcggttttcatggagtcatttctgatgaaacatttaatgatctccacgcaattgtcgatattgtcccacggaagtgaatccttcaactcaccaccaaagagctccgttgcatcagttctgaaagagatgagaagcctgtagagagaccctgcgctttctctatgggtccatctatgagaaacccacaggatgtattcagtcagacaatgtctgacgtcggccacggtattcagggagtccttagtagcgtggcaatgacagggtctgaactgggcacaaggagaggccattgtaaaggtagacctgtagccgtttatgctaatagagggctttaatttccatttttttaatgggttgtggatgaggaatgagagtgatatcatattgagatacgtagttatgtagaggtgtatttcctatattatttactttcggtttcatattttaccaactctttaataaatttcttttcacgatgcatcttattaaatgacgttttctcataagtggacatatagatgcagaagtaatgaagaaaagtattacctctatcatctacataattagggtctgctcctttttttaacaacttatacagtacgtagtagtagtttatcggttttaaatcaagtctagaatatatagtggattaatatatttttatattagctaaagctatctatactatcagaaagcatatcattctcaacttcatcatgagttaaatatttgtgtaatggatgtcatgaacattaaacgtattcatgacatactcctttaataggttttttaaaacagatgattcaaatccttcattcattagataacagtgtaacggagtcgtaccttctactagtttgtttatatcacagcattctacaaacagtctaaacaatagagaagacggacagactttaacgtataaatgacacatgttatcgatattcgttgatgaattattattaaacgtagttatgataaatgattctaacgacatctctcgctagagataaaatctagtatcgtatcattaaacatctttgcatcatactcgcatagcatagtttttcataattaatacaatatttaaaagacttattcggaaagtattttaatacatgtatcatcgatggagatccatatgaggagtcacttgtagttcttcagtagtaataacagtgctatcatcgatagtataattatatgtagaaggttcatatgttgttgtaattggagtaactgttggtagttcttccgtggaatcaataattatactaacagcaatagtataattatataaatatgttccgttgatatcacatattttaatgaactcatttctaacaccctcagctatatctgtccaattaaatgtagccaacaatctactacgttctctttgattgactacttgtacggtagcgacgctacactatctttattgtcttctacatgctccaattgaatgtcatgatacaacgcagtttttcttatgcatgtttcataacaccacgaacatgtcgcagtaagatatatagccagagataatttctgtaaattcatgattgccggtcataaacaagcccgtcaataattgtggctatatattcagtttatagagcaaaataattaagcacaatagcgcttaatctcaaaatatgttatgtttatttttttcatattaaacatactggttaaaatcctctaaaggctgatcttcatctataaatcaagatcataattacatttagacagtggtttcatgtttataaaaatgttctttttgtgtgaataaggaatatactaatcaataatcaaccatcgaccccattacgatagtatgcaggcaaccccccattagagaggtacgtgtaatcagtctctccagttttagtatttttataagtcattgttacataaacggcttttaaacagtctcctcgataataagccatatctggaaatttattaaatactcgagtcattttacgcacggtcaaaaaagtaagtaatgtcgacgacttcttacattctatagaaacacctagaatactcattttcttttggaaaatatcctcagactctgatttgaacaatgcacgacctatagtaaaccgtgaccaataagttatattagtcaatggtatatccaaaccatcaggtgtggatagtacgccgatagtccagtctttggtatcgatagtgtagttattgaactgagaagttaccgtatagtctttttggtcatctctaaacaaggaaactaatacctctacactattgaacgatttatcttccgtaatgggtggaataacgggaatataaagtggactagcgatggatgaagtcacgaatataagacacgctattaatccgtatatcatcattttgatattacttataataacgatttgtttaatttttagtttatactattaattgtaaatgatattattatttttttaagtattatcagctttagtttatactattactatttgtaatatttagacatagataaacgtgataaaagtctatttgtttatatttattgcggatagcagtatttccctataaaaagtatacgtcctgtgttgtctttaatcatgtacatgaatggatggtttatgtagaccttcgtacgatataccatcgaaaagttagtcataaatactcctgtaacggccgatgcttctgtatactcctcattaacatctataaacgtcgtatgtagaaatttttctacagtgatagtttcattacacatcttgctaaaatctgcataatatccgaatatattagtaagtcctaaattttctaaaatcggtaccagattatacggttctgtcatttccactttaaactttggcatatacaagtctatacttttagtagataacataccacaccattttttaaatttttcatctgttatatttttttctatgttatatataccttctatgtcgtccggtagtataattaccatactagagtttccctcgtatggaatatcgataatagagaatcctccgaataattcattaatatgtacatattgcaagttattctcggtacccaccatcatatcaacactggtaactatattcttagaaatataaaacttgtctgtatatgtaagatgtttagaaaatggatatttccacattgctttaaaatggacggcgctaacaactgtcatacgagtattaatggatagcggactagtcaataaggaattaattttaccatttgtcatcgtcttaacccattcgttgattagttcctttgtttggttagcattattaaagtttacagtttgaaaatcgtcttttattttttgtaggaaggaggcgtggaactcgatactatcgctaccgtatattttatttgcggtagctagtgtcgcacaatacggaatatctacgtccatgtcattattgtcatccttcttatcatcgggtgtattctcattcatattctctatatattttgatagttgttcagctgtagaaccagctgctccatgatttagaatagataaagtagataaaatagaaactggagaaatcaaaacattttcatcagggtgttttaagattagttctttaaagatatccatggtatagaccaaacaataacgataacgatatatatcataaataaataatgttaaatttcagtttatgtttgtaccccgtattcatacttaacaaattggtattgcgtacacaatcaatcatattacataccattaataatgcaagcataaaaaatcgttagtagatgtttctaaatataggttccgtaagcaaagaatataagaatgaagcggtaatgataaaatcaatcgttatctaaaatgatcatactcatttattttattctattatattaacacatacatttttaacagcaacacattcaatattgtattgttatttttatattatttacacaattaacaatatattattagtttatattactgaattaataatataaaattcccaatcttgtcataaacacacactgagaaacagcataaacacaaaatccatcaaaaatgtcgatgaaatatctgatgttgttgttcgctgctatgataatcagatcattcgccgatagtggtaacgctatcgaaacgacattgccagaaattacaaacgctacaacagatattccagctatcagattatgcggtccagagggagatggatattgtttacacggtgactgtatccacgctagagatatcgacggtatgtattgtagatgctctcatggttatacaggcattagatgtcagcatgtagtattagtagactatcaacgttcagaaaaaccaaacactacaacgtcatatatcccatctcccggtattgtgcttgtattagtaggcattattattatgtgttgtctattatctgtttataggttcactcgaagaactaataaactacctctacaagatatggttgtgccataatttttataaatttttttatgagtatttttacaaaaaaaatgtataaagtgtatgtcttatgtatatttataaaaatgctaagtatgcgatgtatctatgttatttgtatttatctaaacaatacctctacctctagatattatacaaaaattttttatttcggcatattaaagtaaaatctagttaccttgaaaatgaatacagtgggtggttccgtatcaccagtaagaacataatagtcgaatacagtatccgattgagattttgcatacaatactagtctagaaagaaatttgtaatcattttctgtgacgggagtccatatatctgtatcatcgtctagtttatcagtgtcccatgctatatttctgttatcatcattagttaatgaaaataactctcgtgcttcagaaaagtcaaatattgtatccatacatacatctccaaaactatcgcttatacgtttatctttaacgatacctatacctagatggttatttactaacagacattttccagatctattgactataactcctatagtttccacatcaaccaagtaatgatcatctattgttatataacaataacataactcttttccatttttatcagtatgtatatctatatcaacgtcgtcgttgtagtgaatagtagtcattgatctattatatgaaacggatatgtctagaacggcaattgtcttacgtccagttaacactttcgttgatttaaagtctagagtctttgcaaacataatatccttatccgactttatatttcctgtagggtggtataattttattttgcctccacatatcggtgtttccaaatatattactagacaatattccatatagttattagttaagggtacccaattagaacacgtacgcttattatcatcatttggatcgtatttcataaaagttattgtactatcgatgtcaacacattctacattttttaatcgtctatatagtatttttctgatattttctataatatcagaattgtcttccatcggaagttgtatactatcggaatcagttacatgtttaaataattctctgatgtcattccttatacaatcaaattcattattaaacagtttaatagtctgtagacctttatcgtcgtaaatatccattgtcttattagttacgcttatttttatgtgttttacgttgctttattatattttataagaatgattgtttgacgaatcacgagaactattaagacacattattaggtatatattataaaaaagtttttgattacgatgttataagaggaaagaggacacattaacatcatacatcaattaactacattcttataacatcgtaatcaaaagaattgcaattttgatgtataacaactgtcaatgggttatggaattgtatattacatattatacggtatgttggtaacgacaaataccgatcggtaatcgtttgccggtgtaatagaattatatatatctatctattacaccggctgagtatacataataataagttgtggtagtatgatctccatatttataatttaggactttgtattcagtatttttggaatcataaaaaataaaaaaaagttttactaatttaaaatttaaaaagtatttacatttttttcactgtttagtcgcggatatggaattcgatcctgccaaaatcaatacatcatctatagatcatgtaacaatattacaatacatagatgaaccaaatgatataagactaacagtatgcattatccgaaatattaataacattacatattatatcaatatcacaaaaataaatacacatttggctaatcaatttcgggcttggaaaaaacgtatcgccggaagggactatatgactaacttatctagagatacaggaatacaacaatcaaaacttactgaaactatacgtaactgtcaaaaaaatagaaacatatatggtctatatatacactacaatttagttattaatgtggttattgattggataaccgatgtgattgttcaatcaatattaagagggttggtaaattggtacatagctaataatacctatactccaaatacacccaataatacaacaaccatttctgagttggatatcatcaaaatactaaataaatacgaggacgtgtatagagtaagtaaagaaaaagaatgtggaatttgctatgaagttgtttactcaaaacgattagaaaacgatagatactttggtttattggattcgtgtactcatatattttgcataacatgcatcaatatatggcataaaacacgaagagaaaccggtgcgtcggataattgtcctatatgtcgtacccgttttagaaacataacaatgagcaagttctataagctagttaactaataaataaaaagtttaatttgttgacgacgtatgtcgttattttttctcgtataaaagattaatttgattctaatataatctttagtattggataaatatcaattcaaattaattccattagattatatcataaataaaaatagtagcacgcactacttcagccaaatattcttttttgaaacgccatctatcgtagtgaggacacaagtgaacctataatgagcaaatttattagtatcggttacatgaaggactttacgtagagtggtgattccactatctgtggtacgaacggtttcatcttctttgatgccatcacccagatgttctataaacttggtatcctcgtccgatttcatatcctttgccaaccaatacatatagctaaactcaggcatatgttccacacatcctgaacaatgaaattctccagaagatgttacaatgtctagatttggacatttggtttcaaccgcgttaacatatgagtgaacacacccatacatgaaagcgatgagaaataggattttcatcttgccaaaatatcactagaaaaaatttatttatcaattttaaaggtataaaaaatacttattgttgctcgaatattttgtatttgatggtatacggaagattagaaatgtaggtattatcatcaactgattctatggttttatgtattctatcatgtttcactattgcgttggaaataatatcatatgcttccacatatattttattttgttttaactcataatactcacgtaattctggattattggcatatctgtgaataattttagctccatgatcagtaaatattaatgagaacatagtattaccacctaccattatttttttcatttcgttcaattcttgattgcaaagatctatataatcattatagcgttgacttatggactctggaatcttagacgatgtacagtcatctataatcatggcatatttaatacattgttttatagcatagtagttatctacgatgttagatatttctctcaatgaatcaatcacacaatctaatgtaggtttatgacataatagcattttcagcagttcaatgtttctagattcgttgatggcaatggctatacatgtatatccgttatttgatctaatgttgacatctgaaccggattctagcagtaaagatactagagattgtttattatatctaacagccttgtgaagaagtgtttctcctcgtttgtcaatcatgttaatgtctttaagataaggtaggcaaatgtttatagtactaagaattgggcaagcataagacatgtcacaaagaccctttttgtatgtataagtgtagaaattataacatccatagttggatttacataggtgtccaatcgggatctctccatcatcgagatgattgacggcatctcccccttccttttttagtagatatttcatcgtgtaagaatcaatattaatatttctaaagtatccgtgtatagcctctttatttaccacagctccatattccaacatgcattccactaaagggatatcgatatcgccgaatgtcatatactcaattagtatatgttggaggacatccgagttcattgttttcaatatcaaagagatggtttccttatcatttctccatagtggtacaatactacacattattccgtgaggctttccattctccaaaaacaatttgaccaaatctacatctttattgtatctataatcactatttagataatcagccataattcctcgagtgcaacatgttagatcgtctatatatgaataagccgtgttatctattcctttcattaacaatttaacgatgtctatatctatatgagatgacttaatataatattgaagagctgtacaatagtttttatctatagaagacggcttgattccgtgattaattagacatttaacaacttccggacgcacatatgctctcgtatccgactctgaatacagatgagagatgatatacagatgcaatacggtaccgcaatttcgtagttgataatcatcatacgcgtatccgtactcgtcctcataaagaacactgcagccattttctatgaacaaatcaataattttaggaacaggatcattgtcattacataattttctataactgaacgatggttttcacatttaacactcaagtcaaatccatgttctaccaacacctttatcaagtcaacgtctacatttttggatttcatatagctgaatatattaaagtcatttatgttgctaaatccagtggcttctagtagagccatcgctatatcctttaactttaacatgtctactatttgtgtattcttctaatggggtagctgtctccaatttttgcgtaatggattagtgccactgtctagtagtagtttgacgacctcgacattattacaatgctcattaaaaaggtatgcgtgtaaagcattattcttgaattggttcctggtatcattaggatctctgtctctcaacatctgtttaagttcatcgagagccacctcctcattttccaaatagtcaaacattttgactgaatagaagtgaatgagctactgtgaactctatacacccacacaactaatgtcattaaatattatttttttgaatgtatttataccatgtcaaaaacttgtacaattattaataaaaataatttagtgtttaaattttaccagttccagattttacacctccgttaaccccactttttacaccactggacgaccctcctccccacattccaccgccaccagatgtataagttttagatcctttattactaccatcatgtccatggataaagacactccacatgccgccactaccccctttagaagacatattaataagacttaagagttaaggacaagtttaacaataaaattaatcacgagtaccctactaccaacctacactattatatgattatagtttctatttttacagtaccttaactaaagtttctagtcacaagagcaatactaccaacctacactattatatgattatagtttctatttttataggaacgcgtacgagaaaatcaaatgtctaatttctaacggtagtgttgataaacgattatcgtcaatggatacctcctctatcatgtcgtctattttcttactttgttctattaacttattagcattatatattatttgattataaaacttatattgcttattagcccaatctgtaaatatcggattattaacatatcgtttctttgtaggtttatttaacttgtacatcactgtaagcatgtccgtaccatttattttaatttgacgcatatccgcaatttctttttcgcagtcggttataaattctatatatgatggatacatgctacatgtgtacttataatcgactaatatgaagtacttgatacatattttcagtaacgatttattattaccacctatgaataagtacctgtgatcgtctaggtaatcaactgttttcttaatacattcgatggttggtaatttactcagaataatttccaatatcttaatatataattctgctatttctggaatatatttatctgccagtataacacaaatagtaatacatgtaaacccatattttgttattatattaatgtctgcgccattatctattaaccattctactaggctgacactatgcgacttaatacaatgataaagtatactacatccatgtttatctattttgtttatatcatcaatatacggcttacaaagttttagtatcgataacacatccaactcacgcatagagaaggtagggaataatggcataatatttattaggttatcatcattgtcattatctacaactaagtttccattttttaaaatatactcgacaactttaggatctctattgccaaatttttgaaaatatttatttatatgcttaaatctatataatgtagctccttcatcaatcatacatttaataacattgatgtatactgtatgataagatacatattctaacaatagatcttgtatagaatctgtatatcttttaagaattgtggatattaggatattattacgtaaactattacacaattctaaaatataaaacgtatcacggtcgaataatagttgatcaactatataattatcgattttgtgatttttcttcctaaactgtttacgtaaatagttagatagaatattcattagttcatgaccactatagttactatcgaataacgcgtcaaatatttcccgtttaatatcgcatttgtcaagataataatagagtgtggtatgttcacgataagtataataacgcatctctttttcgtgtgaaattaaatagtttatcacgtccaaagatgtagcataaccatcttgtgacctagtaataatataataatagagaactgttttacccattctatcatcataatcagtggtgtagtcgtaatcgtaatcgtctaattcatcatcccaattataatattcaccagcacgtctaatctgttctattttgatcttgtatccatactgtatgttgctacatgtaggtattcctttatccaataatagtttaaacacatctacattgggatttgatgttgtagcgtatttctctacaatattaataccatttttgatactatttatttctatacctttcgaaattagtaatttcaataagtctatatcgatgttatcagaacatagatattcgaatatatcaaaatcattgatatttttatagtcgactgacgacaataacaaaatcacaacatcgtttttgatattattatttttcttggtaacgtatgcctttaatggagtttcaccatcatactcatataatggatttgcaccactttctatcaatgattgtgcactgctggcatcgatgttaaatgttttacaactatcatagagtatcttatcgttaaccatgattggttgttgatgctatcgcattttttggtttctttcatttcagttatgtatggatttagcacgtttgggaagcataagctcatatgatttcagtactgtagtgtcagtactattagtttcgatcagatcaatgtctagatctatagaatcaaaacacgataggtcagaagataatgaatatctgtaggcttcttgttgtactgtaacttctcgttttgttagatggttgcatcgtgctttaacatcaatggtacaaattttatcctcgctttgtgtatcatattcgtccctactataaaattgtatattcagattatcatgagatgtgtatacgctaacggtatcaataaacggagcacaccatttagtcataaccgtaatccaaaaatttttaaagtatatcttaacgaaagaagttgtgtcattgtctacggtgtatggtactagatcctcataagtgtatatatctagagtaatgtttaatttatcaaatggttgataatatggatcctcatggcaatttcctaagacgaaaataagacataaacacgcaataaatctaattgcggacatggttactccttaaaaaaatactaataatcaccttggctatttagtaagtgtcatttaacactatactcatattaatccatggactcataatctctatacgggattaacggatgttctatatacggggatgagtagttctcttctttaactttatactttttactaatcatatttagactgatgtatgggtaatagtgtttgaagagctcgttctcatcatcagaataaatcaatatctctgtttttttgttatacagatgtattacagcctcatatattacgtaatagaacgtgtcatctaccttattaactttcaccgcatagttgtttgcaaatacggttaatcctttgacctcgtcgatttccgaccaatctgggcgtataatgaatctaaactttaatttcttgtaatcattcgaaataatttttagtttgcatccgtagttatcccctttatgtaactgtaaatttctcaacgcgatatctccattaataatgatgtcgaattcgtgctgtatacccatactgaatggatgaacgaataccgacggcgttaatagtaatttactttttcatctttacatattgggtactagttttactatcataagtttataaattccacaagctactatggaataagccaaccatcttagtataacacacatgtcttaaagtttattaattaattacatgttgttttatatatcgctacgaatttaaacagagaaatcagtttaggaaaaaaaattatctatctacatcatcacgtctctgtattctacgatagagtgctactttaagatgagacatatccgtgtcatcaaaaatatactccattaaaatgattattccggcagcgaacttgatattggatatatcacaacctttgttaatatctacgacaatagacagcagtcccatggttccataaacagtgagtttatctttctttgaagagatattttgtagagatcttataaaactgtcgaatgacatcgcatttatatctttagctaaatcgtatatgttaccatcgtaatatctaaccgcgtctatcttaaacgtttccatcgctttaaagacgtttccgatagatggtctcatttcatcagtcatactgagccaacaaatataatcgtgtataacatctttgatagaatcagactctaaagaaaacgaatcggctttattatacgcattcatgataaacttaatgaaaaatgtttttcgttgtttaagttggatgaatagtatgtcttaataattgttattatttcattaattaatatttagtaacgagtacactctataaaaacgagaatgacataactaatcataactagttatcaaagtgtctaggacgcgtaattttcatatggtatagatcctgtaagcattgtctgtattctggagctattttctctatcgcattagtgagttcagaatatgttataaatttaaatcgaataacgaacataactttagtaaagtcgtctatattaactcttttattttctagccatcgtaataccatgtttaagatagtatattctctagttactacgatctcatcgttgtctagaatatcacatactgaatctacatccaattttagaaattggtctgtgttacatatctcttctatattattgttgatgtattgtcgtagaaaactattacgtagaccattttctttataaaacgaatatatagtactccaattatctttaccgatatatttgcacacataatccattctctcaatcactacatctttaagattttcgttgttaagatatttggctaaactatataattctattagatcatcaacagaatcagtatatatttttctagatccaaagacgaactctttggcgtcctctataatattcccagaaaagatattttcgtgttttagtttatcgagatctgatctgttcatatacgccatgattgtacggtacgttatgataaccgcataaaataaaaatccattttcatttttaaccaatactattcataattgagattgatgtaatactttgttactttgaacgtaaagacagtacacggatccgtatctccaacaagcacgtagtaatcaaatttggtgttgttaaacttcgcaatatttatcaatttagatagaaacttatactcatcatctgttttaggaatccatgtattattaccactttccaacttatcattatcccaggctatgtttcgtccatcatcgttgcgcagagtgaataattcttttgtattcggtagttcaaatatataatccatgcatagatcggtaaagctattgtagatgtgatttttcctaaatctaatataaaactcgtttactagcaaacactttcctgatttatcgaccaagacacatatggtttctaaatctatcaagtggtggggatccatagttatgacgcagtaacatagattattaccttcttaactgtcgctaatatctatatatttattgttatcgtattggattctgcatatagatggcttgtatgtcaaagatatagaacacataaccaatttatagtcgcgctttacattctcgaatctaaagttaagagatttagaaaacattatatcctcggatgatgttatcactgtttctggagtaggatatattaaagtctttacagatttcgtccgattcaaataaatcactaaataatatcccacattatcatctgttagagtagtatcattaaatctattatattttatgaaagatatatcactgctcacctctatatttcgtacatttttaaactgtttgtataatatctctctgatacaatcagatatatctattgtgtcggtagacgataccgttacatttgaattaatggtgttccattttacaacttttaacaagttgaccaattcatttctaatagtatcaaacgctccatgattaaatattttaatagtatccattttatatcactacggacacaaagtagctgacataaaccattgtataatttttatgttttatgtttattagcgtacacattttggaagttccggcttccatgtatttcctggagagcaagtagatgatgaggaaccagataggttatatccgtacttgcacttaaagtttacattgtcgttgtatgagtatgatcttttaaacccgctagacaagtatccgtttgatattgtaggatgtggacatttaacaatctgacacgtgggtggatcggaccattctcctcctgaacacaggacaccagagttaccaatcaacgaatatccactattgcaactataagttacaacgcttccatcggtataaaaatcctcgtatccgttatgtcttccgttggatatagatggaggggattggcatttaacagattcacaaataggtgcctcgggattccataccatagatccagtagatcctaattcacaatacgatttagattcaccgatcaaatgatatccgctattacaagagtacgttatactagagccaaagtctactccgccaatatcaagttggccattatcgatatctcgaggcgatgggcatctccgtttaatacattgattaaagagtgtccatccagtacctgtacatttagcatatataggtcccattttttgctttctgtatccaggtagacatagatattctatagtgtctcctatgttgtaattagcattagcatcagtctccacactattcttaaatttcatattaatgggtcgtgacggaatagtacagcatgatagaacgcatcctattcccaacaatgtcaggaacgtcacgctctccaccttcatatttatttatccgtaaaaatgttatcctggacatcgtacaaataataaaaagcccatatatgttcgctattgtagaaattgtttttcacagttgctcaaaaacgatggcagtgacttatgagttacgttacactttggagtctcatctttagtaaacatatcataatattcgatattacgagttgacatatcgaacaaattccaagtatttgattttggataatattcgtattttgcatctgctataattaagatataatcaccgcaagaacacacgaacatctttcctacatggttaaagtacatgtacaattctatccatttgtcttccttaactatatatttgtatagataattacgagtctcgtgagtaattccagtaattacatagatgtcgccgtcgtactctacagcataaactatactatgatgtctaggcatgggagacttttttatccaacgatttttagtgaaacattccacatcgtttaatactacatatttttcatacgtggtataaactccacccattacatatatatcatcgtttacgaataccgacgcgcctgaatatctaggagtaattaagtttggaagtcttatccatttcgaagtgccgtgtttcaaatattctgccacacccgttgaaatagaaaattctaatcctcctattacatataactttccattgttaacacaagtactaacttctgattttaacgacgacatattagtaaccgttttccattttttcgtttcaagatctacccgcgatacggaataaacatgtctattgttaatcatgccgccaataatgtatagacaattatgtaaaacatttgcattatagaattgtctatctgtattaccgactatcgtccaatattctgttctaggagagtaatgggttattgtggatatataatcagagtttttaatgactactatattatgttttataccatttcgtgtcactggctttgtagatttggatatagttaatcccaacaatgatatagcattgcgcatagtattagtcataaacttgggatgtaaaatgttgatgatatctacatcgtttggatttttatgtatccactttaataatatcatagctgtaacatcctcatgatttacgttaacgtcttcgtgggataagatagttgtcagttcatcctttgataattttccaaattctggatcggatgtcaccgcagtaatattgttgattatttctgacatcgacgcattatatagttttttaattccatatcttttagaaaagttaaacatccttatacaatttgtggaattaatattatgaatcatagtttttacacatagatctactacaggcggaacatcaattattatggcagcaactagtatcatttctacattgtttatggtgatgtttatcttcttccagcgcatatagtctaatagcgattcaaacgcgtgatagtttataccattcaatataatcgcttcatcctttagatggtgatcctgaatgcgtttaaaaaaattatacggagatgccgtaataatttccttattcacttgtataatttccccattgatagaaaatatcacgctttccattcttgaagtactataagtaattatagtataatgtaaaggtttatatattcaatattttttataaaaaaatcatttcgacattaattcctttttaaatttccgtctatcatctatagaaacatattctatgaatttataaaatgcttttacgtgtcctatcgtaggcgatagaaccgctaaaaagcctattgaatttctacaaaagaatctattatatggtatagggagagtataaaacattaaatgcccgtacttattaaagtattcagtagccaatcctaactctttcgaatacttattaatggctcttgttctgtacgaatctatttttttgaacaacggacctagtggtatatcttgttctatgtatctaaaataatgtctgactagatccgttagtttaatatcctcagtcatcttgtctagaatggcaaatctaactgcgggtttaggctttagtttagtttttatatctacatctatgtctttatctaacaccaaaaatataatagctaatattttattacaatcatccggatattcttctacgatctcactaactaatgtttctttggttatactagtatagtcactatcggacaaataaagaaaatcagatgatcgatgaataatacatttaaattcatcatctgtaagatttttgagatgtctcattaaaatattattagggtcagtactcattatcattaggcagctattacttattttattatttttcaccatatagatcaatcattagatcatcaaaatatgtttcaatcatcctaaagagtatggtgaatgactcttcccatctaatttctgaacgttcaccaatgtctctagccactttggcactaatagcgatcattcgcttagcgtcttctatattattaactggttgattcaatctatctagcaatggaccgtcggacagcgtcattctcatgttcttaatcaatgtacatacatcgccgtcatctaccaattcatccaacaacataagctttttaaaatcatcattataataggtttgatcgttgtcatttctccaaagaatatatctaataagtagagtcctcatgcttagtaatttaactattttagttaacaactattttttatgttaaatcaattagtacaccgctatgtttaatacttattcatattttagtttttaggattgagaatcaatacaaaaattaatgcatcattaattttagaaatacttagtttccacgtagttaatgaaacatttgaactcatcgtacaagacgttctcgtacaggacgtaactataaaccggtttatatttgttcaagatagatacaaatccgataactttttttacgaattctacgggatccactttaaaagtgtcataccgggttctttttatttttttaaacagatcaatggtgtgatgttgattaggtcttttacgaatttgatatagaatagcgtttacatattctccataatggtcaatcgccatttgttcgtatgtcataaattctttaattatatgacactgtgtattgtttagttcatccttgttcattgttaggaatctatccaaaatggcaattatactagaactataggtgcgttgtatacacatattgatgtgtctgtttatacaatccatgatatttggatccatgctactaccttcgggtaaaattgtagcatcatataccatttctagtactttaggttcattattatccattgcagaggacgtcatgatcgcatcctaaaaaaatatattatttttatgttattttgttaaaaataatcatcgaatacttcgtaagatactccttcatgaacataatcagttacaaaacgtttatatgaagtaaagtatctacgatttttacaaaagtccggatgcataagtacaaagtacgcgataaacggaataataatagatttatctagtctatctttttctatagctttcatagttagatacatggtctcagaagtaggattatgtaacatcagcttcgataaaatgactgggttatttagtcttacacattcgctcatacatgtatgaccgttaactacagagtctacactaaaatgattgaacaatagatagtctaccattgtttcgtattcagatagtacagcgtagtacatggcatcttcacaaattatatcattgtctaatagatatttgacgcatcttatggatcccacttcaacagccatcttaaaatcggtaaaatcatattgctttcctttatcattaataatttctaaaacatcatctctatcataaaagatacaaatattaactgtttgatccgtaataacattgctagtcgatagcaatttgttaataagatgcgctgggctcaatgtcttaataagaagtgtaagaggactatctccgaatttgttttgtttattaacatccgttgatggaagtaaaagatctataatgtctacattcttgactgttttagagcatacaatatggagaggtgtatttccatcatgatctggttttgagggactaattcctagtttcatcatccatgagattgtagaagcttttggattgtctgacataagatgtctatgaatatgatttttgccaaatttatccactatcctggcttcgaatccgatggacattatttttttaaacactctttctgaaggatctgtacacgccaacaacggaccacatccttcttcatcaaccgagttgttaatcttggctccatactgtaccaataaatttattctctctatgacttcatcatctgttcccgagagataatatagaggcgttttatgctgtttatcacacgcgtttggatctgcgccgtgcgtcagcagcatcgcgactattctattattattaattttagaagctatatgcaatggataatttccatcatcatccgtctcatttggagagtatcctctatgaagaagttcttcgacaaatcgttcatctagtcctttaattccacaatacgcatgtagaatgtgataattatttccagaaggttcgatagcttgtagcatattcctaaatacatctaaatttttactattatatttggcataaagagatagataatactcggccgacataatgttgtccattgtagtataaaaattaatatttctatttctatttctgtatatttgcaacaatttactctctataacaaatatcataacttagttcttttatgtcaagaaggcactggtttagttcatctataaatgtcacgccataactaccacgcatgctatactcagaattatgataaagatatttatccttggggtgtaggtaatggggattaatctttgttggatcagtctctaagttaacacatgtcacacatgatccatttatagttatatcacacgatgatgatttatgaattgattccggaagatcgctatcgtattttgtggttccacaattcatttccatacatgttattgtcacactaatattatgatgaactttatctagccgctgagtggtaaacaacagaacagatagtttattatctttaccaacaccctcagccgctgccacaaatctctgatccgtatccatgatggtcatgtttatttctagtccgtatccagtcaacactatgttagcatttctgtcgatatagctttcactcatatgacactcaccaataatagtagaattaatgtcgtaatttacaccaatagtgagttcggcggcaaagtaccaataccggtaatcttgtcgaggaggacatatagtattcttgtattctaccgaatacccgagagatgcgatacaaaagagcaagactaatttgtaaaccatcttactcaaaatatgtaacaatagtacgatgcaatgagtaagacaataggaaatctatcttatatacacataattattctatcaattttaccaattagttagtgtaatgttaacaaaaatgtgggagaatctaattagtttttctttacacaattgacgtacatgagtctgagttccttgtttttgctaattatttcatccaatttattattcttgactatatcgagatcttttgtataggagtcagacttgtattcaacatgcttttctataatcattttagctatttcggcatcatccaatagtacattttccagattagcagaatagatattaatgtcgtatttgaacagagcctgtaacatctcaatgtctttattatctatagccaatttaatgtccggaatgaagagaagggaattattggtgtttgtcgacgtcatatagtcgagcaagagaatcatcatatccacgtgtccattttttatagtggtgtgaatacaactaaggagaatagccagatcaaaagtagatggtatttctgaaagaaagtatgatacaatacttacatcattaagcatgacggcatgataaaatgaagttttccatccagttttcccatagaacatcagtctccaatttttcttaacaaacagttttaccgtttgcatgttaccactatcaaccgcataatacaatgcagtgtttcccttgtcatcaaattgtgaatcatccagtccactgaatagcaaaatctttactattttggtatcttccaatgtggctgcctgatgtaatggaaattcattctctagaagatttttcaatgctccagcgttcaacaacgtacatactagacgcacgttattatcagctattgcataatacaaggcactatgtccatggacatccgccttaaatgtatctttactagagagaaagcttttcagctgcttagacttccaagtattaattcgtgacagatccatgtctgaaacgagacgctaattagtgtatattttttcattttttataattttgtcatattgcaccagaattaataatatctctaatagatctgattagtagatacatggctatcgcaaaacaacatatacacatttaataaaaataatatttattaagaaaattcagatttcacgtacccatcaatataaataaaataatgattccttacaccgtacccatattaaggagattccaccttacccataaacaatataaatccagtaatatcatgtctaatgatgaacacaaatggtgtattaaattccagtttttcaggagatgatctcgccgtagctaccataatagtagatgcctctgctacagttccttgttcgtcgacatctatctttgcattctgaaacattttataaatatataatgggtccctagtcatatgtttaaacgacgcattatctggattaaacatactaggagccatcatttcggctatcgacttaatatccctcttattttcgatagaaaatttagggagtttaagattgtacactttattccctaattgaaacgaccaatagtctaattttgcagccgtaatagaatctgtgaaatgggtcatattatcacctattgccaggtacatactaatattagcatccttatacggaaggcgtaccatgtcatattctttgtcatcgattgtgattgtatttccttgcaatttagtaactacgttcatcatgggaaccgttttcgtaccgtacttattagtaaaactagcattgcgtgttttagtgatatcaaacggatattgccatgtacctttaaaatatatagtattaatgattgcccatagagtattattgtcgagcatattagaatctactacattagacataccggatctacgttctactatagaattaattttattaaccgcatctcgtctaaagtttaatctatataggccgaatctatgatattgttgataatacgacggtttaatacacacagtattatctacgaaactttgataagttagatcagtgtacgtatatttagatgttttcagcttagctaatcctgatattaattctgtaaatgctggacccagatctctttttctcaaatccatagtcttcaataattctattctagtattacctgatgcaggcaatagcgacataaacatagaaaacgaatagccaaacggcgagaagacaatattatcatcttgaatatttttatacgctactataccggcattggtaaatccttgcagacgataggtagacgctgaacacgttaacgatagtatcaataacgcaatcatgattttatggtattaataattaaccttatttttatgttcggtataaaaaaattattgatgtctacacatccttttgtaattgacatctatatatccttttgtataatcaactctaatcactttaacttttacagttttccctaccagtttatccctatattcaacatatctatccatatgcatcttaacactctctgccaagatagcttcagagtgaggatagtcaaaaagataaatatatagagcataatccttctcgtatactctgccctttattacatcgcccgcattgggcaacgaataacaaaatgcaagcatcttgttaacgggctcgtaaattgggataaaaattatgtttttatatctattttattcaagagaatattcaggaatttctttttccggttgtatctcgtcgcagtatatatcatttgtacattgtttcatattttttaatagtttacaccttttagtaggactagtatcgtacaattcatagctgtattttgaattccaatcacgcataaaaatatcttccaattgttgacgaagacctaatccatcatccggtgtaatattaatagatgctccacatgtatccgtaaagtaatttcctgtccaatttgaggtacctatataggccgttttatcggttaccatatatttggcatggtttaccctagaatacggaatgggaggatcagcatctggtacaataaatagctttacttctatatctatgtttttagattttagcatagcgatagatcttaaaaagtttctcatgataaacgaagatcgttgccagcaactaatcaatagcttaacggatacttgtctgtctatagcggatcttcttaattcatcttctatataaggccaaaacaaaattttacccgccttcgaataaataatagggataaagttcataacagatacataaacgaatttactcgcatttctaatacatgacaataaagcggttaaatcattggttctttccatagtacatagttgttgcggcgcagaagcaataaatacagagtgtggaacaccacttacgttaatactaagaggatgatctgtattataatacgacggataaaagtttttccaattatatggtagattgttaactccaagataccagtatacctcaaaaatttgagtgagatccgctgccaagttcctattattgaagatcgcaatacccaattctttgacctgagttagtgatctccaatccatgttagcgcttcctaaataaatatgtgtattatcagatatccaaaattttgtatgaagaactcctcctaggatatttgtaatatctatgtatcgtacttcaactccggccatttgtagtctttcaacatcctttaatggtttgttagatttattgacggctactctaactcttactcctcttttgggtaattgtacaatctcgtttaatattatcgtgccgaaattcgtacccacttcatccgataaactccaataaaaagatgatatatctagtgtttttgtggtattggatagaatttccctccacatgttaaatgtagacaaatatactttatcaaattgcatacctataggaatagtctctgtaatcactgcgattgtattatccggattcattttatttgttaaaaaataatcctatatcacttcactctattaaaaatccaagtttctatttctttcatgactgattttttaacttcatccgtttccttatgaagatgatgtttggcaccttcataaatttttatttctctattacaatttgcatgttgcatgaaataatatgcacctaaaacatcgctaatctcattgtttgttccctggagtatgagagtcgggggggtgttaatcttggaaattatttttctaaccttgttggtagccttcaagacctgactagcaaatccagccttaattttttcatgattgattaatgggtcgtattggtatttataaactttatccatatctctagatactgattctggacatagctttccgactggcgcatttggtgtgatggttcccataagtttggcagctagcagattcagttttgaaacagcatctgcattaactagaggagacattagaatcattgctgtaaacaagtttggattatcgtaagaggctagtatagaaattgttgctcccatggaatgacccaataagtagatttaatagttaccacgtgctgtaccaaagtcatcaatcatcattttttcaccattacttcttccatgtccaatatgatcatgtgagaatactaaaattcctaacgatgatatgttttcagctagttcgtcataacgtccagaatgtttaccagctccatgacttatgaatactaatgccttaggatatgtaataggtttccaatatttacaatatatgtaatcattgtccagattgaacatacagtttgcactcatgattcacgttatataactatcaatattaacagttcgtttgatgatcatattatttttatgttttattgataattgtaaaaacatacaattaaatcaatatagaggaaggagacggatactgtcttttgtgagatagtcatggcgactaaatcagattatgaggatgctgttttttactttgtggatgatgataaaatatgtagtcgcgactccatcatcgatctaatagatgaatatatcacgtggagaaatcatgttatagtgtttaacaaagatattaccagttgtggaagactgtacaaggaattgatgaagttcgatgatgccgctatacagtactatggtattgataaaattaatgagattgtcgaagctatgagcgaaggagaccactacatcaattttacaaaagtccatgatcaggaaagtttattcgctaccataggaatatgtgctaaaatcactgaacattggggatacaaaaagatttcagaatctagattccaatcattgggaaacattacagatctgatgaccgacgataatataaacatcttgatactttttctagaaaaaaaattgaattgatgatataggggtcttcataacgcataattattacgttagcattctatatccgtgttaaaaaaaattatcctatcatgtatttgagagttttatatgtagcaaacatgatagctgtgatgccaataagctttagatattcacgcgtgctagtgttagggatggtattatctggtggtgaaatgtccgttatataatctacaaaacaatcatcgcatatagtatgcgatagtagagtaaacatttttatcgtttctactgggttcatacatcgtctacccaattcggttatgaatgaaattgtcgccaatcttacacccaaacccttgttatccattagcatagtattaacttcgttatttatgtcataaactgtaaatgattctgtagatgccatatcatacatgatattcatgtccctattataatcattactaactttatcacaatatatgttgataatatctatatatgatctagtctttgtgggcaactgtctatacaagtcgtctaaacgttgtttactcatatagtatcgaacagccatcattacatggtcccgttccgttgatagataatcgagtatgttagtggacttgtcaaatctatataccatattttctggaagtggatatacatagtcgtgatcaacattattgctagcctcatcttctatatcctgtactataccattatctatatcatctacataatctacgatattattatacataaacatcgacaacatactattgtcaattatctaagtcctgttgatccaaacccttgatctcctctatctgtactatctagagattgtacttcttccagttctggataatatatacgttgatagattagctgggctattctatcccccgtatttacattaaacgtacattttccattattaataagaataactcctatgtttcccctataatcttcgtctattacaccgcctcctatatcaatgccttttagggacagaccagacctaggagctattctaccatagcagaacttaggcatggacatactaatatctgtcttaattaactgtcgttctccaggagggatagtataatcgtaagcgctatataaatcatatccggcggcgtaaggtgattgcctagtaggagatttagctctgttagtttccttaacaaatctaactggtgagttaatattcatgttgaacataaaactaatattttatttcaaaattatttaccatcccatatattccatgaataagtgtgatgattgtacacttctatagtatctatatacgattcacgataaaatcctcctatcaatagcagtttattatccactatgatcaattctggattatccctcggataaataggatcatctatcagagtccatgtattgctggattcacaataaaattccgcatttctaccaaccaagaataaccttctaccgaacactaacgcgcatgatttataatgaggataataagtggatggtccaaactgccactgatcatgattgggtagcaaatattctgtagttgtatcagtttcagaatgtcctcccattacgtatataacattgtttatagatgccactgctggattacatctaggtttcagaagactcggcatattaacccaagcagcatccccgtggaaccaacgctcaacagatgtgggatttggtagacctcctactacgtataatttattgttagcgggtatcccgctagcatacagtctggggctattcatcggaggaattggaatccaattgtttgatatataatttacagctatagcattgttatgtatttcattgttcatccatccaccgatgagatatactacttctccaacatgagtacttgtacacatatggaatatatctataatttgatccatgttcataggatactctatgaatggatacttgtatgatttgcgtggttgtttatcacaatgaaatattttggtacagtctagtatccattttacattatttatacctctgggagaaagataatttgacctgattacatttttgataaggagtagcagatttcctaatttatttcttcgctttatataccacttaatgacaaaatcaactacataatcctcatctggaacatttagttcatcgctttctagaataagtttcatagatagataatcaaaattgtctatgatgtcatcttccagttccaaaaagtgtttggcaataaagtttttagtatgacataagagattggatagtccgtattctatacccatcatgtaacactcgacacaatattcctttctaaaatctcgtaagataaagtttatacaagtgtagatgataaattctacagaggttaatatagaagcacgtaataaattgacgacgttatgactatctatatatacctttccagtatatgagtaaataactatagaagttaaactgtgaatgtcaaggtctagacaaacccttgtaactggatctttatttttcgtgtatttttgacgtaaatgtgtgcgaaagtaaggagataactttttcaatatcgtagaattgactattatattgccacctatagcatcaataattgttttgaatttcttagtcatagacaatgctaatatattcttacagtacacagtattaacaaatatcggcatttatgtttctttaaaagtcaacatctagagaaaaatgattatctttttgagacataactcccattttttggtattcacccacacgtttttcgaaaaaattagtttttccttccaatgatatattttccatgaaatcaaacggattggtaacattataaatttttttaaatcccaattcagaaatcaatctatccgcgacgaattctatatatgttttcatcatttcacaattcattcctataagtttaactggaagagccgcagtaagaaattcttgttcaatggatactgcatctgttataatagatctaacggtttcttcactcggtggatacaataaatgtttaaacatcaaacatgcgaagtcgcagtgtagaccctcgtctctactaattagttcgttggaaaacgtgagtccgggcattaggccacgctttttaagccaaaatatggaagcgaatgatccggaaaagaagattccttctactgcagcaaaggcaataagtctctctccataaccggcgctgtcatgtatccacttttgagcccaatcggccttcttttttacacaaggcattgtttctatggcattaaagagatagtttttttcattactatctttaacataagtatcgatcaaaagactatacatttccgaatgaatgttttcaatggccatctgaaatccgtagaaacatctagcctcggtaatctgtacttctgtacaaaatcgttccgccaaattttcattcactattccgtcactggctgcaaaaaacgccaatacatgttttataaaatatttttcgtctggtgttagtttattccaatcattgatatctttagatatatctacttcttccactgtccaaaatgatgcctctgcctttttatacatgttccagatgtcatgatattggattgggaaaataacaaatctatttggatttggtgcaaggatgggttccataactaaattaacaatatcaataaattttttttcagttatctatatgcctgtacttggattttttgtacatcgatatcgccgcaatcactacaataattacaagtattattgatagcattgttattagtactatcataattaaattatcgacattcatgggtgctgaataatcgttattatcatcattatcattttgtaattgtgacatcatactaaataaatcgtttgcgagattgttgtgggaagcgggcatggaggatgcattatcattattatttaacgccttccatttggattcacaaatatggcgcgcgttcaacattttatggaaactataattttgtgaaaacagataacaagaaaactcgtcatcgttcaaatttttaacgatagtaaaccgattaaacgtcgagctaatttctaacgctagcgactctgttggatatgggtttccagatatatatcttttcagttcccctacgtatctataatcatctgtaggaaatggaagatatttccatttatctactgttcctaatatcatatgtggtggtgtagtagaaccattaagcgcgaaagatgttatttcgcatcgtattttaacttcgcaataatttctggttagataacgcactctaccagtcaagtcaatgatattagcctttacagatatattcatagtagtcgtaacgatgactccatcttttagatgcgatactcctttgtatgtaccagaatcttcgtacctcaaactcgatatatttaaacaagttaatgagatattaacgcgttttatgaatgatgatatataaccagaagttttatcctcggtggctagcgctataaccttatcattataataccaactagtgtgattaatatgtgacacgtcagtgtgggtacaaatatgtacattatcgtctacgtcgtattcgatacatccgcatacagccaacaaatataaaatgacaaatactctaacgccgttcgtacccatcttgatgcggtttaataaatgttttgatttcaatttattgtaaaaaaagattcggttttatactgttcgatattctcattgcttatattctcatctatcatctccacacagtcaaatccgtggttagcatgcacctcatcaaccggtaaaagactatcggactcttctatcattataactctagaatatttaatttggtcattattaatcaagtcaattatcttatttttaacaaacgtgagtattttactcattttttataaaaacttttagaaatatacagactctatcgtgtgtctatatcttctttttatatccaatgtatttatgtctgatttttcttcatttatcatatataatggtccaaattctacacgtgcttcggattcatccagatcattaaggttcttataattgtaacatccttctcttccctcttctacatcttccttcttattcttattcttagcgtcacagaatctaccacagcaggatcccatgacgagcgtcatattaaactaatccattttcaattataatatatgattagtaatgaccattaaaataaaaaatattcttcataaccggcaagaaagtgaaaagttcacattgaaactatgtcagtagtatacatcatgaaatgatgatatatatatactctattttggtggaggattatatgatataattcgtggataatcattcttaagacacatttcttcattcgtaaatcttttcacgttaaatgagtgtccatattttgcaatttcttcatatgatggcggtgtacgtggacgaggctgctcctgttcttgttgtggtcgccgactgtcgtgtttgcgtttatccctccattatcgcgattgcgtagatggagtactattatataccttgtaattaaatttttttattaattaaacgtataaaaacgttccgtatctgtatttaagagccagatttcgtctaatagaacaaatagctacagtaaaaataactagaataattgctacacccactagaaaccacggatcgtaatacggcaatcggttttcgataataggtggaacgtatattttatttaaggacttaacaattgtctgtaaaccacaatttgcttccgcggatcctgtattaactatctgtaaaagcatatgttggccgggcggagccgaacattctccgatatccaatttctgtatatctataatattattaacctccgcatacgcattacagttcttttctagcttggataccgcactaggtacatcgtctagatctattcctatttcctcagcgatagctcttctatccttttccggaagcaatgaaatcacttcaataaatgattcaaccatgagtgtgaaactaagtcgagaattactcatgcatttgttagttattcggagcgcgcaatttttaaactgtcctataacctctcctatatgaatagcacaagtgacattagtagggatagaatgttgagctaatttttgtaaataactatctataaaaagattatacaaagttttaaactctttagtttccgccatttatccagtctgagaaaatgtctctcataataaatttttccaagaaactaattgggtgaagaatggaaacctttaatctatatttatcacagtctgttttggtacacatgatgaattcttctaatgccgtactaaattcgatatctttttcgatttctggatatgtttttaataaagtatgaacaaagaaatggaaatcgtaataccagttatgtttaactttgaaattgttttttattttcttgttaatgattccagccacttgggaaaagtcaaagtcgtttaatgccgatttaatacgttcattaaaaacaaactttttatcctttagatgaattattattggttcattggaatcaaaaagtaagatattatcgggtttaagatctgcgtgtaaaaagttgtcgcagcatggtagttcgtagattttaatgtataacagagccatctgtaaaaagataaactttatgtattgtaccaaagatttaaatcctaatttgatagctaactcggtatctactttatctgccgaatacagtgctaggggaaaaattataatgtttcctctttcgtattcgtagttagttctcttttcatgttcgaaaaagtgaaacatgcggttaaaatagtttataacattaatattactgttaataactgccgggtaaaagtgggatagtaatttcacgaatttgatactgtcctttctctcgttaaacgcctttagaaaaactttagaagaatatctcaatgatagttcctgaccatccatagtttgtatcaataatagcaacatatgaagaacacgtttatacagagtatgtaaaaatgttaatttatagtttaatcccatggcccacgcacacacgattaattttttttcatctccctttagattgttgtatagaaatttgggtactgtgaactccgccgtagtttccatgggactatataattttgtggcctcgaatacaaattttactacatagttatctatcttaaaaactataccatatcctcctgtagatatgtgataaaaatcgtcgtttataggataaaatcgtttatccttttgttggaaaaaggatgaattaatgtaatcattctcttctatctttagtagtgtttccttattaaaattcttaaaataatttaacaatctaactgacggagcccaattttggtgtaaatctaattgggacattatattgttaaaatacaaacagtctcctaatataacagtatctgataatctatggggagacatccattgatattcaggggatgaatcattggcaacacccatttattgtacaaaaagccccaatttacaaacgaaagtccaggtttgatagagacaaactattaactattttgtctctgtttttaacacctccacagtttttaatttctttagtaatgaaattattcacaatatcagtatcttctttatctaccagagattttactaacttgataaccttggctgtctcattcaatagggtagtaatatttgtatgtgtgatattgatatctttttgaattgtttcttttagaagtgattctttgatggtgccagcatacgaattacaataatgcagaaactcggttaacatgcaggaattatagtaagccaattccaattgttgcctgtgttgtattagagtgtcaatatgagcaatggtgtccttgcgtttctctgatagaatgcgagcagcgattttggcgttatcatttgacgatatttctggaatgacgaatcctgtttctactaactttttggtaggacaaagtgaaacaatcaagaagatagcttctcctcctatttgtggaagaaattgaactcctctagatgatctactgacgatagtatctccttgacagatattggaccgaattacagaagtacctggaatgtaaagccctgaaaccccctcattttttaagcagattgttgccgtaaatcctgcactgtgaccaagatagagagctcctttggtgaatccatctctatgtttcagtttaaccaagaaacagtcagctggtctaaaatttccatctctatctaatacagcatctaacttgatgtcaggaactatgaccggtttaatgttatatgtaacattgagtaaatccttaagttcataatcatcactgtcatcagttatgtacgatccaaacaatgtttctactggcatagtggatacgaagatgctatccatcagaatgtttccctgattagtattttctatatagctattcttctttaaacgattttccaaatcagtaactatgttcatttttttaggagtaggacgcctagccagtatggaagaggattttctagatcctctcttcaacatctttgatctcaatggaatgcaaaaccccatagtgaaacaaccaacgataaaaataatattgtttttcactttttataattttaccatctgactcatggattcattaatatctttataagagctactaacgtataattctttataactgaactgagatatatacaccggatctatggtttccataattgagtaaatgaatgctcggcaataactaatggcaaatgtataaaacaacgaaattatactagagttgttaaagttaatattttctatgagctgttccaataaattatttgttgtgactgcgttcaagtcataaatcatcttgatactatccagtaaacagtctttaagttctggaatattatcatcccattgtaaagcccctaattcgactatcgaatatcctgctctgatagcagtttcaatatcgacggacgtcaatactgtaataaaggtggtagtattgtcatcatcgtgataaactacgggaatatggtcgttagtaggtacggtgactttacacaacgcgatatataactttccttttgtaccatttttaacgtagttgggacgtcctgcagggtattgttttgaagaaatgatatcgagaacagatttgatacgatatttgttggattcctgattattcactataatataatctagacagatagatgattcgataaatagagaaggtatatcgttggtaggataatacatccccattccagtattctcggatactctattgatgacactagttaagaacatgtcttctattctagaaaacgaaaacatcctacatggactcattaaaacttctaacgctcctgattgtgtctcgaatgcctcgtacaaggatttcaaggatgccatagattctttgaccaacgatttagaattgcgtttagcatctgatttttttattaaatcgaatggtcggctctctggtttgctaccccaatgataacaatagtcttgtaaagataaaccgcaagaaaatttatacgcatccatccaaataaccctagcaccatcggatgatattaatgtattattatagattttccatccacaattattgggccagtatactgttagcaacggtatatcgaatagattactcatgtaacctactagaatgatagttcgtgtactagtcataatatctttaatccaatctaagaaatttaaaattagattttttacactgttaaagttaacaaaggtattacccggatacgtggatatcatatatggcattggtccattatcagtaatagctccataaactgatacggcgatggtttttatatgtgtttgatctaacgaggaagaaattcgcgcccacaattcatctctagatatgtatttaatatcaaacggtaacacatcaatttcgggacgcgtatatgtttctaaatttttaatccaaatataatgatgacctatatgccctattatcatactgtcaactatagtacacctagagaacttacgatacatctgtttcctataatcgttaaattttacaaatctataacatgctaaaccttttgacgacaaccattcattaatttctgatatggaatctgtattctcgataccgtattgttctaaagccagtgctatatctccctgttcgtgggaacgctttcgtataatatcgatcaacggataatctgaagtttttggagaataatatgactcatgatctatttcgtccataaacaatctagacataggaattggaggcgatgatcttaattttgtgcaatgagtcgtcaatcctataacttctaatattgtaatattcatcatcgacataacactatctatgttatcatcgtatattagtataccacggccttcttcatttcgtgccaaaataatatacagtcttaaataattacgcaatatctcaatagtttcataattgttagctgttttcatcaaggtttgtatcctgtttaacatgatggcgttctataacgtctctattttctatttttaattttttaaatttttaacgatttactgtggctagatacccaatctctctcaaatatttttttagcctcgcttacaagctgtttatctatactattaaaactgacgaatccgtgattttggtaatgggttccgtcgaaatttgccgaagtgatatgaacatattcgtcgtcgactatcaacaattttgtattattctgaatagtgaaaaccttcacagatagatcattttgaacacacaacgcgtctagacttctggcggttgccatagaatatacgtcgttcttatcccaattaccaactagaagtctgatcttaactcctctattaatggctgcttctataatggagttgtaaatgtcaggccaatagtagctattaccgtcgacacgtgtagtgggaactatggccaaatgttcaatatctatactagtcttagccgacttgagtttatcaataactacatcagtgtctagatctctagaatatcccaataggtgttctggagaatcagtaaagaacactccacctataggattcttaatatgatacgcagtgctaactggcagacaacaagccgcagagcataaattcaaccatgaattttttgcgctattaaaggctttaaaagtatcaaatcttctacgaagatctgtggccagcgggggataatcagaatatacacctaacgttttaatcgtatgtatagatcctccagtaaatgacgcgtttcctacataacatctttcatcatctgacacccaaaaacaaccgagtagtagtcccacattattttttttatctatattaacggttataaaatttatatccgggcagtgactttgtagctctcccagatttcttttccctcgttcatctagcaaaactattattttaatccctttttcagatgcctcttttagtttatcaaaaataagcgcgcccctagtcgtactcagaggattacaacaaaaagatgctatgtatatatatttcttagctagagtgataatttcgttaaaacattcaaatgttgttaaatgatcggatctaaaatccatattttctggtagtgtttctaccagcctacattttgctcccgcaggtaccggtgcaaatggccacatttagttaacataaaaacttatacatcctgttctatcaacgattctagaatatcatcggctatatcgctaaaattttcatcaaagtcgacatcacaacctaactcagtcaatatattaagaagttccatgatgtcatcttcgtttatttctatatccgtatccattgtagattgttgaccgattatcgagtttaaatcattactaatactcaatccttcagaatacaatctgtgtttcattgtaaatttataggcggtgtatttaagttggtagattttcaattatgtatcaatatagcaacagtagttcttgctcctccttgattctagcatcctcttcattattttcttctacgtacataagcatgtccaatacgttagacaacacaccgacgatggcggccgccacagacacgaatatgactagaccgatgaccatttaaaaacccctctctagctttcacttaaactgtatcgattattcttttagaacatgtataatataaaaacattattctatttcgaatttaggcttccaaaaatttttcatccgtaaaccgataataatatatatagacttgttaatagtcggaataaatagattaatgcttaaactatcatcatctccacgattagagatacaatatttacattctttttgctgtttcgaaactttatcaatacacgttaatacaaacccaggaaggagatattgaaactgaggctgttgaaaatgaaacggtgaatacaataattcagataatgtaaaatcatgattccgtattctgatgatattagaactgctaatggatgtcgatggtatgtatctaggagtatctattttaacaaagcatcgatttgctaatatacaattatcattttgattaattgttattttattcatattcttaaaaggtttcatatttatcaattcttctacattaaaaatttccatttttaatttatgtagccccgcaatactcctcattacgtttcattttttgtctataatatccattttgttcatctcggtacatagattatccaattgagaagcgcatttagtagttttgtacattttaagtttattgacgaatcgtcgaaaactagttatagttaacattttattatttgataccctgatattaatacccctgccgttactattatttataactgatgtaacccacgtaacattagaattaattatcgatagtaatgcatcgacgcttccaaaattgtctattataaactcaccgataatttttttattgcatgttttcatattcattaggattatcaaatctttaatcttattacgattgtatgcgttgatattacaagacgtcattctaaaagacggaggatctccatcaaatgccagacaatcacgtacaaagtacatggaaataggttttgttctattgcgcatcatagattcatatagaacacccatagaaatactaatttgttttactctataaaatactaatgcatctatttcatcgttttgtataacgtctttccaagtgccaaattccaaatttttttcattgatagtaccaaattcttctatctctttaactacttgcatagataggtaattacagtgatgcctacatgccgttttttgaaactgaatagatgcgtctagaagcgatgctacactagtcacaatcaccactttcatatttagaatatatgtatgtaaaaatatagtagaatttcattttgtttttttctatgctataaatgaattctcattttgcatctgctcatactccgttttatatcaataccaaagaaggaagatatctggttctaaaagccgttaaagtatgcgatgttagaactgtagaatgcgaaggaagtaaagcttcctgcgtactcaaagtagataaaccctcatcgcccgcgtgtgagagaagaccttcgtccccgtccagatgcgagagaatgaataaccctggaaaacaagtcccgtttatgaggacggacatgctacaaaatatgttcgcggctaatcgcgataatgtagcttctagacttttgtcctaaaatactattatatccttttcgatattaataaatccgtgtcgtccaggttttttatctctttcagtatgtgaatagataggtattttatctctattcatcatcgaatttaagagatccgataaacattgtttgtattctccagatgtcagcatctgatacaacaatatatgtgcacataaacctctggcacttatttcatgtaccttccccttatcactaaggagaatagtatttgagaaatatgtatacatgatattatcatgaattagatatacagaatttgtaacactctcgaaatcacacgatgtgtcggcgttaagatctaatatatcactcgataacacattttcatctagatacactagacattttttaaagctaaaatagtctttagtagtgacagtaactatgcgattattttcatcgatgatacatttcatcggcatattattacgcttaccatcaaagactataccatgtgtatatctaacgtattctagcatggttgccatacgtgcattaaacttttcaggatctttggatagatcttccaatctatctatttgagaaaacatttttatcatgttcaatagttgaaacgtcggatccactatatagatattatctataaagattttaggaactacgttcatggtatcctggcgaatattaaaactatcaatgatatgattatcgttttcatcttttatcaccatatagtttctaagatatgggattttacttaatataatattatttcccgtgataaattttattagaaaggccaaatctataagaaaagtcctagaattagtctgaagaatatctatatcgccgtaccgtatatttggattaattagatatagagaatatgatccgtaacatatacaacttttattatggcgtctaagatattcttccatcaacttattaacatttttgactagggaagatacattatgacgtcccattacttttgccttgtctattactgcgacgttcatagaatttagcatatctcttgccaattcttccattgatgttacattataagaaattttagatgaaattacatttggagctttaatagtaagaactcctaatatgtccgtgtatgtggtcactaatacagattgtagttctataatcgtaaataatttacctatattatatgtttgagtctgtttagaaaagtagctaagtatacgatcttttatttctgatgcagatgtatcaacatcggaaaaaaatctttttttattcttttttactaaagatacaaatatgtctttgttaaaaacagttattttctgaatatttctagcttgtaattttaacatatgatattcgttcacactaggtactctgcctaaataggtttctataatctttaatgtaatattaggaagagtattctgatcaggattcctattcattttgaggatttaaaactctgattattgtctaatatggtctcaacacaaactttttcacagagcgatagagtttttgataactcgtttttcttaagaaatataaaactactgtttccagagctcgctctatcttttattttatctaattcgatacaaactcctgatactggttcagaaagtaattcattaattttcagtcctttatagaagatatttaatatagataatacaaaattttcagttcttgatatcgatctgattgatcctagaactagatatattaataacgtgctcattaggcagtttatggcagcttgataattagatatagtatattccagttcatatttattagataccgcattgcccagattttgatattctatgaattcctctgaaaataaatccaaaataactagacattctattttttgtggattagtgtactctcttccctctatcatgttcactactggtgtccacgatgataaatatctagagggaatataatatagtccataggatgccaatctagcaatgtcgaataactgtaatttgattcttcgttcttcattatgaattgattcttgaggtataaacctaacacaaattatattattagacttttcgtatgtaatgtctttcatgttataagtttttaatcctggaatagaatctattttaatgaggcttttaaacgcagagttctccaacgagtcaaagcataatactctgttgtttttcttatatacgatgttacgattttcttctttgaatggaataggtttttgaattagtttataattacaacataatagataaggaagtgtgcaaatagtacgcggaaaaaacataatagctcccctgttttcatccatggttttaagtaaatgatcactggcttctttagtcaatggatattcgaacattaaccgtttcatcatcattggacagaatccatatttcttaatgtaaagagtgatcaaatcattgtgtttattgtaccatcttgttgtaaatgtgtattcggttatcggatctgctcctttttctattaaagtatcgatgtcgatctcgtctaagaattcaactatatcgacatatttcatttgtatacacataaccattactaacgtagaatgtataggaagagatgtaacgggaacagggtttgttgattcgcaaactattctaatacataattcttctgttaatacgtcttgcacgtaatctattatagatgccaagatatctatataattattttgtaagatgatgttaactatgtgatctatataagtagtgtaataattcatgtatttcgatatatgttccaactctgtctttgtgatgtctagtttcgtaatatctatagcatcctcaaaaaatatattcgcatatattcccaagtcttcagttctatcttctaaaaaatcttcaacgtatggaatataataatctattttacctcttctgatatcattaatgatatagtttttgacactatcttctgtcaattgattcttattcactatatctaagaaacggatagcgtccctaggacgaactactgccattaatatctctattatagcttctggacataattcatctattataccagaattaatgggaactattccgtatctatctaacatagttttaagaaagtcagaatctaagacctgatgttcatatattggttcatacatgaaatgatctctattgatgatagtgactatttcattctctgaaaattggtaactcattctatatatgctttccttgttgatgaaggatagaatatactcaatagaatttgtaccaacaaactgttctcttatgaatcgtatatcatcatctgaaataatcatgtaaggcatacatttaacaattagagacttgtctcctgttatcaatatactattcttgtgataatttatgtgtgaggcaaatttgtccacgttctttaattttgttatagtagatatcaaatccaatggagctacagttcttggcttaaacagatatagtttttctggaacgaattctacaacattattataaaggactttgggtagataagtgggatgaaatcctattttaattaatgcgatagccttgtcctcgtgcagatatccaaacgcttttgtgatagtatggcattcattgtctagaaacgctctacgaatatctgtgacagatatcatctttagagaatatactagtcgcgttaatagtactacaatttgtattttttaatctatctcaataaaaaaattaatatgtatgattcaatgtataactaaactactaactgttattgataactagaatcagaatctaatgatgacgtaaccaagaagtttatctactgccaatttagctgcattatttttagcatctcgtttagattttccatctgccttatcgaatactcttccgtcgatgtctacacaggcataaaatgtaggagagttactaggccccactgattcaatacgaaaagaccaatctctcctagtaatttggcagtactcattaataacggtgacagggttagcacctttccaatcaataatttttttagccggaataacatcatcaaaagacttatgatcctctctcattgatttttcgcgggatacatcatctattatggcgtcagccataacatcagcatccggcttatccgcctccgttgtcataaaccaacgaggaggaatatcgtcggagctgtacaccatagcactacgttgaagatcgtacagagctttattaacttctcgcttctccatattaagttgtctagttagttgtgcagcagtagctccttcgattccaatggttttaatagcctcacacacaatctctgcgttagaacgttcgtcgatatagattttagacatttttagagagaactaacacaaccagcaataaaactgaacctactttatcatttttttattcatcatcctctggtggttcgtcgttcctatcgaatgtggatctgattaacccgtcatctataggtgatgctggttctggagattctggaggagatggattattatctggaagaatctctgttatttccttgttttcatgtatcgattgcgttgtaacattaagattgcgaaatgctctaaatttgggaggcttaaagtgttgtttgcaatctctacacgcatgtctaactagtggaggttcgtcagcggctctagtttgaatcatcatcggcgtagtattcctacttttacagttaggacacggtgtattgtatttctcgtcgagaacgttaaaataatcgttgtaactcacatcctttattttatctatattgtattctactcctttcttaatgcattttataccgaataagagatagcgaaggaattctttttcggtgccgctagtacccttaatcatatcacatagtgttttatattccaaatttgtggcaatagacggtttatttctatacgatagtttgtttctggaatcctttgagtattctataccaatattattctttgattcgaatttagtttcttcgatattagattttgtattacctatattcttgatgtagtactttgatgatttttccatggcccattctattaagtcttccaagttggcatcatccacatattgtgatagtaattctcggatatcagtagcggctaccgccattgatgtttgttcattggatgagtaactactaatgtatacattttccatttataacacttatgtattaactttgttcatttatattttttcattattatgttgatattaacaaaagtgaatatatatgttaataattgtattgtggttatacggctacaatttcataatgagtggaagtcagtgtccgatgatcaatgacgatagctttactctgaaaagaaagtatcaaatcgatagtgcggagtcaacaataaaaatggataagaagaggataaagtttcagaatagagccaaaatggtaaaagaaataaatcagacaataagagcagcacaaactcattacgagacattgaaactaggatacataaaatttaagagaatgattaggactactactctagaagatatagcaccatctattccaaataatcagaaaacttataaactattctcggacatttcagccatcggcaaagcatcacagaatccgagtaagatggtatatgctctgctgctttacatgtttcccaatttgtttggagatgaccatagattcattcgttatagaatgcatccaatgagtaaaatcaaacacaagatcttctctcctttcaaacttaatcttattagaatattagtggaagaaagattctataataatgaatgcagatctaataaatggagaataattggaacacaagttgataaaatgttgatagctgaatctgataaatatacaatagatgcaaggtataacctaaaacccatgtatagaatcaagggaaaatctgaagaagataccctcttcatcaaacagatggtagaacaatgtgtgacatcccaggaattggtggaaaaagtgttgaagatactgtttagagatttgttcaagagtggagaatacaaagcatacagatacgatgatgatgtagaaaatggatttattggattggatacactaaaattaaacattgttcatgatatagttgaaccatgtatgcctgttcgtaggccagtggctaagatactgtgtaaagaaatggtaaataaatactttgagaatccgctacatattattggtaaaaatcttcaagagtgcattgactttgttagtgaataggcatttcatctttctccaatactaattcaaattgttaaattaataatggatagtataaatagttattagtgataaaatagtaaaaataattattagaataagagtgtagtatcatagataactctcttctataaaaatggattttattcgtagaaagtatcttatatacacagtagaaaataatatagattttttaaaggatgatacattaagtaaagtaaacaattttaccctcaatcatgtactagctctcaagtatctagttagcaattttcctcaacacgttattactaaggatgtattagctaataccaatttttttgttttcatacatatggtacgatgttgtaaagtgtacgaagcggttttacgacacgcatttgatgcacccacgttgtacgttaaagcattgactaagaattatttatcgtttagtaacgcaatacaatcgtacaaggaaaccgtgcataaactaacacaagatgaaaaatttttagaggttgccgaatacatggacgaattaggagaacttataggcgtaaattatgacttagttcttaatccattatttcacggaggggaacccatcaaagatatggaaatcatttttttaaaactgtttaagaaaacagacttcaaagttgttaaaaaattaagtgttataagattacttatttgggcatacctaagcaagaaagatacaggcatagagtttgcggataatgatagacaagatatatatactctatttcaacaaactggtagaatcgtccatagcaatctaacagaaacgtttagagattatatctttcccggagataagactagctattgggtgtggttaaacgaaagtatagctaatgatgcggatatcgttcttaatagacacgccattaccatgtatgataaaattcttagttatatatactctgagataaaacaaggacgcgttaataaaaacatgcttaagttagtttatatctttgagcctgaaaaagatatcagagaacttctgctagaaatcatatatgatattcctggagatatcctatctattattgatgcaaaaaacgacgattggaaaaaatattttattagtttttataaagctaattttattaacggtaatacatttattagtgatagaacgtttaacgaggacttattcagagttgttgttcaaatagatcccgaatatttcgataatgaacgaattatgtctttattctctacgagtgctgcggacattaaacgatttgatgagttagatattaataacagttatatatctaatataatttatgaggtgaacgatatcacattagatacaatggatgatatgaagaagtgtcaaatctttaacgaggatacgtcgtattatgttaaggaatacaatacatacctgtttttgcacgagtcggatcccatggtcatagagaacggaatactaaagaaactgtcatctataaaatccaagagtagacggctgaacttgtttagcaaaaacattttaaaatattatttagacggacaattggctcgtctaggtcttgtgttagatgattataaaggagacttgttagttaaaatgataaaccatcttaagtctgtggaggatgtatccgcattcgttcgattttctacagataaaaaccctagtattcttccatcgctaatcaaaactattttagctagttataatatttccatcatcgtcttatttcaaaggtttttgagagataatctatatcatgtagaagaattcttggataaaagcatccatctaaccaagacggataagaaatatatacttcaattgataagacacggtagatcatagaacagaccaaatatattattaataatttgtatatacatagatataattatcacatattaaaaattcacacatttttgataaatgggaactgctgcaacaattcagactcccaccaaattaatgaataaagaaaatgcagaaatgattttggaaaaaattgttgatcatatagttatgtatattagtgacgaatcaagtgattcagaaaataatcctgaatatattgattttcgtaacagatacgaagactatagatctctcattataaaaagtgatcacgagtttgtaaagctatgtaaaaatcatgcagagaaaagttctccagaaacgcaacaaatgattatcaaacacatatacgaacaatatcttattccagtatctgaagtactattaaaacctataatgtccatgggtgacataattacatataacggatgtaaagacaatgaatggatgctagaacaactctctaccctaaactttaacaatctccgcacatggaactcatgtagcataggcaatgtaacgcgtctgttttatacattttttagttatctgatgaaagataaactaaatatataagtataatcccattctaatactttaacctgatgtattacctgcatcttattagaatattaacctaactaaaagacataacataaaaactcattacatagttgataaaaagcggtaggatataaatattatggctgccaccgttccgcgttttgacgacgtgtacaaaaatgcacaaagaagaattctagatcaagaaacattttttagtagaggtctaagtagaccgttaatgaaaaacacatatctatttgataattacgcgtatggatggataccagaaactgcaatttggagtagtagatacgcaaacttagatgcaagtgactattatcccatttcgttgggattacttaaaaagttcgagtttctcatgtctctatataaaggtcctattccagtatacgaagaaaaagtaaatactgaattcatagccaatggatcgttctctggtagatacgtatcatatcttcgaaagttttctgctcttccaacaaacgagtttattagttttttgttactgacttccattccaatctataatatcttgttctggtttaaaaatactcagtttgatattactaaacacacattattcagatacgtctatacagataatgccaaacacctggcgttggctaggtatatgcatcaaacaggagactataagcctttgtttagtcgtctcaaagagaattatatatttaccggtcccgttccaataggtatcaaagatatagatcaccctaatcttagtagagcaagaagtccatccgattatgagacattagctaatattagtactatattgtactttaccaagtatgatccggtattaatgtttttattgttttacgtacctgggtattcaattactacaaaaattactccagccgtagaatatctaatggataaactgaatctaacaaagagcgacgtacaactgttgtaaattattttatgcttcgtaaaatgtaggttttgaaccaaacattctttcaaagaatgagatgcataaaactttattatccaatagattgactatttcggacgtcaatcgtttaaagtaaacttcgtaaaatattctttgatcactgccgagtttaaaacttctatcgataattgtctcatatgttttaatatttacaagttttttggtccatggtacattagccggacaaatatatgcaaaataatatcgttctccaagttctatagtttctggattatttttattatattcagtaaccaaatacatattagggttatctgcggatttataatttgagtgatgcattcgactcaacataaataattctagaggagacgatctactatcaaattcggatcgtaaatctgtttctaaagaacggagaatatctatacatacctgattagaattcatccgtccttcagacaacatctcagacagtctggttttgtacatcttaatcatattcttatgaaacttggaaacatctcttctagtttcactagtacctttattaattctctcaggtacagattttgaattcgacgatgccgagtatttcatcgttgtatatttcttcttcgattgcataatcagattcttatataccgcctcaaactctattttaaaattattaaacaatactctactattaatcagtcgttctaactctttcgctatttctatagacttatctacatcttgactgtctatctctgtaaacacggagtcggtatctccatacacgctacgaaaacgaaatctgtaatctataggcaacgatgttttcacaatcggattaatatctctatcgtccatataaaatggattacttaatggattggcaaaccgtaacataccgttagataactctgctccatttagtaccgattctagatacaagatcattctacgtcctatggatgtgcaactcttagccgaagcgtatgagtatagagcactatttctaaatcccatcagaccatatactgagttggctactatcttgtacgtatattgcatggaatcataaatggccttttcagttgaactggtagcctgttttaacatctttttatatctggctctctctgccaaaaatgttcttaatagtctaggaatggttccttctatcgatctatcgaaaattgctatttcagagatgaggttcggtagtctaggttcacaatgaaccgtaatatatctaggaggtggatatttctgaagcaatagctgattatttatttcttcttccaatctattggtactaacaacgacaccgactaatgtttccggagatagatttccaaagatacacacattaggatacagactgttataatcaaagattaatacattattactaaacattttttgttttggagcaaataccttaccgccttcataaggaaacttttgttttgtttctgatctaactaagatagttttagtttccaacaatagctttaacagtggacccttgatgactgtactcgctctatattcgaataccatggattgaggaagcacatatgttgacgcacccgcgtctgtttttgtttctactccataatactcccacaaatactgacacaaacaagcatcatgaatacagtatctagccatatctaaagctatgtttagattataatccttatacatctgagctaaatcaacgtcatcctttccgaaagataatttatatgtatcattaggtaaagtaggacataatagtacgactttaaatccattttcccaaatatctttacgaattactttacatataatatcctcatcaacagtcacataattacctgtggttaaaacctttgcaaatgcagcggctttgcctttcgcgtccgtagtatcgtcaccgatgaacgtcatttctctaactcctctatttaatactttacccatgcaactgaacgcgttcttggatatagaatccaatttgtacgaatccaatttttcagatttttgaatgaatgaatatagatcgaaaaatatagttccattattgttattaacgtgaaacgtagtattggccatgccgcctactcccttatgactagactgatttctctcataaatacagagatgtacagcttcctttttgtccggagatctaaagataatcttctctcctgttaataactctagacgattagtaatatatctcagatcaaagttatgtccgttaaaggtaacgacgtagtcgaacgttagttccaacaattgtttagctattcgtaacaaaactatttcagaacatagaactagttctcgttcgtaatccatttccattagtgactgtatcctcaaacatcctctatcgacggcttcttgtatttcctgttccgttaacatctcttcattaatgagcgtaaacaataatcgtttaccacttaaatcgatataacagtaacttgtatgcgagattgggttaataaatacagaaggaaacttcttatcgaagtgacactctatatctagaaataagtacgatcttgggatatcgaatctaggtatttttttagcgaaacagttacgtggatcgtcacaatgataacatccattgttaatctttgtcaaatattgctcgtccaacgagtaacatccgtctggagatatcccgttagaaatataaaaccaactaatattgagaaattcatccatggtggcattttgtatgctgcgtttctttggctcttctatcaaccacatatctgcgacggagcattttctatctttaatatctagattataacttattgtctcgtcaatgtctatagttctcatctttcccaacggcctcgcattaaatggaggaggagacaatgactgatatatttcgtccgtcactacgtaataaaagtaatgaggaaatcgtataaatacggtctcaccatttcgacatctggatttcagatataaaaatctgttttcaccgtgactttcaaaccaattaatgcaccgaacatccatttatagaatttagaaatatattttcatttaaatgaatcccaaacattggggaagagccgtatggaccattatttttatagtactttcgcaagcgggtttagacggcaacatagaagcgtgtaaacgaaaactatatactatagtcagcactcttccatgtcctgcatgtagacggcacgcgactatcgctatagaggacaataatgtcatgtctagcgatgatctgaattatatttattattttttcatcagattatttaacaatttggcatctgatcccaaatacgcgatcgatgtgacaaaggttaaccctttataaacttaacccattataaaacttatgattagtcacaactgaaataaccgcgtgattattttttggtataattctacacggcatggtttctgtaactatgaattcaacccccgttacattagtgaaatctttaacaaacagcaagggttcgtcaaagacataaaactcattgtttacaatcgaaatagaccccctatcacacttaaaataaaaaatatccttatcctttaccaccaaataaaattctgattggtcaatgtgaatgtattcacttaacagttccacaaatttatttattaactccgaggcacatacatcgtcggtattttttatggcaaactttactcttccagcatccgtttctaaaaaaatattaacgagttccatttatatcatccaatattattgaaatgacgttgatggacagatgatacaaataagaaggtacggtacctttgtccaccatctcctccaattcatgctctattttgtcattaactttaatgtatgaaaacagtacgccacatgcttccatgacagtgtgtaacactttggatacaaaatgtttgacattagtataattgttcaagactgtcaatctataatagatagtagctataatatattctatgatggtattgaagaagatgacaaccttggcatattgatcatttaacacagacatggtatcaacagatagcttgaatgaaagagaatcagtaattggaataagcgtcttctcgatagagtgtccgtataccaacatgtctgatattttgatgtattccattaaattatttagttttttctttttattttcgttaaacagcatttctgtcaacggaccccaacatcgttgaccgattaagttttgattgatttttccgtgtaatgcgtatctagtcagatcgtatagcctatccaataatccatcatctgtgcgtagatcacatcgtacactttttaattctctatagaagagcgacagacatctggagcaattacagacagcaatttctttattctctacagatgtaagatacttgaagacattcctatgatgatgcagaattttggataacacggtattgatggtatctgttaccataattcctttgatggctgatagtgtcagagcacaagatttccaatctttgacaatttttagcaccattatctttgttttgatatctatatcagacagcatggtgcgtctgacaacacagggattaagacggaaagatgaaatgattctctcaacatcttcaatggataccttgctattttttctggcattatctatatgtgcgagaatatcctctagagaatcagtatcctttttgatgatagtggatctcaatgacatgggacgtctaaaccttcttattttatcaccagattgcatggtgatttgtcttctttcttttatcataatgtaatctctaaattcatcggcaaattgtctatatctaaaatcataatatgagatgtttacctctacaaatatctgttcgtccaatgttagagtatctacatcagttttgtattccaaattaaacatggcaacggatttaattttatattcctctattaagtcctcgtcgataataacagaatgtagataatcatttaatccatcgtacatggttggaagatgcttgttgacaaaatctttaattgtcttgatgaaggtgggactatatctaacatcttgattaataaaatttataacattgtccataggatactttgtaactagttttatacacatctcttcatcggtaagtttagacagaatatcgtgaacaggtggtatattatattcatcagatatacgaagaacaatgtccaaatctatattgtttaatatattatatagatgtagcgtagctcctacaggaatatctttaactaagtcaatgatttcatcaaccgttagatctattttaaagttaatcatataggcattgatttttaaaaggtatgtagccttgactacattctcattaattaaccattccaagtcactgtgtgtaagaagattatattctatcataagcttgactacatttggtcccgataccattaaagaattcttatgatataaggaaacagcttttaggtactcatctactctacaagaattttggagagccttaacgatatcagtgacgtttattatttcaggaggaaaaaacctaacattgagaatgtcggagttaatagcttccagatacagtgattttggcaatagtccgtgtaatccataatccagtaacacgagctggtgcttgctagacaccttttcaatgtttaatttttttgaaataagctttgataaagccttcctcgcaaattccggatacatgaacatgtcggcgacatgattaagtattgttttttcattatttttatattttctcaacaagttctcaataccccaatagatgatagaatatcacccaatgcgtccatgttgtctatttccaacaggtcgctatatccaccaatagaagtttttccaaaaaagattctaggaacagttctaccaccagtaatttgttcaaaatagtcacgcaattcattttcgggtttaaattctttaatatcgacaatttcatacgctcctcttttgaaactaaacttatttagaatatccagtgcatttctacaaaaaggacatgtatacttgacaaaaattgtcactttgttattggccaacctttgttgtacaaattcctcggccattttaatatttaagtgatataaaactatctcgacttatttaactctttagtcgagatatatggacgcagatagctatatgatagccaactacagaaggcaaacgctataaaaaacataattacgacgagcatatttataaatatttttattcagcattacttgatatagtaatattaggcacagtcaaacattcaaccactctcgatacattaactctctcattttctttaacaaattctgcaatatcttcgtaaaaagattcttgaaactttttagaatatctatcgactctagatgaaatagcgttcgtcaacatactatgttttgtatacataaaggcgcccattttaacagtttctagtgacaaaatgctagcgatcctaggatcctttagaatcacatagattgacgattcgtctctcttagtaactctagtaaaataatcatacaatctagtacgcgaaataatattatccttgacttgaggagatctaaacaatctagttttgagaacatcgataagttcatcgggaatgacatacatactatctttaatagaactcttttcatccagttgaatggattcgtccttaaccaactgattaatgagatcttctattttatcattttccagatgatatgtatgtccattaaagttaaattgtgtagcgcttctttttagtctagcagccaatactttaacatcactaatatcgatatacaaaggagatgatttatctatggtattaagaattcgtttttcgacatctgtcaaaaccaattcctttttgcctgtatcatccagttttccatcctttgtaaagaaattattttctactagactattaataagactgataaggattcctccataattgcacaatccaaactttttaacaaaactagactttacaagatctacaggaatgcgtacttcaggtttcttagcttgtgattttttcttttgtggacattttcttgtgaccaactcatctaccatttcattgattttagcagtgaaataagctttcaatgcacgggcactgatactattgaaaacgagttgatcttcaaattccgccatttaagttcaccaaacaacttttaaatacaaatatatcaatagtagtagaataagaactataaaaaaaataataattaaccaataccaaccccaacaaccggtattattagttgatgtgactgttttctcatcacttagaacagatttaacaatttctataaagtctgtcaaatcatcttccggagaccccataaatacaccaaatatagcggcgtacaacttatccatttatacattgaatattggcttttctttatcgctatcttcatcatattcatcatcaatatcaacaagtcccagattacgagccagatcttcttctacattttcagtcattgatacacgttcactatctccagagagtccgataacgttagccaccacttctctatcaatgattagtttcttgagtgcgaatgtaatttttgtttccgttccggatctatagaaaactacaggtgtgataattgccttggccaattgtctttctcttttactgagtgattctagttcaccttctatagatctgagaatggatgattctccagtcgaaacatattctaccatggatccgtttaatttgttgatgaagatggattcatccttaaatgttttctctgtaatagtttccaccgaaagactatgcaaagaatttggaatgcgttccttgtgcttaatgtttccatagacggcttctagaagttgatacaacataggactagccgcggtaacttttatttttagaaagtatccatcgcttctatcttgtttagatttatttttataaagtttagtctctccttccaacataataaaagtggaagtcatttgactagataaactatcagtaagttttatagagatagacgaacaattagcgtattgagaagcatttagtgtaacgtattcgatacattttgcattagatttactaatcgattttgcatactctataacacccgcacaagtctgtagagaatcgctagatgcagtaggtcttggtgaagtttcaactctcttcttgattaccttactcatgattaaacctaaataattgtactttgtaatataatgatatatattttcactttatctcatttgagaataaaaatgtttttgtttaaccactgcatgatgtacagatttcggaatcgcaaaccaccagtggttttattttatccttgtccaatgtgaattgaatgggagcggatgcgggtttcgtacgtagatagtacattcccgtttttagaccgagactccatccgtaaaaatgcatactcgttagtttggaataactcggatctgctatatggatattcatagattgactttgatcgatgaaggctcccctgtctgcagccatttttatgatcgtcttttgtggaatttcccaaatagttttataaactcgcttaatatcttctggaaggtttgtattctgaatggatccaccatctgccataatcctattcttgatctcatcattccataattttctctcggttaaaactctaaggagatgcggattaactacttgaaattctccagacaatactctccgagtgtaaatattactggtatacggttccaccgactcattatttcccaaaatttgagcagttgatgcagtcggcataggtgccaccaataaactatttctaagaccgtatgttctgattttatcttttagaggttcccaattccaaagatccgacggtacaacattccaaagatcatattgtagaataccgttactggcgtacgatcctacatatgtatcgtatggtccttccttctcagctagttcacaactcgcctctaatgcaccgtaataaatggtttcgaagatcttcttatttagatcttgtgcttccaggctatcaaatggataatttaagagaataaacgcgtccgctaatccttgaacaccaataccgataggtctatgtctcttattagagatttcagcttctggaataggataataattaatatctataattttattgagatttctgacaattactttgaccacatccttcagtttgagaaaatcaaatcgcccatctattacaaacatgttcaaggcaacagatgccagattacaaacggctacctcattagcatccgcatattgtattatctcagtgcaaagattactacacttgatagttcctaaattttgttgattactctttttgttacacgcatccttataaagaatgaatggagtaccagtttcaatctgagattctataatcgctttccagacgactcgagcctttattatagatttgtatctcctttctctttcgtatagtgtatacaatcgttcgaactcgtctccccaaacattgtccaatccaggacattcatccggacacatcaacgaccactctccgtcatccttcactcgtttcataaagagatcaggaatccaaagagctataaatagatctctggttctatgttcctcgtttcctgtattctttttaagatcgaggaacgccataatatcagaatgccacggttccaagtatatggccataactccaggccgtttgtttcctccctgatctatgtatctagcggtgttattataaactctcaacattggaataataccgtttgatataccattggtaccggagatatagcttccactggcacgaatattactaattgatagacctattccccctgccattttagagattaatgcgcatcgttttaacgtgtcatagataccctctatgctatcatcgatcatgttaagtagaaaacagctagacatttggtgacgactagttcccgcattaaataaggtaggagaagcgtgcgtaaaccatttttcagaaagtagattgtacgtctcaatagctgagtctatatcccattgatgaattcctactgcgacacgcattaacatgtgctgaggtctttcaacgatcttgttgtttattttcaacaagtaggatttttccaaagttttaaaaccaaaatagttgtatgaaaagtctcgttcgtaaataataaccgagttgagtttatccttatatttgttaactatatccatggtgatacttgaaataatcggagaatgtttcccatttttaggattaacatagttgaataaatcctccatcacttcactaaatagtttttttgtttccttgtgtagatttgatacggctattctggcggctagaatggcataatccggatgttgtgtagtacaagtggctgctatttcggctgccagagtgtccaattctaccgttgttactccattatatattccttgaataaccttcatagctattttaataggatctatatgatccgtgtttaagccataacataattttctaatacgagacgtgattttatcaaacatgacattttccttgtatccatttcgtttaatgacaaacatttttgttggtgtaataaaaaaattatttaacttttcattaatagggatttgacgtatgtagcgtacaaaattatcgttcctggtatatagataaagagtcctatatatttgaaaatcgttacggctcgattaaactttaatgattgcatagtgaatatatcattaggatttaactccttgactatcagggcggcaccagaaattaccatcaaaagcattaatacagttatgccgatcgcagttagaacggttatagcatccaccatttatatctaaaaattagatcaaagaatatgtgacaaagtcctagttgtatactgagaattgacgaaacaatgtttcttacatatttttttcttattagtaactgacttaatagtaggaactggaaagctagacttgattattctataagtatagatacccttccaaataatattctctttgataaaagttccagaaaatgtagaattttttaaaaagttatcttttgctattaccaagattgtgtttagacgcttattattaatatgagtgatgaaatccacaccgcctctagatatcgcttttatttccacattagatggtaaatccaatagtgaaactatctttttaggaatgtatggactcgcgtttagaggagtgaacgtcttaggcgtcggaaaggatgattcatcaaacgaataaacaatttcacaaatggatgttaatgtattagtaggaaattttttgacgctagtggaattgaagattctaatggatgatgttctacctatttcatccgataacatgttaatttccgacaccaacggttttaatatttcgatgatatacggtagtctctctttcggacttatatagcttattccacaatacgagtcattatatactccaaaaaacaaaataactagtataaaatctgtatcgaatgggaaaaacgaaattatcgacataggtatagaatctggaacattgaacgtattaatacttaattctttttctgtggtaagtaccgataggttattgacattgtatggttttaaatattctataacttgagacttgatagatattagtgatgaattgaaaattatttttatcaccacgtgtgtttcaggatcatcgtcgacgcccgtcaaccaaccgaatggagtaaaataaatatcattaatatatgctctagatattagtatttttatcaatcctttgattatcatcttctcgtaggcgaatgattccatgatcaagagtgatttaagaacatcctccggagtattaatgggcttagtaaacagtccatcgttgcaataataaaagttatccaagttaaaggatattatgcattcgtttaaagatatcacctcatctgacggagacaattttttggtaggttttagagactttgaagctacttgtttaacaaagttattcatcgtcgtttactattctatttaattttgtagttaatttatcacatatcacattaattgactttttggtccatttttccatacgtttatattcttttaatcctgcgttatccgtttccgttatatccagggatagatcttgcaagttaaatagaatgctcttaaataatgtcatttttttatccgctaaaaatttaaagaatgtataaacttttttcaaagatttaaaacttttaggtggagttctagtacacaatatcataaacaaactaataaacatcccgcattcagattccaacagctgattaacttccacattaatacagcctattttcgctccaaatgtacattcgaaaaatctgaataaaacatcgatgtcacaatttgtattatccaatacagaatgtctgtgattcgtgttaaaaccatcggagaaggaatagaaataaaaattattatagtggtggaattcagttggaatattgcctccggagtcataaaaggatactaaacattgttttttatcataaattacacatttccaatgagacaaataacaaaatccaaacattacaaatctagaggtagaacttttaattttgtctttaagtatatacgataagatatgtttattcataaacgcgtcaaatttttcatgaatcgctaaggagtttaagaatctcatgtcaaattgtcctatataatccacttcggatccataagcaaactgagagactaagttcttaatacttcgattgctcatccaggctcctctctcaggctctattttcatcttgacgacctttggattttcaccagtatgtattcctttacgtgataaatcatcgattttcaaatccatttgtgagaagtctatcgccttagatactttttcccgtagtcgaggtttaaagaaatacgctaacggtatactagtaggtaactcaaagacatcatatatagaatggtaacgcgtctttaactcgtcggttaactctttcttttgatcgagttcgtcgctactattgggtctgctcaggtgccccgactctactagttccaacatcataccgataggaatacaagacactttgccagcggttgtagatttatcatatttctccactacatatccgttacaatttgttaaaaatttagatacatctatattgctacataatccagctagtgaatatatatgacataataaattggtaaatcctagttctggtattttactaattactaaatctgtatatctttccatttatcatggaaaagaatttaccagatatcttcttttttccaaactgcgttaatgtattctcttacaaatattcacaagatgaattcagtaatatgagtaaaacggaacgtgatagtttctcattggcggtgtttccagttataaaacatagatggcataacgcacacgttgtaaaacataaaggaatatacaaagttagtacagaagcacgtggaaaaaaagtatctcctccatcactaggaaaacccgcacacataaacctaaccgcgaagcaatatatatacagtgaacacacaataagctttgaatgttatagttttctaaaatgtataacaaatacagaaatcaattcgttcgatgagtatatattaagaggactattagaagctggtaatagtttacagatattttccaattccgtaggtaaacgaacagatactataggtgtactagggaataagtatccatttagcaaaattccattggcctcattaactcctaaagcacaacgagagatattttcagcgtggatttctcatagacctgtagttttaactggaggaactggagtgggtaagacgtcacaggtacccaagttattgctttggtttaattatttatttggtggattctctactctagataaaatcactgactttcacgaaagaccagtcattctatctcttcctaggatagctttagttagattgcatagcaataccattttaaaatcattgggatttaaggtactagatggatctcctatttctttacggtacggatctataccggaagaattaataaacaaacaaccaaaaaaatatggaattgtattttctacccataagttatctctaacaaaactatttagttatggcactcttattatagacgaagttcatgagcatgatcaaataggagatattattatagcagtagcgagaaagcatcatacgaaaatagattctatgtttttaatgactgccacgttagaggatgacagggaacggctaaaagtatttttacctaatcccgcatttatacatattcctggagatacactgtttaaaattagcgaggtatttattcataataagataaatccatcttccagaatggcatacatagaagaagaaaagagaaatttagttactgctatacagatgtatactcctcctgatggatcatccggtatagtctttgtggcatccgttgcacagtgtcacgaatataaatcatatttagaaaaaagattaccgtatgatatgtatattattcatggtaaggtcttagatatagacgaaatattagaaaaagtgtattcatcacctaatgtatcgataattatttctactccttatttggaatccagcgttactatacacaatgttacacacatttatgatatgggtagagtttttgtccccgctccttttggaggatcgcaacaatttatttctaaatctatgagagatcaacgaaaaggaagagtaggaagagttaatcctggtacatacgtctatttctatgatctgtcttatatgaagtctatacagcgaatagattcagaatttctacataattatatattgtacgctaataagtttaatctaacactccccgaagatttgtttataatccctacaaatttggatattctatggcgtacaaaggaatatatagactcgttcgatattagtacagaaacatggaataaattattatccaattattatatgaagatgatagagtatgctaaactttatgtactaagtcctattctcgctgaggagttggataactttgagaggacgggagaattaactagtattgtacgagaagccattttatctctaaatttacgaattaagattttaaattttaaacataaagatgatgatacgtatatacacttttgtaaaatattattcggtgtctataacggaacaaacgctactatatattatcatagacctctaacgggatatatgaatatgatttcagatactatatttgttcctgtagataataactaaaaatcaaactctaatgaccacatctttttttagagatgaaaaattttctacatctccttttgtagacacgactaaacattttgcagaaaaaagtttattagtgtttagataatcgtatacttcatcagtgtagatagtaaatgtgaacagataaaaggtattcttgctcaatagattggtaaattccatagaatatattaatcctttcttcttgagatcccacatcatttcaaccagagacgttttatccaatgatttacctcgtactataccacatacaaaactagattttgcagtgacgtcgtacctggtattcctaccaaacaaaattttacttttagttcttttagaaaattctaaggtagaatctctatttgccaatatgtcatctatggaattaccactagcaaaaaatgatagaaatatatattgatacatcgcagctggttttgatctactatactttaaaaacgaatcagattccataattgcctgtatatcatcagctgaaaaactatgttttacacgtattccttcggcatttctttttaatgatatatcttgtttagacaatgataaagttatcatgtccatgagagacgcgtctccgtatcgtataaatatttcattagatgttagacgcttcattaggggtatacttctataaggtttcttaatcagtccatcattggttgcgtcaagaactactatcggatgttgttgggtatctctagtgttacacatggccttactaaagtttgggtaaataactatgatatctctattaattatagatgcatatatttcattcgtcaaggatattagtatcgacttgctatcgtcattaatacgtgtaatgtaatcatataaatcatgcgatagccaaggaaaatttaaatagatgttcatcatataatcgtcgctataattcatattaatacgttgacattgactaatttgtaatatagcctcgccacgaagaaagctctcgtattcagtttcatcgataaaggataccgttaaatataactggttgccgatagtctcatagtctattaagtggtaagtttcgtacaaatacagaatccctaaaatattatctaatgttggattaatctttaccataactgtataaaatggagacggagtcataactattttaccgtttgtacttactggaatagatgaaggaataatctccggacatgctggtaaagacccaaatgtctgtttgaagaaatccaatgttccaggtcctaatctcttaacaaaaattacgatattcgatcccgatatcctttgcattctatttaccagcatatcacgaactatattaagattatctatcatgtctattctcccaccgttatataaatcgcctccgctaagaaacgttagtatatccatacaatggaatacttcatttctaaaatagtattcgttttctaattctttaatgtgaaatcgtatactagaaagggaaaaattatctttgagttttccgttagaaaagaaccacgaaactaatgttctgattgcgtccgattccgttgctgaattaatggatttacaccaaaaactcatataacttctagatgtagaagcattcgctaaaaaattagtagaatcaaaggatataagtagatgttccaacaagtgagcaattcccaagatttcatctatatcattctcgaatccgaaattagaaattcccaagtagatatcctttttcatccgatcgttgatgaaaatacgaactttattcggtaagacaatcatttactaaggagtaaaataggaagtaatgttcgtatgtcgttatcatcgtataaattaaaggtgtgttttttaccattaagtgacattataattttaccaatattggaattataatataggtgtatttgcgcactcgcgacggttgatgcatcggtaaatatagctgtatctaatgttctagtcggtatttcatcatttcgctgtctaataatagcgttttctctatctgtttccattacagctgcctgaagtttattggtcggataatatgtaaaataataagaaatacatacgaataacaaaaataaaataagatataataaagatgccatttagagatctaattttgttcaacttgtccaaattcctacttacagaagatgaggaatcgttggagatagtgtcttccttatgtagaggatttgaaatatcttatgatgacttgataacttactttccagataggaaataccataaatatatttataaagtatttgaacatgtagatttatcggaggaattaagtatggaattccatgatacaactttgcgagatttagtttatcttagattgtacaagtattccaagtgtatacggccgtgttataaattaggagataatctaaaaggcatagttgttataaaggacaggaatatttatattagggaagcaaatgatgacttgatagaatatctcctcaaggaatacactcctcagatttatacatattctaatgagcgcgtccccataactggttcaaaattaattctttgtggattttctcaagttacatttatggcgtatacaacgtcgcatataacaacaaataaaaaggtagatgttctcgtttccaaaaaatgtatagatgaactagtcgatccaataaattatcaaatacttcaaaatttatttgataaaggaagcggaacaataaacaaaatactcaggaagatattttattcggtaaccggtggccaaactccataggtagctttttctatttcggattttagaatttccaaattcaccagcgatttatcggttttggtgaaatccaaggatttattaatgtccacaaatgccatttgttttgtctgtggattgtatttgaaaatggaaacgatgtagttagatagatgcgctgcgaagtttcctattagggttccgcgcttcacgtcacccagcatacttgaatcaccatcctttaaaaaaaatgataagatatcaacatggagtatatcatactcggattttaattcttctactgcatcactgacattttcacaaatactacaatacggtttaccgaaaataatcagtacgttcttcatttatgggtatcaaaaacttaaaatcgttactgctggaaaataaatcactgacgatattagatgataatttatacaaagtatacaatggaatatttgtggatacaatgagtatttatatagccgtcgccaattgtgtcagaaacttagaagagttaactacggtattcataaaatacgtaaacggatgggtaaaaaagggagggcatgtaaccctttttatcgatagaggaagtataaaaattaaacaagacgttagagacaagagacgtaaatattctaaattaaccaaggacagaaaaatgctagaattagaaaagtgtacatccgaaatacaaaatgttaccggatttatggaagaagaaataaaggcaaaaatgcaattaaaaatcgataaacttacatttcaaatatatttatctgattctgataacataaaaatatcattgaatgagatactaacacatttcaacaataatgagaatgttacattattttattgtgatgaacgagacgcagaattcgttatgtgtctcgaggctaaaacacatttctctaccacaggagaatggccgttgataataagtaccgatcaggatactatgctatttgcatctactgataatcatcctaagatgataaaaaacttaactcaactgtttaaatttgttccctcggcagaggataactatttagcaaaattaacggcgttagtgaatggatgtgatttctttcctggactctatggggcatctataacacccaccaacttaaacaaaatacaattgtttagtgattttacaatcgataatatagtcactagtttggcaattaaaaattattatagaaagactaactctaccgtagacgtgcgtaatattgttacgtttataaacgattacgctaatttagacgatgtctactcgtatgttcctccttgtcaatgcactgttcaagaatttatattttccgcattagatgaaaaatggaatgaatttaaatcatcttatttagagaccgttccgttaccctgtcaattaatgtacgcgttagaaccacgtaaggagattgatgtttcagaagttaaaactttatcatcttatatagatttcgaaaatactaaatcagatatcgatgttataaaatctatatcctcgatttttggatattctaacgaaaactgtaacacgatagtattcggcatctataaggataatttactactgagtataaataattcattttactttaacgatagtctgttaataaccaatactaaaagtgataatataataaatataggttactagattaaaaatggtgttccaactcgtgtgctctacatgcggtaaagatatttctcacgaacgatataaattgattatacgaaaaaaatcattaaaggatgtactcgtcagtgtaaagaacgaatgttgtaggttaaaattatctacacaaatagaacctcaacgtaacttaacagtgcaacctctattggatataaactaatatggatccggttaattttatcaagacatatgcgcctagaggttctattatttttattaattataccatgtcattaacaagtcatttgaatccatcgatagaaaaacatgtgggtatttattatggtacgttattatcggaacacttggtagttgaatctacctatagaaaaggagttcgaatagtcccattggatagtttttttgaaggatatcttagtgcaaaagtatacatgttagagaatattcaagttatgaaaatagcagctgatacgtcattaactttattgggtattccgtatggatttggtcatgatagaatgtattgttttaaattggtagctgactgttataaaaatgccggtgttgaaacatcgtctaaacgaatattaggtaaagatatttttctgagccaaaacttcacagacgataatagatggataaagatatatgattctaataatttaacattttggcaaattgattaccttaaagggtgagttaatatgcataactactcctccgttgttttttccctcgttctttttcttaacgttgtttgccatcactctcataatgtaaagatattctaaaatggtaaacttttgcatatcggacgcagaaattggtataaatgttgtaattgtattatttcccgtcaatggactagtcacagctccatcagttttatatcctttagagtatttctcactcgtgtctaacattctagagcattccatgatctgtttatcgttgatattggccggaaagatagattttttattttttattatattactattggcaattgtagatataacttctggtaaatatttttctaccttttcaatctcttctattttcaagccggctatatattctgctatattgttgctagtatcaataccttttcttgctaagaagtcatatgtggtattcactatatcagttttaactggtagttccattagcctttccacttctgcagaataatcagaaattggttctttaccagaaaatccagctactataataggctcaccgatgatcattggcaaaatcctatattgtaccagattaatgagagcatatttcatttccaataattctgctagttcttgagacattgatttatttgatgaatctagttggttctctagatactctaccatttctgccgcatacaataacttgttagataaaatcagggttatcaaagtgtttagcgtggctagaatagtgggcttgcatgtattaaagaatgcggtagtatgagtaaaccgttttaacgaattatatagtctccagaaatctgtggcgttacatacatgagccgaatgacatcgaagattgtccaatatttttaatagctgctctttgtccattatttctatatttgactcgcaacaattgtagataccattaatcactgattcctttttcgatgccggacaatagcacaattgtttagctttggactctatgtattcagaattaatagatatatctcttaatacagattgcactatacattttgaaactatgtcaaaaattgtagaacgacgctgttctgcagccatttaactttaaataatttacaaaaatttaaaatgagcatccgtataaaaatcgataaactgcgccaaattgtggcatatttttcagagttcagtgaagaagtgtctataaatgtagactcgacggatgagttaatgtatatttttgccgccttgggcggatctgtaaacatttgggccattatacctctcagtgcatcagtgttctaccgcggagccgaaaatattgtgtttaatcttccggtgtccaaggtaaaatcgtgtttgtgtagttttcacaatgatgccatcatagatatagaacctgatctggaaaataatctagtaaaactttctagttatcatgtagtaagtgtcgattgtaacaaggaactgatgcctattaggacagatactactatttgtctaagtatagatcaaaagaaatcttacgtgtttaattttcacaagtatgaagaaaaatgttgtggtagaaccgtcattcatttagaatggttgttgggctttatcaagtgtattagtcagcatcagcatttggctattatgtttaaagatgacaatattattatgaagactcctggtaatactgatgcgttttccagggaatattctatgactgaatgttctcaagaactacaaaagttttctttcaaaatagctatctcgtctctcaacaaactacgaggattcaaaaagagagtcaatgtttttgaaactagaatcgtaatggataatgacgataacattctaggaatgttgttttcggatagagttcaatcctttaagatcaacatctttatggcgtttttagattaatactttcaatgagataaatatgggtggcggagtaagtgttgagctccctaaacgggatccgcctccgggagtacccactgatgagatgttattaaacgtggataaaatgcatgacgtgatagctcccgctaagcttttagaatatgtgcatataggaccactagcaaaagataaagaggataaagtaaagaaaagatatccagagtttagattagtcaacacaggacccggtggtctttcggcattgttaagacaatcgtataatggaaccgcacccaattgctgtcgcacttttaatcgtactcattattggaagaaggatggaaagatatcagataagtatgaagagggtgcagtattagaatcgtgttggccagacgttcacgacactggaaaatgcgatgttgatttattcgactggtgtcagggggatacgttcgatagaaacatatgccatcagtggatcggttcagcctttaataggagtgatagaactgtagagggtcaacaatcgttaataaatctgtataataagatgcaaacattatgtagtaaagatgctagtgtaccaatatgtgaatcatttttgcatcatttacgcgcacacaatacagaagatagcaaagagatgatcgattatattctaagacaacagtctgcggactttaaacagaaatatatgagatgtagttatcccactagagataagttagaagagtcattaaaatatgcggaacctcgagaatgttgggatccagagtgttcgaatgccaatgttaatttcttactaacacgtaattataataatttaggactttgcaatattgtacgatgtaatactagcgtgaacaacttacagatggataaaacttcctcattaagattgtcatgtggattaagcaatagtgatagattttctactgttcccgtcaatagagcaaaagtagttcaacataatattaaacattcgttcgacctaaaattgcatttgatcagtttattatctctcttggtaatatggatactaattgtagctatttaaatgggtgccgcggcaagcatacagacgacggtgaatacactcagcgaacgtatctcgtctaaattagaacaagaagcgaacgctagtgctcaaacaaaatgtgatatagaaatcggaaatttttatatccgacaaaaccatggatgtaacctcactgttaaaaatatgtgctctgcggacgcggatgctcagttggatgctgtgttatcagccgctacagaaacatatagtggattaacaccggaacaaaaagcatacgtgccagctatgtttactgctgcgttaaacattcagacaagtgtaaacactgttgttagagattttgaaaattatgtgaaacagacttgtaattctagcgcggtcgtcgataacaaattaaagatacaaaacgtaatcatagatgaatgttacggagccccaggatctccaacaaatttggaatttattaatacaggatctagcaaaggaaattgtgccattaaagcgttgatgcaattgacgactaaggccactactcaaatagcacctagacaagttgctggtacaggagttcagttttatatgattgttatcggtgttataatattggcagcgttgtttatgtactatgccaagcgtatgctgttcacatccaccaatgataaaatcaaacttattttagccaataaggaaaacgtccattggactacttacatggacacattctttagaacttctccgatggttattgctaccacggatatacaaaactgaaaatatattgataatattttaatagattaacatggaagttatcgctgatcgtctagacgatatagtgaaacaaaatatagcggatgaaaaatttgtagattttgttatacacggtctagagcatcaatgtcctgctatacttcgaccattaattaggttgtttattgatatactattatttgttatagtaatttatatttttacggtacgtctagtaagtagaaattatcaaatgttgttggtggcgctagtcatcacattaactattttttattactttatactataatagtactagactgacttctaacaaacatctcacctgccataaataaatgcttgatattaaagtcttctatttctaacactattccatctgtggaaaataatactctgacattatcgctaattgacacatcggtgagtgatatgcctataaagtaataatcttctttgggcacatataccagtgtaccaggttctaacaacctatttactggtgctcctgtagcatactttttctttaccttgagaatatccatcgtttgcttggtcaatagcgatatgtgattttttatcaaccactcgaaaaagtaattggagtgttcatatcctctacgggctattgtctcatggccgtgtatgaaatttaagtaacacgactgtggtagatttgttctatagagccggttgccgcaaatagatagaactaccaatatgtctgtacaaatgttaaacattaattgattaacagaaaaaacaatgttcgttctgggaatagaaaccagatcaaaacaaaattcgttagaatatatgccacgtttatacattgaatataaaataactacagtttgaaaaataacagtatcatttaaacatttaacttgcggggttaatctcacaactttactgtttttaaactgttcaaaatatagcatcgatccatgagaaatacgtttagccgcctttaatagaggaaatcccaccgcctttctggatctcaccaacgacgatagttctgaccagcaactcatttcttcatcatccacctgttttaacatataataggcaggagatagatatccgtcattgcaatattccttctcgtaggcacacaatctaatattgataaaatctccattctcttctctgcatttattatcttgtttcggtggctgattaggctgtagtcttggtttaggctttggtatatcgttgttgaatctattttggtcattaaatctttcatttcttcctggtatatttttatcacctcgtttggttggatttttgtctatattatcgtttgtaacatcggtacgggtattcatttatcacaaaaaaaacttctctaaatgagtctactgctagaaaacctcatcgaagaagataccatattttttgcaggaagtatatctgagtatgatgatttacaaatggttattgccggcgcaaaatccaaatttccaagatctatgctttctatttttaatatagtacctagaacgatgtcaaaatatgagttggagttgattcataacgaaaatatcacaggagcaatgtttaccacaatgtataatataagaaacaatttgggtctaggagatgataaactaactattgaagccattgaaaactatttcttggatcctaacaatgaagttatgcctcttattattaataatacggatatgactgccgtcattcctaaaaaaagtggtaggagaaagaataagaacatggttattttccgtcaaggatcatcacctatcttgtgtattttcgaaactcgtaaaaagattaatatttataaagaaaatatggaatccgcatcgactgagtatacacctatcggagacaacaaggctttgatatctaaatatgcgggaattaatatcctaaatgtgtattctccttccacatccataagattgaatgccatttacggattcaccaataaaaataaactagagaaacttagtactaataaggaactagaatcgtatagttctagccctcttcaagaacccattaggttaaatgattttctgggactattggaatgtgttaaaaagaatattcctctaacagatattccgacaaaggattgattactataaatggagaatgttcctaatgtatactttaatcctgtgtttatagagcccacgtttaaacattctttattaagtgtttataaacacagattaatagttttatttgaagtattcgttgtattcattctaatatatgtattttttagatctgaattaaatatgttcttcatgcctaaacgaaaaatacccgatcctattgatagattacgacgtgctaatctagcgtgtgaagacgataaattaatgatctatggattaccatggatgacaactcaaacatctgcgttatcaataaatagtaaaccgatagtgtataaagattgtgcaaagcttttgcgatcaataaatggatcacaaccagtatctcttaacgatgttcttcgcagatgatgattcattttttaagtatttggctagtcaagatgatgaatcttcattatctgatatattgcaaatcactcaatatctagactttctgttattattattgatccaatcaaaaaataaattagaagccgtgggtcattgttatgaatctctttcagaggaatacagacaattgacaaaattcacagactttcaagattttaaaaaactgtttaacaaggtccctattgttacagatggaagggtcaaacttaataaaggatatttgttcgactttgtgattagtttgatgcgattcaaaaaagaatcctctctagctaccaccgcaatagatcctattagatacatagatcctcgtcgcgatatcgcattttctaacgtgatggatatattaaagtcgaataaagtgaacaataattaattctttattgtcatcatgaacggcggacatattcagttgataatcggccccatgttttcaggtaaaagtacagaattaattagacgagttggtaccaaaaattgaaaaactagcgtctttttttgctcgactgcagaccatggggtcctctaagagcaagccaaaggacccgtcacagcgcggagttcaggtggagactatatcccctggcgatggtcggacttttcccaagcgagggcagacttgcgttgtacactatacagggatgcttgaggatggcaagaaggtcgactcttctagggatcgaaacaagccgtttaaatttatgctgggcaagcaggaggtgatccgagggtgggaggagggagtcgcacagatgtctgtcgggcagcgagcaaagctcaccataagtccagattatgcctatggtgccacgggccatccgggcatcattccaccacacgccactttggttttcgatgtagagctgttgaagctcgaaggtgtccaggtcgagactatctccccaggagacggtagaacatttcctaaacgaggacagacctgcgttgtgcactacacggggatgttggaggatggaaagaaagttgattcaagtcgagaccgcaacaagccctttaagtttatgcttgggaaacaagaggttattcgcggctgggaagaaggagtcgcgcagatgtccgtagggcagcgggcaaaattgactatttcacctgattacgcttacggggcgaccgggcaccccgggatcataccgccgcacgccaccctggtcttcgatgtcgagcttcttaagcttgaaagcgggagcggtggaggctctggatggctttgtcttctcctgctgcccattcctttgatagtatgggttaagaggaaggaggtgcagaagacttgtagaaagcaccggaaggagaaccaaggatctcacgagtcaccaactcttaacccggaaacagttgcgattaatctgagtgacgtggatctcagcaaatacataacgacaatagcgggtgtgatgaccttgtcccaggttaaaggtttcgtgcgaaagaatggcgtaaacgaggcaaagattgatgagataaaaaacgacaatgttcaagacaccgctgagcaaaaggttcagctcctccgcaactggcatcaactccatggtaagaaggaagcgtacgacacactgataaaggatcttaagaaagcgaacctgtgcacactggctgaaaagatccagacaataatcctgaaagacattacttgattaattaatttttatgagctcggaggtaatgatatgtatcaatcggtgtgtagaaagtgttacatcgactcataatattatattttttatctaaaaaactaaaaataaacattgattaaattttaatataatacttaaaaatggatgttgtgtcgttagataaaccgtttatgtattttgaggaaattgataatgagttagattacgaaccagaaagtgcaaatgaggtcgcaaaaaaactaccgtatcaaggacagttaaaactattactaggagaattattttttcttagtaagttacagcgacacggtatattagatggtgccaccgtagtgtatataggatcggctcctggtacacatatacgttatttgagagatcatttctataatttaggagtgatcatcaaatggatgctaattgacggccgccatcatgatcctattttaaatggattgcgtgatgtgactctagtgactcggttcgttgatgaggaatatctacgatccatcaaaaaacaactgcatccttctaagattattttaatttctgatgtaagatccaaacgaggaggaaatgaacctagtacggcggatttactaagtaattacgctctacaaaatgtcatgattagtattttaaaccccgtggcatctagtcttaaatggagatgcccgtttccagatcaatggatcaaggacttttatatcccacacggtaataaaatgttacaaccttttgctccttcatattcagctgaaatgagattattaagtatttataccggtgagaacatgagactgactcgagttaccaaattagacgctgtaaattatgaaaaaaagatgtactaccttaataagatcgtccgtaacaaagtagttgttaactttgattatcctaatcaggaatatgactattttcacatgtactttatgctgaggaccgtgtactgcaataaaacatttcctactactaaagcaaaggtactatttctacaacaatctatatttcgtttcttaaatattccaacaacatcaactgaaaaagttagtcatgaaccaatacaacgtaaaatatctagcaaaaattctatgtctaaaaacagaaatagcaagagatccgtacgcggtaataaatagaaacgtgctactgagatatactaccgatatagagtataatgatttagttactttaataaccgttagacataaaattgattctatgaaaactgtgtttcaggtatttaacgaatcatccataaattatactccggttgatgatgattatggagaaccaatcattataacatcgtatcttcaaaaaggtcataacaagtttcctgtaaattttctatacatagatgtggtaatatctgacttatttcctagctttgttagactagatactacagaaactaatatagttaatagtgtactacaaacaggcgatggtaaaaagactcttcgtcttcccaaaatgttagagacggaaatagttgtcaagattctctatcgccctaatataccattaaaaattgttagatttttccgcaataacatggtaactggagtagagatagccgatagatctgttatttcagtcgctgattaatcaattagtagagatgagataagaacattataataatcaataatattatcttatatctcgtttagaaaaatgctaatattaaaatagctaacgctagtaatccaatcggaagccatttgatatctataatagggtatctaatttcctgattcagatagcggacagctatattctcggtagctactcgtttggaatcacaaacattatttacatctaatttactatctgtaatggaaacgtttcccaatgaaatggtacaatccgatacattgcattttgttatatttttttttaaagaggctggtaacaacgcatcgcttcgtttacatggctcgtaccaacaataatagggtaatcttgtatctattcctatccgtactatgcttttatcaggataaatacatttacatcgtatatcgtctttgttagcatcacagaatgcataaatttgttcgtccgtcatgataaaaatttaaagtgtaaatataactattatttttatagttgtaataaaaagggaaatttgattgtatactttcggttctttaaaagaaactgacttgataaaaatggctgtaatctctaaggttacgtatagtctatatgatcaaaaagagattaatgctacagatattatcattagtcatgttaaaaatgacgacgatatcggtaccgttaaagatggtagactaggtgctatggatggggcattatgtaaaacttgtgggaaaacggaattggaatgtttcggtcactggggtaaagtaagtatttataaaactcatatagttaagcctgaatttatttcagaaattattcgtttactgaatcatatatgtattcactgcggattattgcgttcacgagaaccgtattccgacgatattaacctaaaagagttatcgggacacgctcttaggagattaaaggataaaatattatccaagaaaaagtcatgttggaacagcgaatgtatgcaaccgtatcaaaaaattactttttcaaagaaaaaggtttgtttcgtcaacaagttggatgatattaacgttcctaattctctcatctatcaaaagttaatttctattcatgaaaagttttggccattattagaaattcatcaatatccagctaacttattttatacagactactttcccatccctccgctgattattagaccggctattagtttttggatagatagtatacccaaagagaccaatgaattaacttacttattaggtatgatcgttaagaattgtaacttgaatgctgatgaacaggttatccagaaggcggtaatagaatacgatgatattaaaattatttctaataacactaccagtatcaatttatcatatattacatccggcaaaaataatatgattagaagttatatcgtcgcccgacgaaaagatcagaccgctagatctgtaattggtcccagtacatctatcaccgttaatgaggtaggaatgcccgcatatattagaaatacacttacagaaaagatatttgttaatgcctttacagtggataaagttaaacaactattagcgtcaaaccaagttaaattttactttaataaacgattaaaccaattaacaagaatacgccaaggaaagtttatcaaaaataaaatacatttattgcctggtgattgggtagaagtagctgttcaagaatatacaagtattatttttggaagacagccgtctctacatagatacaacgtcatcgcttcatctatcagagctaccgaaggagatactatcaaaatatctcccggaattgccaactctcaaaatgctgatttcgacggagatgaagaatggatgatattggagcaaaatcctaaagccgtaattgaacaaagtattcttatgtatccgacgacgttactcaaacacgatattcatggagcccccgtttatggatctattcaagatgaaatcgtagcagcgtattcattgtttaggatacaagatctttgtttagatgaagtattgaacatcttggggaaatatggaagagagttcgatcctaaaggtaaatgtaaattcagcggtaaagatatctatacttacttgataggtgaaaagattaattatccgggtctcttaaaggatggtgaaattattgcaaacgacgtagatagtaattttgttgtggctatgaggcatctgtcattggctggactcttatccgatcataagtcgaacgtggaaggtatcaactttattatcaagtcatcttatgtttttaagagatatctatctatttacggttttggggtgacattcaaagatctgagaccaaattcgacgttcactaataaattggaggccatcaacgtagaaaaaatagaacttatcaaagaagcatacgccaaatatctcaacgatgtaagagacgggaaaatagttccattatctaaagctttagaggcggactatgtggaatccatgttatccaacttgacaaatcttaatatccgagagatagaagaacatatgagacaaacgctgatagatgatccagataataacctcctgaaaatggccaaagcgggttataaagtaaatcctacagaactaatgtatattctaggtacgtatggacaacaaaggattgatggtgaaccagcagagactcgagtattgggtagagtcttaccttactatcttccagactctaaggatccagaaggaagaggttacattcttaattctttaacaaaaggattaacgggttctcaatattacttttcgatgctggttgccagatctcaatctactgatatcgtctgtgaaacatcacgtaccggaacactggctagaaaaatcattaaaaagatggaggatatggtggtcgacggatacggacaagtagttataggtaatacgctcatcaagtacgccgccaattataccaaaattctaggctcagtatgtaaacctgtagatcttatctatccagatgagtccatgacttggtatttggaaattagtgctctgtggaataaaataaaacagggattcgtttactctcagaaacagaaacttgcaaagaagacattggcgccgtttaatttcctagtattcgtcaaacccaccactgaggataatgctattaaggttaaggatctgtacgatatgattcataacgtcattgatgatgtgagagagaaatacttctttacggtatctaatatagattttatggagtatatattcttgacgcatcttaatccttctagaattagaattacaaaagaaacggctatcactatctttgaaaagttctatgaaaaactcaattatactctaggtggtggaactcctattggaattatttctgcacaggtattgtctgagaagtttacacaacaagccctgtccagttttcacactactgaaaaaagtggtgccgtcaaacaaaaacttggtttcaacgagtttaataacttgactaatttgagtaagaataagaccgaaattatcactctggtatccgatgatatctctaaacttcaatctgttaagattaatttcgaatttgtatgtttgggagaattaaatccagacatcactcttcgaaaagaaacagataaatatgtagtagatataatagttaatagattatacatcaagagagcagaaataaccgaattagttgtcgaatatatgattgaacgatttatctcctttagcgtcattgtaaaggaatggggtatggagacattcattgaggacgaggataatattagatttactgtctacctaaatttcgttgaaccggaagaattgaatcttagtaagtttatgatggttcttccgggtgccgccaacaagggcaagattagtaaattcaagattcctatctctgattatacgggttatgacgacttcaatcaaacaaaaaagctcaataagatgactgtagaactcatgaatctaaaagaattgggttctttcgatttggaaaacgtcaacgtgtatcctggagtatggaatacatacgatatcttcggtatcgaggccgctcgtgaatacttgtgcgaagccatgttaaacacctatggagaagggttcgattatctgtatcagccttgtgatcttctcgctagtttactatgtgctagttacgaaccagaatcagttaataaattcaagttcggtgcagctagtactcttaagagagctacgttcggagacaataaagcattgttaaacgcggctcttcataaaaagtcagaacctattaacgataatagtagctgccacttttttagcaaggtccctaatataggaactggatattacaaatactttatcgacttgggtcttctcatgagaatggaaaggaaactatctgataagatatcttctcaaaagatcaaggaaatggaagaaacagaagacttttaattcttatcaataacatatttttctatgatctgtcttttaaacgatggattttccacaaatgcgcctctcaagtccctcatagaatgatacacgtataaaaaatatagcataggcaatgactccttatttttagacattagatatgccaaaatcatagccccgcttctatttactcccgcagcacaatgaaccaacacgggctcgtttcgttgatcacatttagataaaaaggcggttacgtcgtcaaaatatttactaatatcggtagttgtatcatctaccaacggtatatgaataatattaatattagagttaggtaatgtatatttatccatcgtcaaatttaaaacatatttgaacttaacttcagatgatggtgcatccatagcatttttataatttcccaaatacacattattggttacccttgtcattatagtgggagatttggctttgtgcatatctccagttgaacgtagtagtaagtatttatacaaacttttcttatccatttataacgtacaaatggataaaactactttatcggtaaacgcgtgtaatttagaatacgttagagaaaaggctatagtaggcgtacaagcagccaaaacatcaacacttatattctttgttattatattggcaattagtgcgctattactctggtttcagacgtctgataatccagtctttaatgaattaacgagatatatgcgaattaaaaatacggttaacgattggaaatcattaacggatagcaaaacaaaattagaaagtgatagaggtagacttctagccgctggtaaggatgatatattcgacttcaaatgtgtggatttcggcgcctattttatagctatgcgattggataagaaaacatatctgccgcaagctattaggcgaggtactggagacgcgtggatggttaaaaaggcggcaaaggtcgatccatctgctcaacaattttgtcagtatttgataaaacacaagtctaataatgttattacttgtggtaatgagatgttaaatgaattaggttatagcggttattttatgtcaccgcattggtgttccgattttagtaatatggaatagtgttagataaatgcggtaacgaatgttcctgtaaggaaccataacagtttagatttaacgttaaagatgagcataaacataataaacaaaattacaatcaaacctataacattaatatcaaacaatccaaaaaatgaaatcagtggagtagtaaacgcgtacataactcctggataacgtttagcagctgccgttcctattctagaccaaaaattcggtttcatgttttcgaagcggtgttctgcaacaagtcggggatcgtgttctacatatttggcggcgttatccagtatctgcctattgatcttcatttcgttttcgattctggctatttcaaaataaaatcccgatgatagacctccagactttataatttcatctacgatgttcagcgccgtagtaactctaataatataggctgataagctaacatcataccctcctgtatatgtgaatatggcatgatttttgtccattacaagctcggttttaactttattgcctgtaataatttctctcatctgtaggatatctatttttttgtcatgcattgccttcaagacgggacgaagaaacgtaatatcctcaataacgttatcgttttctacaataactacatattctacctttttattttctaactcggtaaaaaaattagaatcccatagggctaaatgtctagcgatatttcttttcgtttcctctgtacacatagtgttacaaaaccctgaaaagaagtgagtatacttgtcatcatttctaatgtttcctccagtccactgtataaacgcataatccttgtaatgatctggatcatccttgactaccacaacatttcttttttctggcataacttcgttgtcctttacatcatcgaacttctgatcattaatatgctcatgaacattaggaaatgtttctgatggaggtctatcaataactggcacaacaataacaggagttttcaccgccgccatttagttattgaaattaatcatatacaactctttaatacgagttatattttcgtctatccattgtttcacatttacatatttcgacaaaaagatataaaatgcgtattccaatgcttctctgtttaatgaattactaaaatatacaaacacgtcactgtctggcaataaatgatatcttagaatattgtaacaatttattttgtattgcacatgttcgtgatctatgagttcttcttcgaatggcataggatctccgaatctgaaaacgtataaataggagttagaataataatatttgagagtattggtaatatataaactctttagcggtataattagtttttttctctcaatttctatttttagatgtgatggaaaaatgactaattttgtagcattagtatcatgaactctaatcaaaatcttaatatcttcgtcacacgttagctctttgaagtttttaagagatgcatcagttggttctacagatggagtaggtgcaacaattttttgttctacacatgtatgtactggagccattgttttaactataatggtgcttgtatcgaaaaactttaatgcagatagcggaagctcttcgccgcgactttctacatcgtaattgggttctaacgccgatctctgaatggatactagttttctaagttctaatgtgattctctgaaaatgtaaatccaattcctccggcattatagatgtgtatacatcggtaaataaaactatagtatccaacgatcccttctcgcaaattctagtcttaaccaaaaaatcgtatataaccacggagatggcgtatttaagagtggattcttctaccgttttgttcttggatgtcatataggaaactataaagtccgcactactgttaagaatgattactaacgcaactatatagttcaaattaagcattttggaaacataaaataactctgtagacgatacttgactttcgaataagtttgcagacaaacgaagaaagaacagacctctcttaatttcagaagaaaactttttttcgtattcctgacgtctagagtttatatcaataagaaagttaagaattagtcggttaatgttgtatttcattacccaagtttgagatttcataatattatcaaaagacatgataatattaaagataaagcgctgactatgaacgaaatagctatatggttcgctcaagaatatagtcttgttaaacgtggaaacgataactgtatttttaatcacgtcagcggcatctaaattaaatataggtatatttattccacacactctacaatatgccacaccatcttcataataaataaattcgttagcaaaattattaattttagtgaaatagttagcgtcaactttcatagcttccttcaatctaatttgatgctcacacggtgcgaattccactctaacatcccttttccatgcctcaggttcatcgatctctataatatctagtttcttgcgtttcacaaacacgggctcgtctctcgcgatgagatctgtatagtaactatgtaaatgataactagatagaaagatgtagctatatagatgacgatcctttaagagaggtataataactttaccccaatcagataaactattgttatggtcttcggaaaaagaatttttataaatttttccagtattttccaaatatacgtacttgacatctaaaaaatccttaatgataataggaatggataatccgtctattttataaagaaatacatatcgcacattatacttttttttggaaatgggaataccgatgtgtctacataaatatgcaaagtctaaatattttttagagaatcttagttggtccaaattcttttccaagtacggtaatagatttttcatattgaacggtatcttcttaatctctggttctagttccgcattaaatgatgaaactaagtcactatttttataactaacgattacatcacctctaacatcatcatttaccagaatactgatcttcttttgtcgtaaatacatgtctaatgtgttaaaaaaaagatcatacaagttatacgtcatttcatctgtggtattcttgtcattgaaggataaactcgtactaatctcttctttaacagcctgttcaaatttatatcctatatacgaaaaaatagcaaccagtgtttgatcatccgcgtcaatattctgttctatcgtagtgtataacaatcgtatatcttcttctgtgatagtcgatacgttataaaggttgataacgaaaatatttttatttcgtgaaataaagtcatcgtaggattttggacttatattcgcgtctagtagatatgcttttatttttggaatgatctcaattagaatagtctctttagagtccatttaaagttacaaacaactaggaaattggtttatgatgtataatttttttagtttttatagattctttattctatacttaaaaaatgaaaataaatacaaaggttcttgagggttgtgttaaattgaaagcgagaaataatcataaattatttcattatcgcgatatccgttaagtttgtatcgtaatggcgtggtcaattacaaataaagcggatactagtagcttcacaaagatggctgaaatcagagctcatctaaaaaatagcgctgaaaataaagataaaaacgaggatattttcccggaagatgtaataattccatctactaagcccaaaaccaaacgagccactactcctcgtaaaccagcggctactaaaagatcaaccaaaaaggaggaagtggaagaagaagtagttatagaggaatatcatcaaacaactgaaaaaaattctccatctcctggagtcagcgacattgtagaaagcgtggccgctgtagagctcgatgatagcgacggggatgatgaacctatggtacaagttgaagctggtaaagtaaatcatagtgctagaagcgatctttctgacctaaaggtggctaccgacaatatcgttaaagatcttaagaaaattattactagaatctctgcagtatcgacggttctagaggatgttcaagcagctggtatctctagacaatttacttctatgactaaagctattacaacactatctgatctagtcaccgagggaaaatctaaagttgttcgtaaaaaagttaaaacttgtaagaagtaaatgcgtgcacttttttataaagatggtaaactctttaccgataataattttttaaatcctgtatcagacgataatccagcgtatgaggttttgcaacatgttaaaattcctactcatttaacagatgtagtagtatatgaacaaacgtgggaggaggcgttaactagattaatttttgtgggaagcgattcaaaaggacgtagacaatacttttacggaaaaatgcatgtacagaatcgcaacgctaaaagagatcgtatttttgttagagtatataacgttatgaaacgaattaattgttttataaacaaaaatataaagaaatcgtccacagattccaattatcagttggcggtttttatgttaatggaaactatgttttttattagatttggtaaaatgaaatatcttaaggagaatgaaacagtagggttattaacactaaaaaataaacacatagaaataagtcccgatgaaatagttatcaagtttgtaggaaaggacaaagtttcacatgaatttgttgttcataagtctaatagactatataagccgctattgaaactgacggatgattctagtcccgaagaatttctgttcaacaaactaagtgaacgaaaggtatacgaatgtatcaaacagtttggtattagaatcaaggatctccgaacgtatggagtcaattatacgtttttatataatttttggacaaatgtaaagtccatatctcctcttccatcaccaaaaaagttaatagcgttaactatcaaacaaactgctgaagtggtaggtcatactccatcaatttcaaaaagagcttacatggcaacgactattttagaaatggtaaaggataaaaattttttagatgtagtatctaaaactacgttcgatgaattcctatctatagtcgtagatcacgttaaatcatctacggatggatgatatagatctttacacaaataattacaagaccgataaatggaaatggataagcgtatgaaatctctcgcaatgacagctttcttcggagagctaaacacattagatattatggcattgataatgtctatatttaaacgccatccaaacaataccattttttcagtggataaggatggtcagtttatgattgatttcgaatacgataattataaggcttctcaatatttggatctgaccctcactccgatatctggagatgaatgcaagactcacgcatcgagtatagccgaacaattggcgtgtgtggatattattaaagaggatattagcgaatatatcaaaactactccccgtcttaaacgatttataaaaaaataccgcaatagatcagatactcgtatcagtcgagatacagaaaagcttaaaatagctctagctaaaggcatagattacgaatatataaaagacgcttgttaataagtaaatgaaaaaaaactagtcgtttataataaaacacaatatggatgccaacatagtatcatcttctactattgcaacgtatatagacgctttagcaaagaatgcttcagaattagaacagaggtctaccgcatacgaaataaataatgaattggaactagtatttattaagccgccattaattactttgacaaatgtagtgaatatctctacgattcaggaatcgtttattcgatttaccgttactaataaggaaggtgtcaaaattagaactaagattccattatctaaggtacatggtctagatgtaaaaaatgtacagttagtagatgctatagataacatagtttgggaaaagaaatcattagtgacggaaaatcgtcttcacaaagaatgcttgttgagactatcgacagaggaacgtcatatatttttggattacaagaaatatggatcctctatccgactagaattagtcaatcttattcaagcaaaaacaaaaaactttacgatagactttaagctaaaatattttctaggatccggtgcccaatctaaaagttctttgttgcacgctattaatcatccaaagtcaaggcctaatacatctctggaaatagaattcacacctagagacaatgaaaaagttccatatgatgaactaataaaggaattgacgactctatcacgtcatatatttatggcttctccagagaatgtaattctttctccgcctattaacgcacctataaagacttttatgttgcctaaacaagatatagtaggtctggatctggaaaatctatatgccgtaactaagactgacggcattcctataactatcagagttacatcaaacgggttgtattgttattttacacatcttgggtatattattagatatccagttaagagaataatagattccgaagtagtagtctttggtgaggcagttaaggataagaactggaccgtatatctcattaagctaatagagcctgtgaatgcaatcaatgatagactagaagaaagtaagtatgttgaatctaaactagtggatatttgtgatcggatagtattcaagtcaaagaaatatgaaggtccgtttactacaactagtgaagtcgtcgatatgttatctacatatttaccaaagcaaccagaaggtgttattctgttctattcaaagggacctaaatctaacattgattttaaaattaaaaaggaaaatactatagaccaaactgcaaatgtagtatttaggtacatgtccagtgaaccaattatctttggagaatcgtctatctttgtagagtataagaaatttagcaacgataaaggctttcctaaagaatatggttctggtaagattgtgttatataacggcgttaattatctaaataatatctattgtttggaatatattaatacacataatgaagtgggtattaagtccgtggttgtacctattaagtttatagcagaattcttagttaatggagaaatacttaaacctagaatcgataaaaccatgaaatatattaactcagaagattattatggaaatcaacataatatcatagtcgaacatttaagagatcaaagcatcaaaataggagatatctttaacgaggataaactatcggatgtgggacatcaatacgccaataatgataaatttagattaaatccagaagttagttattttacgaataaacgaactagaggaccgttgggaattttatcaaactacgtcaagactcttcttatttctatgtattgttccaaaacatttttagacgattccaacaaacgaaaggtattggcgattgattttggaaacggtgctgacctggaaaaatacttttatggagagattgcgttattggtagcgacggatccggatgctgatgctatagctagaggaaatgaaagatacaacaaattaaactctggaattaaaaccaagtactacaaatttgactacattcaggaaactattcgatccgatacatttgtctctagtgtcagagaagtattctattttggaaagtttaatatcatcgactggcagtttgctatccattattcttttcatccgagacattatgctaccgtcatgaataacttatccgaactaactgcttctggaggcaaggtattaatcactaccatggacggagacaaattatcaaaattaacagataaaaagacttttataattcataagaatttacctagtagcgaaaactatatgtctgtagaaaaaatagctgatgatagaatagtggtatataatccatcaacaatgtctactccaatgactgaatacattatcaaaaagaacgatatagtcagagtgtttaacgaatacggatttgttcttgtagataacgttgatttcgctacaattatagaacgaagtaaaaagtttattaatggcgcatctacaatggaagatagaccgtctacaaaaaactttttcgaactaaatagaggagccattaaatgtgaaggtttagatgtcgaagacttacttagttactatgttgtttatgtcttttctaagcggtaaataataatatggtatgggttctgatatccccgttctaaatgcattaaataattccaatagagcgatttttgttcctataggaccttccaactgtggatactctgtattgttaatagatatattaatacttttgtcgggtaacagaggttctacgtcttctaaaaataaaagtttgataacatctggcctgttcataaataaaaacttggcgattctatatatactcttattatcaaatctagccattgtcttatagatgtgagctactgtaggtgtaccatttgattttctttctaatactatatatttctctcgaagaagttcttgcacatcatctgggaataaaatactactgttgagtaaatcagttattttttttatatcgatattgatggacatttttatagttaaggataataagtatcccaaagtcgataacgacgataacgaagtatttatacttttaggaaatcacaatgactttatcagatcaaaattaacaaaattaaaggagcatgtatttttttctgaatatattgtgactccagatacatatggatctttatgcgtcgaattaaatgggtctagttttcagcacggtggtagatatatagaggtggaggaatttatagatgctggaagacaagttagatggtgttctacatccaatcatatatctgaagatatacccgaagatatacacactgataaatttgtcatttatgatatatacacttttgacgctttcaagaataaacgattggtattcgtacaggtacctccgtcgttaggagatgatagctatttgactaatccgttattgtctccgtattatcgtaattcagtagccagacaaatggtcaatgatatgatttttaatcaagattcatttttaaaatatttattagaacatctgattagaagccactatagagtttctaaacatataacaatagttagatacaaggataccgaagaattaaatctaacgagaatatgttataatagagataagtttaaggcgtttgtattcgcttggtttaacggcgtttcggaaaatgaaaaggtactagatacgtataaaaaggtatctaatttgatataatgaattcagtgactgtatcacacgcgccatatactattacttatcacgatgattgggaaccagtaatgagtcaattggtagagttttataacgaagtagccagttggctgctacgagacgagacgtcgcctattcctgataagttctttatacagttgaaacaaccgcttagaaataaacgagtatgtgtgtgcggtatagatccgtatccgaaagatggaactggtgtaccgttcgaatcaccaaattttacaaaaaaatcaattaaggagatagcttcatctatatctagattaaccggagtaattgattataaaggttataaccttaatataatagacggggttataccctggaattattacttaagttgtaaattaggagaaacaaaaagtcacgcgatctactgggataagatttccaagttactgctgcagcatataactaaacacgttagtgttctttattgtttgggtaaaacagatttctcgaatatacgggcaaagttagaatccccggtaactaccatagtgggatatcatccagcggctagagaccgtcaattcgagaaagatcgatcatttgaaattatcaacgttttactggaattagacaacaaggtacctataaattgggctcaagggtttatttattaatgctttagtgaaattttaacttgtgttctaaatggatgcggctattagaggtaatgatgttatctttgttcttaagactataggtgtcccgtcagcgtgcagacaaaatgaagatccaagatttgtagaagcatttaaatgcgacgagttagaaagatatattgagaataatccagaatgtacactattcgaaagtcttagggatgaggaagcatactctatagtcagaattttcatggatgtagatttagacgcgtgtctagacgaaatagattatttaacggctattcaagattttattatcgaggtgtcaaactgtgtagctagattcgcgtttacagaatgcggcgccattcatgaaaatgtaataaaatccatgagatctaatttttcattgactaagtctacaaatagagataaaacaagttttcatattatctttttagacacgtataccactatggatacattgatagctatgaaacgaacactattagaattaagtagatcatctgaaaatccactaacaagatcgatagacactgccgtatataggagaaaaacaactcttcgggttgtaggtactaggaaaaatccaaattgcgacactattcatgtaatgcaaccacctcatgataatatagaagattacctattcacttacgtggatatgaacaacaatagttattacttttctctacaacgacgattggaggatttagttcctgataagttatgggaaccagggtttatttcattcgaagacgctataaaaagagtttcaaaaatattcattaattctataataaactttaatgatctcgatgaaaataattttacaacggtaccactggtcatagattacgtaacaccttgtgcattatgtaaaaaacgatcgcataaacatccgcatcaactatcgttggaaaatggtgctattagaatttacaaaactggtaatccacatagttgtaaagttaaaattgttccgttggatggtaataaactgtttaatattgcacaaagaattttagacactaactctgttttattaaccgaacgaggagaccatatagtttggattaataattcatggaaatttaacagcgaagaacccttgataacaaaactaattttgtcaataagacatcaactacctaaggaatattcaagcgaattactctgtccaagaaaacgaaagactgtagaagctaacatacgagacatgttagtagattcagtggagaccgatacctatccggataaacttccgtttaaaaatggtgtattggacctggtagacggaatgttttactctggagatgatgctaaaaaatatatgtgtactgtatcaaccggatttaaatttgacgatacaaagttcgtcgaagacagtccagaaatggaagagttaatgaatatcattaacgatatccaaccattaacggatgaaaataagaaaaatagagagctatatgaaaaaacattatctagttgtttatgcggtgctaccaaaggatgtttaacattcttttttggagaaactgcaactggaaagtcgacaaccaaacgtttgttaaagtctgctatcggtgacctgtttgttgagacgggtcaaacaattttaacagatgtattggataaaggacctaatccatttatcgctaacatgcatttgaaaagatctgtattctgtagcgaactacctgattttgcatgtagtgggtcaaagaaaatcagatctgataatattaaaaagttgacagaaccttgtgtcattggaagaccgtgtttctccaataaaattaataatagaaaccatgcgacaatcattatcgatactaattacaaacctgtttttgataggatagataacgcattaatgagaagaattgccgtcgtgcgattcagaacacacttttctcaaccttctggtagagaggctgctgaaaataatgacgcgtacgataaagtcaaactattagacgaggggttagatggtaaaatacaaaataatagatatagattcgcatttctatacttgttggtgaaatggtacagaaaatatcatgttcctattatgaaactatatcctacacccgaagagattcctgactttgcattctatctcaaaataggtactctgttggtatctagctctgtaaagcatattccattaatgacggacctctccaaaaagggatatatattgtacgataatgtggtcactcttccgttgactactttccaacagaaaatatccaagtattttaattctagactatttggacacgatatagagagcttcatcaatagacataagaaatttgccaatgttagtgatgaatatctgcaatatatattcatagaggatatttcatctccgtaaatatatgctcatatatttatagaagatatcacatatctaaatgaataccggaattatagatttatttgataatcatgttgatagtataccaactatattacctcatcagttagctactctagattatctagttagaactatcatagatgagaacagaagcgtgttattgttccatattatgggatcaggtaaaacaataatcgctttgttgttcgccttggtagcttccagatttaaaaaggtttacattctagtgccgaacatcaacatcttaaaaattttcaattataatatgggtgtagctatgaacttgtttaatgacgaattcatagctgagaatatctttattcattccacaacaagtttttattctcttaattataacgataacgtcattaattataacggattatctcgctacaataactctatttttatcgttgatgaggcacataatatctttgggaataatactggagaacttatgaccgtgataaaaaataaaaacaagattccttttctactattgtctggatctcccattactaacacacctaatactctgggtcatattatagatttaatgtccgaagagacgatagattttggtgaaattattagtcgtggtaagaaagtaattcagacacttcttaacgaacgcggtgtgaatgtacttaaggatttgcttaaaggaagaatatcatattacgaaatgcctgataaagatctaccaacgataagatatcacggacgtaagtttctagatactagagtagtatattgtcacatgtctaaacttcaagagagagattatatgattactagacgacagctatgttatcatgaaatgtttgataaaaatatgtataacgtgtcaatggcagtattgggacaacttaatctgatgaataatttagatactttatttcaggaacaggataaggaattgtacccaaatctgaaaataaataatggcgtgttatacggagaagaattggtaacgttaaacattagttccaaatttaaatactttattaatcggatacagacactcaacggaaaacattttatatacttttctaattctacatatggcggattggtaattaaatatatcatgctcagtaatggatattctgaatataatggttctcagggaactaatccacatatgataaacggcaaaccaaaaacatttgctatcgttactagtaaaatgaaatcgtctttagaggatctattagatgtgtataattctcctgaaaacgatgatggtagtcaattgatgtttttgttttcatcaaacattatgtccgaatcctatactctaaaagaggtaaggcatatttggtttatgactatcccagatactttttctcaatacaaccaaattcttggacgatctattagaaaattctcttacgccgatatttctgaaccagttaatgtatatcttttagccgccgtatattccgatttcaatgacgaagtgacgtcattaaacgattacacacaggatgaattaattaatgttttaccatttgacatcaaaaagctgttatatctaaaatttaagacgaaagaaacgaatagaatatactctattcttcaagagatgtctgaaacgtattctcttccaccacatccatcaattgtaaaagttttattgggagaattggtcagacaatttttttataataattctcgtattaagtataacgataccaagttacttaaaatggttacatcagttataaaaaataaagaagacgctaggaattacatagatgatattgtaaacggtcacttctttgtatcgaataaagtatttgataaatctcttttatacaaatacgaaaacgatattattacagtaccgtttagactttcctacgaaccatttgtttggggagttaactttcgtaaagaatataacgtggtatcttctccataaaactgatgagatatataaagaaataaatgtcgagctttgttaccaatggataccttccagttacattggagccacacgagctgacgttagacataaaaactaatattaggaatgccgtatataagacgtatctccatagagaaattagtggtaaaatggccaagaaaatagaaattcgtgaagacgtggaattacctctcggcgaaatagttaataattctgtagttataaacgttccgtgtgtaataacctacgcgtattatcacgttggggatatagttagaggaacattaaacatcgaagatgaatcaaatgtaactattcaatgtggagatttaatctgtaaactaagtagagattcgggtactgtatcatttagcgattcaaagtactgcttttttcgaaatggtaatgcgtatgacaatggcagcgaagtcactgccgttctaatggaggctcaacaaggtatcgaatctagttttgtttttctcgcgaatatcgtcgactcataagaaagagaatagcggtaagtataaacacgaatactatggcaataattgcgaatgttttattcccttcgatatatttttgataatatgaaaaacatgtctctctcaaatcggacaaccatctcataaaatagttatctcgcgctggcgaggtggttgccgctcgtataatctccccagaataatatacttgcgtgtcgtcgttcaatttatacggatttctatagttctctgttatataatgcggttttccatcatgattagacgacgacaatagtgttctaaatttagatagttgatcagaatgaatgtttattggcgttggaaaaattatccatgctgcgtctgcagagtggttgatagttgttcctagatatgtaaaataatccaacgtactaggtagcaaattgtctagataaaatactgaatcaaacggcgcagacgtattagcggatctaatggaatccaattgattgactatcttttgaaaatatacatttttatgatccgatacttgtaagaatatagaaataatgataagtccatcatcgtgtttttttgcctcttcataagaactatattttttcttattccaatgaacaagattaatctctccagagtatttgtacacatctatcaagtgattggatccataatcgtcttcctttccccaatatatatgtagtgatgataacacatattcattggggagaaaccctccacttatatatcctcctttaaaattaatccttactagttttccagtgttctggatagtggttggtttcgactcattataatgtatgtctaacggcttcaatcgcgcgttagaaattgcttttttagtttctatattaataggagatagttgttgcggcatagtaaaaatgaaatgataactgtttaaaaatagctcttagtatgggaattacaatggatgaggaagtgatatttgaaactcctagagaattaatatctattaaacgaataaaagatattccaagatcaaaagacacgcatgtgtttgctgcgtgtataacaagtgacggatatccgttaataggagctagaagaacttcattcgcgttccaggcgatattatctcaacaaaattcagattctatctttagagtatccactaaactattacggtttatgtactacaatgaactaagagaaatctttagacggttgagaaaaggttctatcaacaatatcgatcctcactttgaagagttaatattattgggtggtaaactagataaaaaggaatctattaaagattgtttaagaagagaattaaaagaggaaagtgatgaacgtataacagtaaaagaatttggaaatgtaattctaaaacttacaacacgggataaattatttaataaagtatatataggttattgcatggcgtgttttattaatcaatcgttggaggatttatcgcatactagtatttacaatgtagaaattagaaagattaaatcattaaatgattgtattaacgacgataaatacgaatatctgtcttatatttataatatgctagttaatagtaaatgaacttttacagatctagtataattagtcagattattaagtataatagacgactagctaagtctattatttgcaaggatgactctcaaattattacactcacggcattcgttaaccaatgcctatggtgtcataaacgagtatccgtgtccgctattttattaactactgataacaaaatattagtatgtaacagacgagatagttttctctattctgaaataattagaactagaaacatgtttagaaagaaacgattatttctgaattattccaattatttgtccaaacaggaaagaagtatactatcgtcatttttttctctatatccagctactgctgataatgatagaatagacgctatttatccgggtggcatacccaaaaggggtgagaatgttccagagtgtctatccagggaaatcaaagaagaagttaatatagacaattcttttgtattcatagacactcggttttttattcatggtatcatagaagataccattatcaacaaattttttgaggtaattttctttgtcggaagaatatctctaacgagtgatcaaattattgatacctttaaaagtaatcatgaaatcaaggatctaatatttttagatccgaattcaggtaatggactccaatacgaaattgcaaaatatgctctagatactgcaaaacttaaatgttacggccatagaggatgttattatgaatcattaaaaaaattaactgaggatgattgattagaaaatataaattaatttaccatcgtgtatttttataacgggattgtccggcatatcatgtagatagttaccgtctacatcgtatactcgaccatctacgcctttaaatcctctatttattgacattaatctattagaattggaataccaaatattagtaccctcaattagtttattggtaatattttttttagacgatagatcgatggctcttgaaaccaaggttttccaaccggactcattgtcgatcggtgagaagtctttttcattagcatgaatccattctaatgatgtatgtttaaacactctaaacaattggacaaattcttttgatttgctttgaatgatttcaaataggtcttcgtctacagtaggcataccattagataatctagccattataaagtgcacgtttacatatctacgttctggaggagtaagaacgtgactattgagacgaatggctcttcctactatctgacgaagagacgcctcgttccatgtcatatctaaaatgaagatatcattaattgagaaaaaactaataccctcgcctccactagaagagaatacgcatgttttaatgcattctccgttagtgtttgattcttggttaaactcagccaccgccttgattctagtatcttttgttctagatgagaactctatattagagataccaaagactttgaaatatagtaataagatttctattcctgactgattaacaaatggttcaaagactagacatttaccatgggatgctaatattcccaaacatacatctataaatttgacgcttttctcttttaattcagtaaatagagagatatcagccgcactagcatcccctttcaatagttctccctttttaaaggtatttaatgcggatttagaaaactctctatctcttaatgaatttttaaaatcattatatagtgttgctatctcttgcgcgtattcgccgggatcacgattttgtctttcaggaaagctatcgaacgtaaacgtagtagccatacgtctcagaattctaaatgatgatataccagtttttatttctgcgagtttagccttttgataaatctcttcttgcttttttgacatattaacgtatcgcattaatactgttttcttagcgaatgatgcagacccttctacgttatcaaaaatagaaaactcgttattaactatgtacgaacataggcctcctagtttggagactaattctttttcatcgactagacgtttattctcaaatagtgattggtgttgtaaggatcctggtcgtagtaagttaaccaacatggtgaattcttgcacactattgacgataggtgtagccgataaacaaatcatcttatggttttttaatgcgatggtcttggataaaaaattatatactgaacgagtaggacggatcttaccatcttctttgattaatgatttagaaatgaagttatgacattcatcaataatgacgcatattctactcttggaattaatagttttgatattagtaaaaaatttatttctaaaattttgatcatcgtaattaataaaaatacaatccttcgttatctctggagcgtatctgagtatagtgttcatccaaggatcttctatcaaagcctttttcaccaataagataatagcccaattcgtataaatatccttaagatgtttgagaatatatacagtagtcattgttttaccgacacccgtttcatggaacaataaaagagaatgcatactgtctaatcctaagaaaactcttgctacaaaatgttgataatccttgaggcgtactacgtccgaccccatcatttcaacgggcatattagtagttctgcgtaaggcataatcgatataggccgcgtgtgatttactcatttatgagtgataagtaataactatgttttaaaaatcacagcagtagtttaactagtcttctctgatgtttgttttcgatactttttgaatcagaagtcatactagaataaagcaacgagtgaacgtaatagagagcttcgtatactctattcgaaaactctaagaacttattaatgaattccgtatccactggattgtttaaaatactaaattgaacactgttcacatccttccaagaagaagacttagtgacggacttaacatgagacataaataaatccaaattttttttacaaacatcactagccaccataatggcgctatctttcaaccagctatcgcttacgcattttagcagtctaacatttttaaagagactacaatatattctcatagtatcgattacacctctaccgaataaagttggaagtttaataatacaatatttttcgtttacaaaatcaaataatggtcgaaacacgtcgaaggttaacatcttataatcgctaatgtatagattgttttcagtgagatgattattagatttaatagcatctcgttcacgtttgaacagtttattgcgtgcgctgaggtcggcaactacggcgtccgctttagtactcctcccataatactttacgctattaatctttaaaatttcatagactttatctagatcgctttctggtaacatgatatcatgtgtaaaaagttttaacatgtcggtcggcattctatttagatcattaactctagaaatctgaagaaagtaattagctccgtattccagactaggtaatgggcttttacctagagacagattaagttctggcaatgtttcataaaatggaagaaggacatgcgttccctcccggatattttttacaatttcatccatttacaactctatagtttgttttcattattattagttattatctcccataatcttggtaatacttaccccttgatcgtaagataccttatacaggtcattacatacaactaccaattgtttttgtacataatagattggatggttgacatccatggtggaataaactactcgaacagatagtttatctttccccctagatacattggccgtaatagttgtcggcctaaagaatatctttggtgtaaagttaaaagttagggttcttgttccattattgctttttgtcagtagttcattataaattctcgagatgggtccgttctctgaatatagaacatcatttccaaatctaacttctagtctagaaataatatcggtcttattcttaaaatctattcccttgatgaagggatcgttaatgaacaaatccttggcctttgattcggctgatctattatctccgttatagacgttacgttgactagtccaaagacttacaggaatagatgtatcgatgatgttgatactatgtgatatgtgagcaaagattgttctcttagtggcatcactatatgttccagtaatggcggaaaactttttagaaatgttatatataaaagaattttttcgtgttccaaacattagcagattagtatgaagataaacactcatattatcaggaacattatcaatttttacatacacatcagcatcttgaatagaaacgataccatcttctggaacctcaacaatctcggcagactccggataaccagtcggtggaccatcgctaacaataactagatcatccaacaatctactcacatatgcatctatataatctttttcatcttgtgagtaccctggatacgaaataaatttattatccgtatttccataataaggtttagtataaacagagagcgatgttgccgcatgaacttcagttacagtcgccgttggttggtttatttgacctattactctcctaggtttctctataaacgatggtttaatttgtacattcttaaccatatatccaataaagctcaattcaggaacataaacaaattctttgttgaacgtttcaaagtcgaacgaagagtcacgaataacgatatcggatactggattgaaggttaccgttacggtaatttttgaatcggatagtttaagactgctgaatgtatcttccacatcaaacggagttttaatataaacgtatactgtagatggttctttaatagtgtcattaggagttaggccaatagaaatatcattaagttcactagaatatccagagtgtttcaaagcaattgtattattgatacaattattatataattcttcgccctcaatttcccaaataacaccgttacacgaagagatagatacgtgattaatacatttatatccaacatatggtacgtaaccgaatcttcccatacctttaacttctggaagttccaaactcagaaccaaatgattaagcgcagtaatatactgatccctaatttcgaagctagcgatagcctgattgtctggaccatcgtttgtcataactccggatagagaaatatattgcggcatatataaagttggaatttgactatcgactgcgaagacattagaccgtttaatagagtcatccccaccgatcaaagaattaatgatagtattattcattttctatttaaaatggaaaaagcttacaataaactccgtagagaaatatctataatttgtgagttttccttaaagtaacagcttccgtaaacgccgtctttatctcttagtaagtttattgtatttataaccttttccttatcttcatagaatactaaaggcaacaaagaaatttttggttcttctctaagagctacgtgagacttaaccatagaagccaacgaatccctacatattttagaacagaaataccctacttcaccacccttgtatgtctcaatactaataggtctaaaaaccaaatcttgattacaaaaccaacacttatcaattacactatttgtcttaatagacacatctgccatagatttataatactttggtagtatacaagcgagtgcttcttctttagcgggcttaaagactgctttaggtgctgaaataaccacatctggaaggcttactcgcttagccatttaattacggaactatttttttatacttctaatgagcaagtagaaaacctctcatctacaaaaacatactcgtgtccataatcctctaccatagttacacgttttttagatctcatatgtgctaaaaagttttcccatactaattggttactattatttttcgtataatttttaacagtttgaggttttagatttttagttacagaagtgatatcgaatattttatccaaaaagaatgaataattaattgtcttagaaggagtgttttcttggcaaaagaataccaagtgcttaaatatttctactacttcattaatcttttctgtactcagattcagtttctcatcttttacttgattgattatttcaaagactaacttataatcctttttatttattctctcgttagccttaagaaaactagatacaaaatttgcatctacatcatccgtggatatttgatttttttccatgatatccaagagttccgagataatttctccagaacattgatgagacaataatctccgcaatacatttctcaaatgaataagtttattagacacgtggaagtttgactttttttgtacctttgtacatttttgaaataccgactcgcaaaaaatacaatattcatatccttgttcagatactataccgttgtgtctacaaccgctacataatcgtagattcatgttaacactctacgtatctcgtcgtccaatattttatataaaaacattttatttctagacgttgccagaaaatcctgtaatacttttagttttttgggctgtgaataaagtatcgccctaatatggttaccgtcctccgccaatatagtagttaaattatccgcacatgcaaaagaacaccgcttaggcggattcagtacaatgttatatttttcgtaccaactcatttaaatatcataatctaaaatagttctgtaatatgtctagcgctaatatattgatcataatcctgtgcataaattaagatacaacaatgtctcgaaatcatcgacatggcttcttccatagttagaagatcgtcgtcaaagttagcaacgtgattcatcaacatttgctgttttgaggcagcaaatactgaaccgtcgccattcaaccattcataaaaaccatcgtctgaatccattgataatttcttgtactggtttttgagagctcgcatcaatctagcatttctagctcccggattgaaaacagaaagaggatcgtacatccagggtccattttctgtaaatagaatcgtataatgtcccttcaagaagatatcagacgatccacaatcaaagaattggtctccgagtttgtaacaaactgcggactttaacctatacatgataccgtttagcataatttctggtgatacgtcaatcggagtatcatctattagagatctaaagccggtgtaacattctccaccaaacatattcttattctgacgtcgttctacataaaacatcattgctccattaacgataacaggggaatgaacagcactacccatcacattagttcccaatggatcaatgtgtgtaactccagaacatcttccatagcctatgttaggaggagcgaacaccactcttccactattgccatcgaatgccatagaataaatatccttggaattgatagaaatcggactgtcggatgttgtgatcatcttcataggattaacaacgatgtatggtgccgcctgaagtttcatatcgtaactgatgccgttcataggtctagccacagaaaccaacgtaggtctaaatccaactatagacaaaatagaagccaatatctgttcctcatctgtcataacttgagagcatccagtatgaataatcttcattagatggggatctaccgcatcatcatcgttacaataaaaaattcccattctaatgttcataattgcttttctaatcatggtatgcatgtttgctctctgaatctctgtggaaattagatctgatacacctgtaatcactatcggattatcctccgtaagacgattaaccaacaacatataattataagactttacttttctaaattcataaagttgctggattaggctataggtgtctccatgtacatacgcgttctcgagcgcaggaagtttaataccgaatagtgccatcagaataggatgaatatagtaattagtttctggttttctataaataaaagacaaatcttgtgaactagacatatcggtaaaatgcatggattggaatcgtgtagtcgacagaagaatatgatgattagatggagagtatattttatctaactctttgagttggtcaccgattctaggactagctcgagaatgaataagtactaaaggatgagtacatttcacagaaacactagcattgttcaatgtgctctttacatgggtaaggagttgaaatagctcgtttctatttgttctgacaatatttagtttattcataatgttaagcatatcctgaatagtaaagttagatgtgtcatacttgttagtagttagatatttagcaattgcattcccatcatttctcaatctcgtactccaatcatgcgtggatgctacttcgtcgatggaaaccatacaatcctttttgataggctgttgagattgattatttcctgcacgtttaggtttggtacgttgatttctagcccctgcggatataaagtcatcgtctacaatttgggacaatgaattgcatacactacaagacaaagatttatcagaagtgtgaatatgatcttcatctaccaaagaaagagtttgattagtataactagattttagtcctgcgttagatgttaaaaaaacatcgctattgaccacggcttccattatttatattcgtagtttttactcgaaagcgtgattttaatatccaatcttattacttttggaatcgttcaaaacctttgactagttgtagaatttgatctattgccctacgcgtatactcccttgcatcatatacgttcgtcaccagatcgtttgtttcggcctgaagttggtgcatatctttttcaacactcgacatgagatccttaagggccatatcgtctagattttgttgagatgctgctcctggatttggattttgttgtgctgttgtacatactgtaccaccagtaggtgtaggagtacatacagtggccacaataggaggttgaggaggtgtaaccgttggagtagtacaagaaatatttccatccgattgttgtgtacatgtagttgttggtaacgtctgagaaggttgggtagatggcggtgtcgtcgtcttttgatctttattaaatttagagataatatcctgaacagcattgctcggcgtcaacgctggaaggagtgaactcgccggcgcatcagtatctgcagacagccaatcaaaaagattagacatatcagatgatgtattagtttgttgtcgtggttttggtgtaggagcagtactactaggtagaagaataggagccgatgtaggtgtcggaaccggctgtggagttatatgaatagttggttgtagcggttggataggctgtctgctggcggccatcatattatctctagctagttgttctcgcaactgtctttgataatacgactcttgagactttagtcctatttcaatcgcttcatcctttttcgtatccggatccttttcttcagaataatagattgacgactttggtgtagaggattctgccagcccctgtgagaacttgttaaagaagtccatttaaggctttaaaattgaattgcgattataagattaaatggcagacacagacgatattatcgactatgaatccgatgatctcactgaatacgaggatgatgaagaagaggaagaagatggagagtcactagaaactagtgatatagatcccaaatcttcttataagattgtagaatcagcatccactcatatagaagatgcgcattccaatcttaaacatatagggaatcatatatctgctcttaaacgacgctatactagacgtataagtctatttgaaatagcgggtataatagcagaaagctataacttgcttcaacgaggaagattacctctagtttcagaattttctgacgaaacgatgaagcaaaatatgctacatgtaattatacaagagatagaggagggttcttgtcctatagtcatcgaaaagaacggagaattgttgtcggtaaacgattttgacaaagatggtctaaaattccatctagactatattatcaaaatttggaaacttcaaaaacgatattagaatttatacgaatatcgttctctaaatgtcacaatcaagtctcgcatgttcagcaatttattgtcgtactttatatcgtgttcattaacgatatcttgcaaaatagtaatgattctatcttccttcgatagatattcttcagagattattgtcttatattctttcttgttatcagatatgaatttgataagactttgaacattattgatacccgtctgtttaattttttctacagatattttagttttggcagattctatcgtatctgtcaatagacatccaacatcgacattcgacgtcaattgtctataaatcaacgtataaattttagaaataacattagcgaattgttgtgcattgatgtcgttattctgaaacagtatgattttaggtagcattttcttaacaaagagaacgtatttattgttactcagttgaacagatgatatatccagattactaacgcatctgattccgtataccaaactttcagaagaaatggtatacaattgtttgtattcattcaatgtctctttttcagaaattagtttagagtcgaatactgcaataattttcaagagatagttttcatcagataagattttatttagtgtagatatgataaaactattgttttgttggagaacttgatacgccgcgttctctgtagtcgacgctctcaaatgggaaacgatctccattatttttttggaatcggatactatatcttcggtatcttgacgcagtctagtatacatagagttaagagagattagagtttgtacattaagcaacatgtctctaaatgtggctacaaacttttccttttccacatcatctagtttattatataccgatttcacaacggcaccagatttaaggaaccagaatgaaaaactctgataactacaatatttcatcatagttacgattttatcatcttctatagttggtgtaatagcgcatacctttttctccaagactggaaccaacgtcataaaaatgtttaaatcaaaatccatatcaacatctgatgcgctaagaccagtctcgcgttcaagattatctttactaatggtgacgaactcatcgtatagaactctaagtttgtccattatttatttacagatttagttgtttaatttatttgtgctcttccagagttgggatagtatttttctaacgtcggtattatattattaggatctacgttcatatgtatcataatattaatcatccacgttttgataaatctatctttagcttctgaaataacgtatttaaacaaaggagaaaaatatttagctacggcatcagacgcaataacattttttgtaaatgtaacgtatttagacgacagatcttcgttaaaaagttttccatctatgtagaatccatcagttgttaacaccattcccgcgtcagattgaataggagtttgaatagtttgttttggaaatagatccttcaataacttatagttgggtgggaaaaaatcgattttatcactagactctttcttttttactatcattacctcatgaactatttcttgaatgagtatatgtattttctttcctatatcggacgcgttcattggaaaatataccatgtcgttaactataagaatatttttatcctcgtttacaaactgaataatatcagatgtagttcgtaaacgaactatatcatcaccagcacaacatctaactatatgatatccactagtttcctttagtcgtttattatcttgttccatattagcagtcattccatcatttaagaaggcgtcaaagataatagggagaaatgacattttggattctgttacaactttaccaaaattaaggatatacggacttactatctttttctcaacgtcaatttgatgaacacacgatgaaaatgtacttcgatgagattgatcatgtagaaaacaacaagggatacaatatttccgcatatcatgaaatatattaagaaatcccaccttattatatttccccaaaggatccatgcacgtaaacattatgccgttatcattaataaagacttctttctcatcggatctgtaaaagttgttactgatttttttcattccaggatctagataattaataatgatgggttttctattcttattctttgtattttggcatatcctagaccagtaaacagtttccactttggtaaaatcagcagacttttgaacgctattaaacatggcattaatggcaataactaaaaatgtaaaatatttttctatgttaggaatatggtttttcactttaatagatatatggtttttggccaaaatgatagatatttttttatccgaggatagtaaaatattattagtcgccgtctctataaaaatgaagctagtctcgatatccaattttattctagaattgataggagtcgccaaatgtaccttatacgttatatctcccttgatgcgttccatttgtgtatctatatcggacacaagatctgtaaatagttttacgttattaatcatcacggtatcgccgtcgctagataatgctaatgtaccatccaagtcccaaatggagagatttaactgttcatcgtttagaataaaatgattaccggtcatattaataaagtgttcatcgtatctagataacaacgacttataattaatgtccaagtcttgaactcgctgaatgatcttttttaacccagttagttttagattggtacgaaatatattgttaaactttgattctacagtaatgtccaaatctagttgtggaaatacttccatcaacattgtttcaaacttgataatattattatctacatcttcatacgatccaaattccggaatagatgtatcacatgctcttgccacccagataaccaaaaagtcacacgctccaggatatacattgtataaaaagctatcgtttttaagtagggtttttttctgcgtgtatacgaagggattaaaaatagtattatcaacgtaactatattccaaattattcttatgagaatagataataatatcgtccttaatatctaacaaatttcctaaatatccctttaattgagtcattcgaagcgtcaatagaatatgtctcttaactatttccggctgttgtatatttaaatgacttcgtaaaaaataatatatgggcgacttctcatctatgtaatcatatggagtgagatatagggctcgttctacctcctgccccttacccacctgtaataccaattgcggacttactatatatcgcatatttatatcgtggggtaaagtgaaaatctactaccgatgatgtaagtcttacaatgttcgaaccagtaccagatcttaatttggaggcctccgtagaactaggggaggtaaatatagatcaaacaacacctatgataaaggaaaatagcggttttatatcccgtagtagacgtctattcgcccatagatctaaggatgatgagagaaaactagcactacgattctttttacaaagactttattttttagatcatagagagattcattatttgttcagatgcgttgacgctgtaaaagacgtcactattaccaaaaaaaataacattatcgtggcgccttatatagcacttttaactatcgcatcaaaaggatgcaaacttacagaaacaatgattgaagcattctttccagaactatataatgaacatagtaagaaatttaaattcaactctcaagtatccatcatccaagaaaaactcggataccagtttggaaactatcacgtttatgattttgaaccgtattactctacagtagctctggctattcgagatgaacattcatctggcatttttaatatccgtcaagagagttatctggtaagttcattatctgaaataacatatagattttatctaattaatctaaaatctgatcttgttcaatggagtgctagtacgggcgctgtaattaatcaaatggtaaatactgtattgattacagtgtatgaaaagttacaactggtcatagaaaatgattcacaatttacatgttcattggctgtggaatcagaacttccaataaaattacttaaagatagaaatgaattatttacaaaattcatcaacgagttaaaaaagaccagttcattcaagataagcaaacgcgataaggatacgctactaaaatattttacttaggactggagttagaatttatagacgactcatttcgtttatcattattactaccatcattattagtattcttcttgttatcttgttcagaaatatacagcaatgctatgcctaatactaaatacattatcatgcttgcaatggctctaacaacgacgaaccaaaatgaatttggtcgtagcttttgttcacaaaaatacataaagaaatgtctacataaatctatggcgccattggctacttgaaatagcgccagtcctcctacagattttaatatagctgtataacatgacatttattcatcatcaaaagagacagagtcaccatctgtcatatttagattttttttcatgtgttcaaagtatcctctactcatttcattataatagtttatcatacttagaattttaggacggatcaatgagtaagacttgactagatcgtcagtagtaatttgtgcatcgtctattctgcatccgcttcgtcgaataatgtatagcatcgctttgagattctccatagctatcaagtctttatacaatgacatggaaatatctgtgaatactttatacttctccaacatcgatgccttaacatcatcgcctactttagcattgaaaatacgttctattgtgtagatggatgtagcaagatttttaaacaacaatgccatcttacacgatgattgcctcaagtctccaatcgtttgtttagaacgattagctacagagttcaacgcttggctgactagcatattattatctttagaaattgtattcttcaatgaagcgtttatcatatctgtgatttcgttagtcatattacagtctgactgggttgtaatgttatccaacatatcacctatggatacggtacacgtaccagcatttgtaataatcctatctaagatgttgtatggcattgcgcagaaaatatcttctcctgtaatatctccactctcgataaatctactcagattattcttaaatgccttattctctggagaaaagatatcagtgtccatcatttcattaatagtatacgcagaaaagataccacgagtatcaattctatccaagatacttatcggttccgagtcacagataatggtttcctctccttcgggagatcctgcatagaaatatctaggacaatagtttctatactgtctgtaactctgataatctctaaagtcactaactgataccatgaaattgagaagatcaaacgctgaagtaatcaatttttctgcctcgtttttactacaactagttttcatcaatgtagtgacgatgtattgtttagttactcttggtctaatactgatgatagagatattattacttcccataatggatcttctagtagtcaccttaaagcccattgatgcaaatagcagatagataaagtcttggtatgactcctttctaatatagtacggactacctttgtcacccaactttatacccacataagccataacaacctctttaatagccgtttcatgaggtttatcagccatgagcctgagtagttggaagaatctcatgaatcccgtctcagaaagtcctatatgcatgatagatttatctttcctgggaaactctcgtatagtcatagatgaaatactcttcaaagtttctgaaataagattagtaacagtcttacctccgactactctgggtaacaaacatactctaataggtgttttctctgcggagataatatcagaaaggatagagcaataagtagtattattgtgattataaagaccgaatacataacaggtagaatttataaacatcatgtcctgaaggtttttagacttgtattcctcgtaatccataccgtcccaaaacatggatttggtaactttgatagccgtagatctttgttccttcgccaacaggttaaagaaattaataaagaatttgttgtttctatttatgtccacaaattgcacgtttggaagcgtaactgttacgttcactgcagcattttgaggatcgcgagtatgaagtacgatgttattgtttactggtatatctggaaagaaatctaccagtctaggaataagagattgatatcgcatagaaatagtaaagtttataatctcatcatcgaagagcattttgttaccattgtaataaatatccactctgtcatatgtataaatgaagtactgttcaaacatgatgagatgtttatatgttggcatagtagtgagatcgacgtttggtaatggcaatgtattaagattaactccataatgtctagcagcatctgcgatgttataagtgtcgtcaaagcggggtcgatcttgtgctgttatatattgtctaacacctataagattatcaaaatcttgtctgcttaatacaccgttaacaatttttgccttgaattcttttattggtgcattaataacatccttatagaggatgttaaacaaataagtgttatcaaagttaagatctggatatttcttttctgctagaacatccattgagtcggagccatctggtttaatataaccaccgataaatctagctctgtattctgtatccgtcaatctaatattaagaaggtgttgagtgaaaggtggaagatcgtaaaagctgtgagtattaatgataggattagtttccgaactaatgttaattggggtattaataatatctatatttccagcgttaagtgtaacattaaacagttttaattcacgtgacgtggtatcaattaaataattaatgcccaatttggatatagcagcctgaagctcatcttgtttagttacggatcctaatgagttattaagcaatatatcgaacggatgaacgaaggttgttttaagttggtcacatactttgtaatctagacatagatgcggaagaacggtagaaactatacgaaataaatattcagagtcctctaattgatcaagagtaactattgacttaataggcatcatttatttagtattaaatgacgaccgtaccagtgacggatatacaaaacgatttaattacagagttttcagaagataattatccatctaacaaaaattatgaaataactcttcgtcaaatgtctattctaactcacgttaacaacgtggtagatagagaacataatgccgccgtagtgtcatctccagaggaaatatcctcacaacttaatgaagatctatttccagatgatgattcaccggccactattatcgaacgagtacaacctcatactactattattgacgatactccacctcctacttttcgtagagagttattaatatcggaacaacgtcaacaacgagaaaaaagatttaatattacagtatcgaaaaatgctgaagcaataatggaatctagatctatgataacttctatgccaacacaaacaccatccttgggagtagtttatgataaagataaaagaattcagatgttagaggatgaagtggttaatcttagaaatcaacgatctaatacaaaatcatctgataatttagataattttaccaaaatactatttggtaagactccgtataaatcaacagaagttaataagcgtatagccatcgttaattatgcaaatttgaacgggtcccccttatcagttgaggacttggatgtttgttcggaggatgaaatagatagaatctataaaacgattaaacaatatcacgaaagtagaaaacgaaaaattatcgtcactaacgtgattattattgtcataaacattatcgagcaggcattgctaaaactcggatttgaagaaatcaaaggactgagtaccgatatcacttcagaaattatcgatgtggagatcggagatgactgcgatgctgtagcatctaaactaggaatcggtaacagtccggttcttaatattgtattgtttatactcaagatattcgttaaacgaattaaaattatttaatttaatacattcccatatccagacaacaatcgtctggattaatctgttcctgtcgtctcataccggacgacatattaatctttttattagtaggcatctttttagatggtttctttttcccagcattaactgagtcgatacctagaagatcgtgattgatctctccgaccattccacgaacttctaattggccgtctctgacggtaccataaactattttaccagcattagtaacagcttggacaatctgaccatccattgcgttgaatgatgtagttgctgttgttctacgtttaggagcaccagaagtatttttggagcccttggaggctgatgtagaagaagacgaggattttgatttacatgtaatacattttgtactctttgattttgtatcacatgcgccggcagtcacatttgtttgagaattaagattattgttgcctcctttgacggctgcatctccaccgatttgcgctagtagatttttaagctgtggtgtaatcttattaactgtttcgatataatcatcgtaactgcttctaacggctaaattttttttatccgccatttagaagctaaaaatatttttatttatgcagaagatttaactagattatacaatgaactaatatgatccttttccagattatttacaaacttggtattttttggttctggaggaggcgaatttaaattcggacttggattcggattttgtgagttcttgatcttattatacatcgagtataggatggcgacggtaactgctacgcaaataccgatcaacaaaagaataccaatcatttattgacaataacttcactattgatcaagtatgcaatatatcatcttttcactaaataagtagtaataatgattcaacaatgtcgagatatatggacgataataatttagttcatggaaatatcgctatgattggtatgaatgactccgctaactctgtggggtgcgcagtgctttccccacatagaataaattagcattccgactgtgataataataccaagtataaacgccataatactcaatactttccatgtacgagtgggactggtagacttactaaagtcaataaaggcgaagatacacgaaagaatcaaaagaatgattccagcgattagcacgccggaaaaataatttccaatcataagcatcatgtccatttaactaataaaaattttaaatcgccgaatgaacaaagtggaatataaaccatataaaaacaatagtttgtactgcaaaaataatatctatttttgttttcgaagatatggtaaaattaaatagtagtacacagcatgttataactaacagcagcaacggctcgtaattacttatcatttactagacgaaaaggtggtgggatattttcttgctcaaataatacgaatatatcacccatccattttatgcgatgtttatatactctaatctttaatagatctatagacgacgggtttaccaacaatatagattttatcgattcatctaatttaaacccttccttaaacgtgaatgatctattatctggcataacgatgactctacctgatgaatcggacaatgtactgggccatgtagaataaattatcaacgaattatcgtctacgaacatttatatcatttgttttaattttaggacgcgaataaatggatataaaatagaaaataacagatattacaaccaatgttatggccgcgcccaaccaggtaggcagttttattttatcttttactacaggttctcctggatgtacgtcaccaacggcggacgtagttctagtacaattagacgtaagttctgcttgggaattttttaacgctaaagagttaacgttaatcgtgcacccaacgtatttacatctagttctttgaacatcttgattataatataaccattttctatctctagattcgtcggtgcactcatgtaaccaacataccctaggtcctaaatatttatctccggaattagattttggataattcgcgcaccaacaatttctatttcctttatgatcgttacaaaagacgtataatgccgtatccccaaaagtaaaataatcaggacgaataattctaataaactcagaacaatatctcgcatccatatgtttggagcaaatatcggaataagtagacatagccggtttccgttttgcacgtaaccattctaaacaattggggtttccaggatcgtttctacaaaatccagtcatgaaatcatcacaatgttctgtcttgtaattattattaaatatttttggacagtgtttggtatttgtcttagaacaacattttgccacgctatcactatcgcccaggagataatccttttttataaaatgacatcgttgcccggatgctatataatcagtggcgtgttttaaatccttaatatattcaggagttacctcgttctgataatagattaatgatccaggacgaaatttgaaagaactacatggttctccatgaattaatacatattgtttagcaaattcaggaactataaaactactacaatgatctatcgacataccatctatcaaacaaaacttgggtttaatttctcccggagatgtttcataatagtacgtataactttcttctgcaaacttaacagctctattatattcaggataattaaaacctaattccatatatttgtctcgtatatctgctattcctggtgctattttaattctattaagagtaacggctgcccccattcttaataatcgtcagtatttaaactgttaaatgttggtatatcaacatctaccttatttcccgcagtataaggtttgttgcaggtatactgttcaggaatggttacatttatacttcttctatagtcctgtctttcgatgttcatcacatatgcaaagaacagaataaacaaaataatgtaagaaataatattaaatatctgtgaattcgtaaatacattgattgccataataattacagcagctacaatacatacaatagacattcccacagtgttgccattacctccacgatacatttgagttactaagcaataggtaataactaagctagtaagaggcaatagaaaagatgagataaatatcatcaatatagagattagaggagggctatatagagccaagacgaacaaaatcaaaccgagtaacgttctaacatcattatttttgaagattcccaaataatcattcattcctccataatcgttttgcattatacctccatctttaggcataaacgattgctgctgttcctctgtaaataaatctttatcaagcactccagcacccgcagagaagtcgtcaagcatattgtaatatcttaaataactcatttatatattaaaaaatgtcactattaaagatggagtataatctttatgccgaactaaaaaaaatgacttgtggtcaacccctaagtctttttaacgaagacggggatttcgtagaagttgaaccgggatcatcctttaagtttctgatacctaagggattttacgcctctccttccgtaaagacgagtctagtattcgagacattaacaacgaccgataataaaatcactagtatcaatccaacaaatgcgccaaagttatatcctcttcaacgcaaagtcgtatctgaagtagtttctaatatgaggaaaatgatcgaatcaaaacgtcctctatacattactcttcacttggcgtgtggatttggtaagactattaccacgtgttatcttatggctacacacggtagaaaaaccgtcatttgcgtacccaataaaatgttaatacatcaatggaagacacaggtagaggcagtcggattggaacataagatatctatagatggagtaagtagtctattaaaggaactaaagactcaaagtccggatgtattaatagtagtcagtagacatctgacaaacgatgccttttgtaaatatatcaataagcattatgatttgttcatcttggatgaatcacatacgtataatctgatgaacaatacagcagttacaagatttttagcgtattatcctccgatgatgtgttattttttaactgctacacctagaccagctaaccgaatttattgtaacagtattattaatattgccaagttatccgatctaaaaaaaactatctatgcggtagatagtttttttgagccatattccacagacaatattagacatatggtaaaacgactagatggaccatctaataaatatcatatatatactgagaagttattatctgtagacgagcctagaaatcaacttattcttgataccctggtagaagaattcaagtcaggaactattaatcgaattttagttattactaaactacgtgaacatatggtattcttctacaaacgattattagattttttcggatcagaggttgtatttataggagacgcccaaaatagacgtactccagatatggtcaaatcaatcaaggaactaaatagatttatattcgtatccaccttattttattccggtactggtttagatattcctagtttggattcgttgttcatttgctcggcagtaatcaacaatatgcaaatagagcaattactagggagggtatgtcgagaaacagaactattagataggacggtatatgtatttcctaacacatccatcaaagaaataaagtacatgataggaaatttcatgcaacgaattattagtctgtctgtagataaactaggatttaaacaaaaaagttatcggaaacatcaagaatccgatcccacttctgtatgtacaacatcctccagagaagaacgtgtattaaatagaatatttaactcgcaaaatcgttaagaagtttaagcgacgatccgcatgctgcgcaggccagtgtattacccctcatagtattaatataatccaatgatacttttgtgatgtcggaaatcttaaccaatttagactgacaggcagaacacgtcatgcaatcatcatcgtcatcgataactgtagtcttgggcttctttttgcggctcttcattccggaacgcacattggtgctatccatttaggtagtaaaaaataagtcagaatatgccctatagcacgatcgtgcaaaacctggtatatcgtctctatctttatcacaatatagtgtatcgacatttttattattattgacctcgtttatcttggaacatggaatgggaacatttttgttatcaacggccatctttgccttaattccagatgttgtaaaattataactaaacagtctatcatcgacacaaatgaaattcttgtttagacgtttgtagtttacgtatgcggctcgttcgcgtctcattttttcagatattgcaggtactataatattaaaaataagaatgaaataacataggattaaaaataaagttatcatgacttctagcgctgatttaactaacttaaaagaattacttagtctgtacaaaagtttgaaattttcagattctgcggctatagaaaagtataattctttggtagaatggggaacatctacttactggaaaataggcgtgcaaaaggtagctaatgtcgagacgtcaatatctgattattatgatgaggtaaaaaataaaccgtttaatattgatccgggatattacattttcttaccggtatattttggaagcgtctttatttattcgaagggtaaaaatatggtagaacttggatctggaaactcttttcaaataccagatgatatgcgaagtgcgtgtaacaaagtattagacagcgataacggaatagactttctgagatttgttttgttaaacaatagatggataatggaagatgctatatcaaaatatcagtctccagttaatatatttaaactagctagtgagtacggattaaacatacccaaatatttagaaattgaaatagaggaagacacattatttgacgacgagttatactctattatagaacgctctttcgatgataaatttccaaaaatatccatatcgtatattaagttgggagaacttagacggcaagttgtagactttttcaaattctcgttcatgtatattgagtccatcaaggtagatcgtataggagataatatttttattcctagcgttataacaaaatcaggaaaaaagatattagtaaaagatgtagaccatttaatacgatccaaggttagagaacatacatttgtaaaagtaaaaaagaaaaacacattttccattttatacgactatgatggaaacggaacagaaactagaggagaagtaataaaacgaattatagacactataggacgagactattatgttaacggaaagtatttctctaaggttggtagtgcaggcttaaagcaattgactaataaattagatattaatgagtgcgcaactgtcgatgagttagttgatgagattaataaatccggaactgtaaaacgaaaaataaaaaaccaatcagcatttgatttaagcagagaatgtttgggatatccagaagcggattttataacgttagttaataacatgcggttcaaaatagaaaattgtaaggttgtaaatttcaatattgaaaatactaattgtttaaataacccgagtattgaaactatatatggaaactttaaccagttcgtctcaatctttaatatcgtcaccgatgtcaaaaaaagattattcgagtgaaataatatgcgcctttgatataggtgcaaaaaatcctgccagaactgttttagaagtcaaggataactccgttagggtattggatatatcaaaattagactggagttctgattgggaaaggcgcatagctaaagatttgtcacaatatgaatacactacagttcttctagaacgtcagcctagaaggtcgccgtacgtcaaatttatctattttattaaaggctttttatatcatacatcggctgccaaagttatttgcgtctcgcctgtcatgtctggtaattcatatagagatcgaaaaaagagatcggtcgaagcatttcttgattggatggacacattcggattgcgagactccgttccggatagacgcaaattagacgatgtagcggatagtttcaatttggctatgagatacgtattagataaatggaatactaattatacaccttataataggtgtaaatctagaaattacataaaaaaaatgtaataacgttagtaacgccattatggataatctatttacctttctacatgaaatagaagatagatatgccagaactatttttaactttcatctaataagttgcgatgaaataggagatatatatggtcttatgaaagaacgcatttcctcagaggatatgtttgataatatagtgtataataaagatatacatcatgccattaagaaactagtgtattgcgacatccaacttactaaacacattattaatcagaatacgtatccggtatttaacgattcttcacaagtgaaatgttgtcattatttcgacataaactcagataatagcaatattagctctcgtacagtagagatatttgagagggaaaagtcatctcttgtatcatatattaaaactaccaataagaagagaaaggtcaattacggcgaaataaagaaaactgttcatggaggcactaatgcaaattacttttccggtaaaaagtctgacgagtatctgagtactacagttagatccaacattaatcaaccttggatcaaaaccatctctaagaggatgagagttgatatcattaatcactctatagtaacgcgtggaaaaagctctatattacaaactatagaaattatttttactaatagaacatgtgtgaaaatattcaaggattctactatgcacattattctatccaaggacaaggatgaaaaggggtgtatacacatgattgacaaattattctatgtctattataatttatttctgttgttcgaggatatcatccaaaacgagtactttaaagaagtagctaatgttgtaaaccacgtacttacggctacggcattagatgagaaattattcctaattaagaaaatggctgaacacgatgtttatggagttagcaatttcaaaatagggatgtttaacctgacatttattaagtcgttggatcataccgttttcccctctctgttagatgaggatagcaaaataaagttttttaaggggaaaaagctcaatattgtagcattacgatctctggaggattgtataaattacgtgactaaatccgagaatatgatagaaatgatgaaggaaagatcgactattttaaatagcatagatatagaaacggaatcggtagatcgtctaaaagaattgcttctaaaatgaaaaaaaacactgattcagaaatggatcaacgactcggatataagtttttggtgcctgatcctaaagccggagttttttatagaccgttacatttccaatatgtatcgtattctaattttatattgcatcgattgcatgaaatcttgaccgtcaagcggccactcttatcgtttaagaataatacagaacgaattatgatagaaattagcaatgttaaagtgactcctccagattactcacctataatcgcgagtattaaaggtaagagttatgacgcattagccacgttcactgtaaatatctttaaagaggtaatgaccaaagagggtatatccatcactaaaataagtagttatgagggaaaagattctcatttgataaaaattccgctactaataggatacgggaataaaaatccacttgatacagccaagtatcttgttcctaatgtcataggtggagtctttatcaataaacaatctgtcgaaaaagtaggaattaatctagtagaaaagattacaacatggccaaaatttagggttgttaagccaaactcattcactttctcgttttcctccgtatcccctcctaatgtattaccgacaagatatcgccattacaagatatctctggatatatcacaattggaagcgtcgaatatatcatcgacaaagacatttataacggtcaatattgttttgctgtctcaatatttatctagagtgagtctagaattcattagacgtagcttatcatacgatatgcctccagaagttgtctatctagtaaacgcgataatagatagtgctaaacgaattactgaatctattactgactttaatattgatacatacattaatgacctggtggaagctgaacacattaaacaaaaatctcagttaacgatcaacgagttcaaatatgaaatgctgcataactttttacctcatatgaactatacacccgatcaactaaagggattttatatgatatctttactaagaaagtttctctactgtatctaccacacttctagatatccagatagagattcgatggtttgtcatcgtatactaacatacggcaaatattttgagacgttggcacatgatgaattagagaattacataggcaacatccgaaacgatatcatgaacaatcacaagaacagaggcacttacgcggtaaacattcatgtactaacaactcctggacttaatcatgcattttctagtctattgagtggaaagttcaaaaagtcagacggtagttatcgaacacatcctcactattcatggatgcagaatatttctattcctaggagtgttggattttatccggatcaagtaaagatttcaaagatgttttctgtcagaaaataccatccaagtcaatatctttacttttgttcatcagacgttccggaaagaggtcctcaggtaggtttagtatctcaattgtctgtcttgagttccattacaaatatactaacgtctgagtatttggatttggaaaagaaaatttgtgagtatatcagatcatattataaagatgatataagttactttgaaacaggatttccaatcactatagaaaatgctctagtcgcatctcttaatccaaatatgatatgtgattttgtaactgactttagacgtagaaaacggatgggattcttcggtaacttggaggtaggtattactttagttagggatcacatgaatgaaattcgcattaatattggagcgggaagattagtcagaccattcttggttgtggataacggagagctcatgatggatgtgtgtccggagttagaaagcagattagacgacatgacattctctgacattcagaaagagtttccgcatgtcatcgaaatggtagatatagaacaatttacttttagtaacgtatgtgaatcggttcaaaaatttagaatgatgtcaaaggatgaaagaaagcaatacgatttatgtgactttcctgccgaatttagagatggatatgtggcatcttcattagtgggaatcaatcacaattctggacccagagctattcttggatgtgctcaagctaaacaagctatctcttgtctgagctcggatatacgaaataaaatagacaatggaattcatttgatgtatccagagaggccaatcgtgattagtaaggctttagaaacttcaaagattgcggctaattgcttcggccaacatgttactatagcattaatgtcgtacaaaggtatcaatcaagaggatggaattatcatcaaaaaacaatttattcagagaggcggtctcgatattgttacagccaagaaacatcaagtagaaattccattggaaaactttaataacaaagaaagagataggtctaacgcctattcaaaattagaaagtaatggattagttagactgaatgctttcttggaatccggagacgctatggcacgaaatatctcatcaagaactcttgaagatgattttgctagagataatcagattagcttcgatgtttccgagaaatataccgatatgtacaaatctcgcgttgaacgagtacaagtagaacttactgacaaagttaaggtacgagtattaaccatgaaagaaagaagacccattctaggagacaaatttaccactagaacgagtcaaaagggaacagtcgcgtatgtcgcggatgaaacggaacttccatacgacgaaaatggtatcacaccagatgtcattattaattctacatccatcttctctagaaaaactatatctatgttgatagaggttattttaacagccgcatattctgctaagccgtacaacaataagggagaaaaccgacctgtctgttttcctagtagtaacgaaacatccatcgatacatatatgcaattcgctaaacaatgttatgagcattcaaatccgaaattgtctgatgaagaattatcggataaaatcttttgtgaaaagattctctatgatcctgaaacggataagccttatgcatccaaagtattttttggaccaatttattacttgcgtctgagacatttaactcaggacaaggcaaccgttagatgtagaggtaaaaagacgaagctcattagacaggcgaatgagggacgaaaacgtggaggaggtatcaagttcggagaaatggagagagactgtttaatagcgcatggtgcagccaatactattacagaagttttgaaagattcggaagaagattatcaagatgtgtatgtttgtgaaaattgtggagacatagcagcacaaatcaagggtattaatacatgtcttagatgttcaaaacttaatctctctcctctcttaacaaaaattgataccacacacgtatctaaagtatttcttactcaaatgaacgccagaggcgtaaaagtcaaattagatttcgaacgaagacctccttcgttttataaaccattagataaagttgatctcaaaccgtcttttctggtctaatattgtttagtagatacttatcaacatcatcaagattatcaagattatcaagattatcaagataagctaattcactaaacacattatcgatttcggtatcgttactcgcagaataaagttcgttatgatcctgatattcggaaatctgtggagtttcaggttttggtggatgtgtaacagctacttgagataccgaagtctgatattcagaaagctgtggatgttctggttcggcatccaccgatggtgttacaccactactaattggttcagtaacgtctgtggacgatggaggcaccacttctacaggttctggttctttatcctcagtcatcaacggagctacttcaatgcgaggaaatgtataatttggtaatggtttctcatgtggatctgaagaagaggtaagatatctactagaaagataccgatcacgttctagttctcttttgtagaacttaactttttctttctcagcatctagttgatattccaacctcttcacgttactacgttcagatttcaattcacgttcgcatgggttacctccgcagtttttacgagcgatttcacgttcagccttcatgcgtctctccctctctctatcgagtttatcagagcagtctttctgaaggcgatcgaactccataaatttctccaacgctttgattgtttccatagatttccgaagttcagcttttaggactgtgattctttttctttcgaattcacagctggatgtacaaccgtttccattaccgccatctctaagtttcttttctagatcggcaacatttcatccccatgccttttacattcctcgagtctactgtcgtcgaaatatcgttccagctccttttcgacatcaataactttagcacgttgtctctcaagctctcttttgtagttatctgattccctggcacgtttaagatcttcatgcaattgagtcagctcttaacacaatctcttgcttcttcgtcatagtacgcgcaatcactgtgagatccattgttaccacgtctacactcggcgagctcgcgtttaagagattcaatttcccgtttgtattggtccatgtttccattgctaccaccattagatttacaggctgctagttgtcgttcgagatcagaaatacgggttttcttggaattgatttcgtcgatgtacttggcatcgaaacacttattaagttctttttccaattctacgattttatttctttcgcgagtcaattccctcctgtagtaactatctgttttgtcagattcacgctctctacgtagactttcttgcaagttactaatttgttccctagcacgtccgagtttagttttatatgctgaatagagttctgattcatcctttgagcagatctctagcgatcgtttaagattcctgattctagtctttagcctatttacctcctcagaagatgttccgttaccgttgcgtttacactcgttaagctgtctatcaagatccatgattctatctctaagacgttgcatctctctttccatatcagcattgctttcattattacgtctgcagtcactcaactgtctttcaatatctgagattctatctctaagacgtcgcatctctctctgtttcggcattggtttcattattacgtctacagtcgttcaactgtctttcaagatctgatattctagattggagtctgctaatctctgtagcattttcacggcattcactcagttgtctttcaagatctgaaattttagattggagtctgctaatctctgtaagatttcctcctccgctctcgatgcagtcggtcaacttattctctagttctctaatacgcgaacgcagtgcatcaacttcttgcgtgtcttcctggttgcgtgtacattcatcgagtctagattcgagatctctaacgcgtcgtcgttcttcctcaagttctctgcgtactacagaaagcgtgtccctatcttgttgatatttagcaatttctgattctagagtactgattttgcttacgtagttactaatatttgtcttggccttatcaagatcctccttgtatttgtcgcattccttgatatccctacgaagtctggacagttcccattcgacattacgacgtttatcgatttcagctcggagatcgtcatcgcgttgttttagccacatacgactgagttcaagttctcgttgacaagatccatctacttttccattcctaatagtatccagttccttttctagttctgaacgcatttctcgttccctatcaagcgattctctcaattctcggatagtcttcttatcaatttctaataaatctgaaccatcatctgtcccattttgaatatccctgtgttctttgatctcttttgtaagtcggtcgattctttcggttttataaacagaatccctttccaaagtcctaatcttactgagtttatcactaagttctgcattcaattcggtgagttttctcttggcttcttccaactctgttttaaactctccactatttccgcattcttcctcgcatttatctaaccattcaattagtttattaataactagttggtaatcagcgattcctatagccgttcttgtaattgtgggaacataattaggatcttctaatggattgtatggcttgatagcatcatctttatcattattagggggatggacaaccttaattggttggtcctcatctcctccagtagcgtgtggttcttcaatagccgtgttagtaataggcttaggcaaatgcttgtcgtacgcgggcacttcctcatccatcaagtatttataatcgggttctacgtctgaatattcttttctaagagacgcaacttctggagttagtagaagaactctgtttctatatctatcaacgctggaatcaatactcaagttaaggatagcgaatacctcatcgtcatcatccgtatcctctgaaacgccatcatatgacatttcatgaagtctaacgtattgataaacagaatcagatttagtattaaacagatccttaacctttttagtaaatgcatatgtatattttagatctccagatttcataatatggtcgcatgccttaaatgtcagtgcttccataatatagtctggaacactaattggtgatgaaaaagataccggaccatatgctacgttgataaataactctgagccactaactagataatgattaatgttaaggaagaggaaatattcagtgtataggtatgtcttggcgtcatatcttgtactaaacacgctaaacagtttgttaatgtgatcaatttccaatagattaattagagcagcaggaataccaacaaacatattaccacatccgtattttctatgaatatcacatatcatgttaaaaaatcttgatagaagagcgaatatctcgtctgacttaatgagtcgtagttcagcagcaacataagtcataactgtaaatagaacatactttcctgtagtgttgattctagactccacatcaacaccattattaaaaatagttttatatacatctttaatctgctctccgttaatcgtcgaacgttctagtatacggaaacactttgatttcttatctgtagttaatgacttagtgatatcacgaagaatattacgaattacatttcttgtttttcttgagagacctgattcagaactcaactcatcgttccatagtttttttacctcagtggcgaaatctttggagtgcttggtacatttttcaataaggttcgtgacctccatttattataaaaaaattttattcaaaacttaactacaatcgggtaattataaaatcgtagatctcccatgtggtggaatactaccatctatcgcatgtggatggacagtaggtaatggccatgggaacagtaatgtttgcatatttatctttcttgccagtattactgcatattgtcccaatgtttcgatgtgatgttctaacctatcaactgccgctgtatcacaacaatagtgtccgatgaaattaagattatgatccaatgtgtttaatatatgattatcaagtcttatacgatccgcgtcttttttgacaggatcaggttcttctacaggaagaagtttcggcctcttatgatattcatgtctgggaaacggtggtctagggtgaggctccggtatcggagtgggttttggattataatcatcatcgtctatgacatcatcttcgacttcgatatttattttgctatcttgatgatgtcctgtatcagttgcattttcagcactcgactgaatattagcgcattcattgtttattattaccatatttctaaacccaaaatgtatatgttgaacatcagtactatcgttgatgagtcttatagcatgaattcgcttatcgttatcgggtttagcttctgtcaccttagcaattccttttttattaaactctacataatcatatccatttctattgtttgttctaatataaacgagtatagcatcattgctaaatttttcaatagtatcgaaaacagaatatcctaaaccatataatatatattcaggaacactcaaactaaatgtccaggattctcctaaatacgtaaactttaatagtgcgaaatcattcaaaaatctaccacttatagatagatagtacataaatgcgtatagtagtctacctatctctttattatgaaaaccggcattacgatcatatatgtcgtgatatacctgtgatccgtttacgttaaaccataaatacatgggtgatcctataaacatgaatttatttctaattctcagagctatagttaattgaccgtgtaatatttgcttacatgcatacttgatacgctcattaataagatttttatcattgctcgttatctcagaatcgtatatataaggagtaccatcgtgattcttaccagatattatacaaaatactatatataaaatatattgaccaacgttagtaatcatataaatgtttaacgttttaaattttgtattcaatgatccattatcatacgctagcatggtcttatgatattcattctttaaaatataatattgtgttagccattgcattggggctcctaatggagattttttattctcatccattttaggataggctttcataaagtccctaataacttcgtgaataatgtttctatgttttctactgatgcatgtatttgcttcgatttttttatcccatgtttcatctatcatagatttaaacgcagtaatgctcgcaacattaacatcttgaaccgttggtacaattccgttccataaatttataatgttcgccatttatataactcattttttgaatatacttttaattaacaaaagagttaagttactcatatggacgccgtccagtctgaacatcaatctttttagccagagatatcatagccgctcttagagtttcagcgtgattttccaacctaaatagaacttcatcgttgcgtttacaacacttttctatttgttcaaactttgttgttacattagtaatctttttttccaaattagttagccgttgtttgagagtttcctcattgtcgtcttcatcggctttaacaattgcttcgcgtttagcctctggctttttagcagcctttgtagaaaaaaattcagttgctggaattgcaagatcgtcatctccggggaaaagagttccgtccatttaaagtacagattttagaaactgacactctgcgttatttatatttggtacaacacatggattataaatattgatgttaataacatcagaaaatgtaaagtctatacattgttgcatcgtgttaaattttctaatggatctagtattattgggtccaacttctgcctgaaatccaaatatggaagcggatacaaaaccgtttcctggataaaccacacatctccacttttgctttacatcagaaattgtgtcattgacatcttgaactctcctatctaatgccggtgttccacctatagattttgaatattcgaatgctgcatgagtagcattaaattccttaatattgccataattttcatatattgagtaaccctggataaaaagtaaacacaccgcagccgtcgctaccacaataaaaaaaattgatagagagttcatttataatctattagaagctgacaaaatttttttacacgcatcagacaatgctttaataaatagttcaacatctacttttgtcatatcgaaccgatggtatgattctaacctagaattacatccgaaaaagttgactatgttcatagtcattaagtcattaacaaacaacattccagactctggattataagacgatactgtttcgtcacaattacctaccttaatcatgtgattatgaatattggctattagagcaccttctaagaaatctataatatctttgaaacacgatttaaaatcaaaccacgaatatacttctacgaagaaagttagtttacccataggagaaataactataaatggagatctaaatacaaaatccggatctatgatagttttaacattattatattctctattaaatacctccacatctaaaaatgttaattttgaaactatgtcttcgtttattaccgtacctgaactaaacgctataagctctattgtttgagaactctttaaacgatattcttgaaatacatgtaacaaagtttcctttaactcggtcggtttatctaccatagttacagaatttgtatccttatctataatataataatcaaaatcgtataaagttatataattatcgcgttcagattgtgatcttttcaaatagactaaaaaccccatttctctagtaagtatcttatgtatatgtttgtaaaatatcttcatggtgggaatatgctctaccgcagttagccattcctcattgacagcggtagatgtattagacaaaactattccaatgtttaacaagggccattttacgagattattaaatccttgtttgataaatgtagccaatgagggttcgagttcaacgacgattgaattctcttcccgcggatgctgcatgatgaacgacgggatgttgttcgattgatttggaattctttttcgactttttgtttatattaaatattttaaaatttatagctgatagcaattcatgtactacggataatgtagacgcgtattgcgcatcgatatctttattattagataaatttatcaataaatgtgagaagtttgcctcgttaaggtcttccatttaaatattatataaacatttgtgtttgtatcttattcgtcttttatggaatagttttttactagtaaagctgcaattacacactttgtccgtaaaacataaatataaacaccagcttttatcaatcgttccaaaaagtcgacggcggacatttttaacatggcatctattttaaatacacttaggtttttggaaaaaacatcattttataattgtaacgattcaataactaaagaaaagattaagattaaacataagggaatgtcatttgtattttataagccaaagcattctaccgttgttaaatacttgtctggaggaggtatatatcatgatgatttggttgtattggggaaggtaacaattaatgatctaaagatgatgctattttacatggatttatcatatcatggagtgacaagtagtggagcaatttacaaattgggatcgtctatcgatagactttctctaaataggactattgttacaaaagttaataattatgatgatacattttttgacgacgatgattgatcgctattgcacaattttgtttttttactttctaatatagcgtttagattctttttcatgtgcgaatattgatttactaaaatatcgatgtttaacttttgttctatgacgtccttatcagcggtatcggtacatatacgtaattcaccttcacaaaatacggagtcttcgataataatagccaatcgattattggatctagcggtctgtatcatattcaacatgtttaatatatcctttcgtttcccctttacaggcatcgatcgtagcatattttccgcgtctgagatggaaatgttaaaactacaaaaatgcgtaatgttagcccgtcctaatattggtacgtgtctataagtttggcatagtagaataatagacgtgtttaaatgccttccaaagtttaagaattctattagagtattgcattttgatagtttatcgcctacatcatcaaaaataagtaaaaagtgtgctgattttttatgattttgtgcgacagcaatacatttttctatgttacttttagttcgtatcagattatattctagagattcctgactactaacgaaattaatatgatttggccaaatgtatccatcataatctggattataaacgggtgtaaacaagaatatatgtttatattttttaactagtgtagaaaacagagatagtaaatagatagtttttccagatccagatcctcccgttaaaaccattctaaacggcatttttaataaattttctcttgaaaattgtttttcttggaaacaattcataattatatttacagttactaaattaatttgataataaatcaaaatatggaaaactaaggtcgttagtagggaggagaacaaagaaggcatatcgtgatataaataacatttattatcatgatgacaccagaaaacgacgaagagcagacatctgtgttctccgctactgtttacggagacaaaattcagggaaagaataaacgcaaacgcgtgattggtctatgtattagaatatctatggttatttcactactatctatgattaccatgtccgcgtttctcatagtgcgcctaaatcaatgcatgtctgctaacgaggctgctattactgacgccgctgttgccgttgctgctgcatcatctactcatagaaaggttgcgtctagcactacgcaatatgatcacaaagaaagctgtaatggtttatattaccagggttcttgttatatattacattcagactaccagttattctcggatgctaaagcaaattgcactgcggaatcatcaacactacccaataaatccgatgtcttgattacctggctcattgattatgttgaggatacatggggatctgatggtaatccaattacaaaaactacatccgattatcaagattctgatatatcacaagaagttagaaagtatttttgtgttaaaacaatgaactaatatttatttttgtacattaataaatgaaatcgcttaatagacaaactgtaagtaggtttaagaagttgtcggtgccggccgctataatgatgatactctcaaccattattagtggcataggaacatttctgcattacaaagaagaactgatgcctagtgcttgcgccaatggatggatacaatacgataaacattgttatctagataccaacattaaaatgtctacagataatgcggtttatcagtgtcgtaaattacgagctagattgcctagacctgatactagacatctgagagtattgtttagtattttttataaagattattgggtaagtttaaaaaagaccaataataaatggttagatattaataatgataaagatatagatattagtaaattaacaaattttaaacaactaaacagtacgacggatgctgaagcgtgttatatatacaagtctggaaaactggttgaaacagtatgtaaaagtactcaatctgtactatgtgttaaaaaattctacaagtgacaacaaaaaatgaattaataataagtcgttaacgtacgccgccatggacgccgcgtttgttattactccaatgggtgttgactataacagatacattgtatgatgatctcgatatctcaatcatggactttataggaccatacattataggtaacataaaaactgtccaaatagatgtacgggatataaaatattccgacatgcaaaaatgctactttagctataagggtaaaatagttcctcaggattctaatgatttggctagattcaacatttatagcatttgtgccgcatacagatcaaaaaataccatcatcatagcatgcgactatgatatcatgttagatatagaagataaacatcagccattttatctattcccatctattgatgtttttaacgctacaatcatagaagcgtataacctgtatacagctggagattatcatctaatcatcaatccttcagataatctgaaaatgaaattgtcgtttaattcttcattctgcatatcagacggcaatggatggatcataattgatgggaaatgcaatagtaattttttatcataaaagttgtaaagtaaataataaaacaataaatattgaactagtagtacgtatattgagcaatcagaaatgatgctggtacctcttatcacggtgaccgtagttgcgggaacaatattagtatgttatatattatatatttgtaggaaaaagatacgtactgtctataatgacaataaaattatcatgacaaaattaaaaaagataaagagttctaattccagcaaatctagtaaatcaactgatagcgaatcagactgggaggatcactgtagtgctatggaacaaaacaatgacgtagataatatttctaggaatgagatattggacgatgatagcttcgctggtagtttaatatgggataacgaatccaatgttatggcgcctagcacagaacacatttacgatagtgttgctggaagcacgctgctaataaataatgatcgtaatgaacagactatttatcagaacactacagtagtaattaatgaaacggagactgttaaagtacttaatgaagataccaaacagaatcctaactattcatccaatcctttcgtaaattataataaaaccagtatttgtagcaagtcaaatccgtttattacagaacttaacaataaatttagtgagaataatccgtttagacgagcacatagcgatgattatcttaataagcaagaacaagatcatgaacacgatgatatagaatcatcggtcgtatcattggtgtgattagtttcctttttataaaattgaagtaatatttagtattattgctgccgtcacgttgtacaaatggagatattccctgtattcggcatttctaaaattagcaattttattgctaataatgactgtagatattatatagatacagaacatcaaaaaattatatctgatgagatcaatagacagatggatgaaacggtacttcttaccaacatcttaagcgtagaagttgtaaatgacaatgagatgtaccatcttattcctcatagattatcgacgattatactctgtattagttctgtcggaggatgtgttatctctatagataatgacgtcaatggcaaaaatattctaacctttcccattgatcatgctgtaatcatatccccactgagtaaatgtgtcgtagttagcaagggccctacaaccatactggttgctaaagcggatatacccagcaaacgattggtaacatcgtttacaaacgacatactgtatgtaaacaatctatcactgattaattatttgccgttgtctgtattcattattagacgagtcaccgactatttggatagacacatatgcgatcagatatttgctaataataagtggtattcccttataaccatcgacgataagcaatatcctattccatcaaattgtataggtatgtcttctgccaagtacataaattctagcatcgagcaagatactttaatacatgtttgtaacctcgagcatccattcgacttagtatacaaaaaaatgcagtcgtacaattctgtacctatcaaggaacaaatattgtacggtagaattgataatataaatatgagcattagtatttctgtggattaatagatttctagtatggggatcattaatcatctctaatctctaaatacctcataaaacgaaaaaaaagctattatcaaatactgtacggaatagattcattctcttctctttttatgaaactctgttgtatatctactgataaaactggaagcaaaaaatctgataaaaagaataagatcaagatcaaggattatatggaacacgattattataaaataacaatagttcctggttcctcttccacgtctactagctcgtggtattatacacatgcctagtaatagtctctttgcgttgatggaaagcagactagaaataacaggctaaaatgttcagacaccataatagttcccaacccagataataacagagtaccatcaacacattcctttaaactcaatcccaaacccaaaaccgttaaaatgtatccggccaattgatagtagataatgaggtgtacagcgcatgataatttacacagtaaccaaaatgaaaatactttagtaattataagaaatatagatggtaacgtcatcatcaacaatccaataatatgccggagagtaaacattgacggataaaacaaaaatgctccgcataactctatcatggcaataacacaaccaaatacttgtaagattcctaaattagtagaaaatacaacggatatcgatgtataagtgatctcgagaaataataagaataaagtaatgcccgtaaagataaacatcaacattgtttggtaatcattaaaccaattagtatgacgttgaactaatttcacagtaaattttattccagtattatccccgcatgtataagtacctggtaagatatctttatattccataatcaatgagacatcactatctgataacgaatgaagtctagcactagtatgccatttacttaatattgtcgtcttggaagttttattataagttaaaatatcatggttatccaatttccatctaatatactttgtcggattatctatagtacacggaataatgatggtatcattacatgctgtatactctatggtctttgtagttgttataacaaccaacgtatagaggtatatcaacgatattctaactcttgacattttttatttatttaaaatgatacctttgttatttattttattctattttgctaacggtattgaatggcataagtttgaaacgagtgaagaaataatttctacttacttattagacgacgtattatacacgggtgttaatggggcggtatacacattttcaaataataaactaaacaaaactggtttaactaataataattatataacaacatctataaaagtagaggatgcggataaggatacattagtatgcggaaccaataacggaaatcccaaatgttggaaaatagacggttcagacgacccaaaacatagaggtagaggatacgctccttatcaaaatagcaaagtaacgataatcagtcacaacggatgtgtactatctgacataaacatatcaaaagaaggaattaaacgatggagaagatttgacggaccatgtggttatgatttattcacggcggataacgtaattccaaaagatggtttacgaggagcattcgtcgataaagacggtacttatgacaaagtttacattcttttcactgatactatcggctcaaagagaattgttaaaattccgtatatagcacaaatgtgcctaaacgacgaaggtggtccatcatcgttgtctagtcatagatggtcgacgtttctcaaagtcgaattagaatgtgatatcgacggaagaagttatagataaattattcattctaaaactataaaaacagataatgatacgatactatatgtattcttcgatagtccgcattatgtacctattctatgaataccattaaacaatctttttctacgtcaaaattggaaggatatacaaagcaattgccgtctccagctcctggtatatgtctaccagctggaaaagttgttccacataccacgtttgaagtcatagaaaaatataatgtactagatgatattataaagcctttatctaaccaacctatcttcgaaggaccgtctggtgttaaatggttcgatataaaggagaaggaaaatgaacatcgggaatatagaatatacttcataaaagaaaattctatatattcgttcgatacaaaatctaaacaaactcgtagctcgcaagtcgatgcgcgactattttcagtaatggtaacttcgaaaccgttatttatagcagatatagggataggagtaggaatgccacaaatgaaaaaaatacttaaaatgtaatcttaatcgagtacaccacacgacaatgaacaaacataagacagattatgctggttatgcttgctgcgtaatatgcggtctaattgttggaattatttttacagcgacactattaaaagttgtagaacgtaaattagttcatacaccatcaatagataaaacgataaaagatgcatatattagagaagattgtcctactgactggataagctataataataaatgtatccatttatctactgatcgaaaaaacctgggaggaaggacgtaatgcatgcaaagctctaaatccaaattcggatctaattaagatagagactccaaacgagttaagttttttaagaagccttagacgaggctattgggtaggagaatccgaaatattaaaccagacaaccccatataattttatagctaaaaatgccacgaagaatggaactaaaaaacggaaatatatttgtagtacaacgaatactcccaaactgcattcgtgttacactatataacaattacactacatttttatcataacactacttcggttagatgttttagaaaaaaataaatatcgccgtaccgttcttgtttttataaaaataacaattaacaattatcaaattttttctttaatattttacgtggttgaccattcttggtggtaaaataatctcttagtgttggaatggaatgctgtttaatgtttccgcactcatcgtatattttgacgtatgcagtcacatcgtttacgcaatagtcagactgtagttctatcatgcttcctacatcagaaggaggaacagttttaaagtctcttggttttaatctattgccattagttttcatgaaatcctttgttttatccacttcacattttaaataaatgtccactatacattcttctgttaattttactagatcgtcatgggtcatagaatttataggttccgtagtccatggatccaaactagcaaacttcgcgtatacggtatcgcgattagtgtatacaccaactgtatgaaaattaagaaaacagtttaataaatcaacagaaatatttaatcctccgtttgatacagatgcgccatatttatggatttcggattcacacgttgtttgtctgaggtgttcgtctagtgttgcttctacgtaaacttcgattcccatatattctttattgtcagaatcgcataccgatttatcatcatacactgtttgaaaactaaatggtatacacatcaaaataataaataataacgagtacattctgcaatattgttatcgtaattggaaaattagtgttcgagtgagtcggattatgtgagtactggattgtatattttattttatattttgtaataagaataaaatgctaatgtcaagtttattccaatagatgtcttattaaaaaacatatataataaataacaatggctgaatggcataaaattatcgaggatatctcaaaaaataataagttcgaggatgccgccatcgttgattacaagactacaaagaatgttctagctgctattcctaacagaacatttgccaagattaatccgggtgaaattattcctctcatcactaatcgtaatattctaaaacctcttattggtcagaaatattgtattgtatatactaactctctaatggatgagaacacgtatgctatggagttgcttactgggtacgcccctgtatctccgatcgttatagcgagaactcataccgcacttatatttttgatgggtaagccaacaacatccagacgtgatgtgtatagaacgtgtagagatcacgctacccgtgtacgcgcaactggtaattaaaataaaaagtaatattcatatgtagtgtcaattttaaatgatgatgatgaaatggataatatccatattgacgatgtcaataatgccggtattggcatacagctcatcgatttttagatttcattcagaggatgtggaattatgttatgggcatttgtattttgataggatctataatgtagtaaatataaaatataatccgcatattccatatagatataattttattaatcgcacgttaaccgtagatgaactagacgataatgtcttttttacacatggttattttttaaaacacaaatatggttcacttaatcctagtttgattgtctcattatcaggaaacttaaaatataatgatatacaatgctcagtaaatgtatcgtgtctcattaaaaatttggcaacgagtacatctactatattaacatctaaacataagacttattctctacatcggtccacgtgtattactataataggatacgattctattatatggtataaagatataaatgacaagtataatgacatctatgattttactgcaatatgtatgctaatagcgtctacattgatagtgaccatatacgtgtttaaaaaaataaaaatgaactcttaattatgctatgctattagaaatggataaaatcaaaattacggttgattcaaaaattggtaatgttgttaccatatcgtataacttggaaaagataactattgatgttacacctaaaaagaaaaaagaaaaggatgtattattagcgcaatcagttgctgtcgaagaggcaaaagatgtcaaggtagaagaaaaaaatattatcgatattgaagatgacgatgatatggatgtagaaagcgcataatacgatctataaaaataagtatataataaatactttttatttacggtactcttgtagtggtgataccctactcaattatttttttaaaaaaatacttattctgattcttctagccatttccgtgttcgttcgaatgccacatcgacgttaaagataggggagtagttgaaatctagttctgcattgttggtacgcacctcaaatgtagtgttggatatcttcaacgtatagttgttgagtagtgatggttttctaaatagaattctcttcatatcattcttgcacgcgtacatttttagcatccatcttggaattctagatccttgttctattcccaatggtttcatcaatagaagattaaacatatcgtacgaacacgatggagagtaatcgtagcaaaagtaagcatttcctttaatcttagatcccggatactggatatattttgcagccaacacgtgcatccatgcagcatttcctacatatacccggctatgcaccgcgtcatcatcgactgtacgatacataatgttaccgtgttgcttacattgctcgtaaaagactttcgtcaatttgtctccttctccgtaaattccagtgggtcttaggcaacaagtatacaattttgctccattcatgattacggaattattggctttcataaccagttgctcggccatacgtttactttttgcgtatacatgtcctggtgatatatcataaagggtatgctcatggccgatgaatggatcaccgtgtttattgggtcctattgcttccatgctactagtatagatcaaatacttgattcctaggtccacacaagctgccaatatagtctgtgttccataatagtttactttcatgatttcattatcggtgtattttccaaatacatccactagagcagccgtatgaataatcagatttaccccatctagcgcttctctcaccttatcaaagtcgtttatatcacattgtatatagtttataaccttaactttcgaggttattggttgtggatcttctacaatatctatgactctgatttcttgaacatcatctgcactaattaacagttttactatatacctgcctagaaatccggcaccaccagtaaccgcgtacacggccattgctgccactcataatatcagactacttattctattttactaaataatggctgtttgtataatagaccacgataatatcagaggagttatttactttgaaccagtccatggaaaagataaagttttaggatcagttattggattaaaatccggaacgtatagtttgataattcatcgttacggagatattagtcaaggatgtgattccataggcagtccagaaatatttatcggtaacatctttgtaaacagatatggtgtagcatatgtttatttagatacagatgtaaatatatttacaattattggaaaggcgttatctatttcaaaaaatgatcagagattagcgtgtggagttattggtatttcttacataaatgaaaagataatacattttcttacaattaacgagaatggcgtttgatatatcagttaatgcgtctaaaacaataaatgcattagtttacttttctactcagcaaaataaattagtcatacgtaatgaagttaatgatacacactacactgtcgaatttgatagggacaaagtagttgacacgtttatttcatataatagacataatgacaccatagagataagaggggtgcttccagaggaaactaatattggttgcgcggttaatacgccggttagtatgacttacttgtataataagtatagttttaaactgattttagcagaatatataagacacagaaatactatatccggcaatatttattcggcattgatgacactagatgatttggctattaaacagtatggagacattgatctattatttaatgagaaacttaaagtagactccgattcgggactatttgactttgtcaactttgtaaaggatatgatatgttgtgattctagaatagtagtagctctatctagtctagtatctaaacattgggaattgacaaataaaaagtataggtgtatggcattagccgaacatatatctgatagtattccaatatctgagctatctagactacgatacaatctatgtaagtatctacgcggacacactgagagcatagaggatgaatttgattattttgaagacgatgattcgtctacatgttctgccgtaaccgacagggaaacggatgtataattttttttatagcgtgaaggatatgataaaaaatataattgttgtatttatcccattccaatcaccttatatgattctgtaaaaaaattatactgtaacacaataaaggagtcttatagatgtatagaggtcagatactggtttgataaactgtttattccacataagtatgtttgactttatggttagacccgcatactttaacaaatcactgaaaattggagttaggtattgacctctcagaatcagttgccgttctggaacattaaatgtattttttatgatatactccaacgcatttatgtgggcatacaacaagtcattactaatggagtattccaagagttttagttgtctagtatttaacaagagaagagatttcaacagactgtttatgaactcgaacgccgcctcattgtcgcttatattgatgatgtcgaattctcccaatatcatcactgatgagtagctcatcttgttatcgggatccaagttttctaaagatgtcattaaaccctcgatcatgaatggatttatcatcatcgtttttatgttggacatgagcttagtccgtttgtccacatctatagacgacgatttctgaattatttcatatatccctctctttaactccaggaacttgtcaggatggtctactttaatatgttctcgtctaagagatgaaaatctttggatggttgcacgcgacttttctttaaaggatgacgttgcccaagatcctctcttaaatgaatccatcttatccttggacaagatggacagtctattttccttagatggtttaatatttttgttacccatgatctataaaggtagacctaatcgtctcggatgaccatatatttattttcagttttattatacgcataaattgtaaaaaatatgttaggtttacaaaaatgtctcgtggggcattaatcgtttttgaaggattggacaaatctggaaaaacaacacaatgtatgaacatcatggaatctataccggcaaacacgataaaatatcttaactttcctcagagatccactgtcactggaaagatgatagatgactatctaactcgtaaaaaaacctataatgatcatatagttaatctattattttgtgcaaatagatgggagtttgcatcttttatacaagaacaactagaacagggaattactttaatagttgatagatacgcattttctggagtagcgtatgccgccgctaaaggcgcgtcaatgactctcagtaagagttatgaatctggattgcctaaacccgacttagttatattcttggaatctggtagcaaagaaattaatagaaacgtcggcgaggaaatttatgaagatgttacattccaacaaaaggtattacaagaatataaaaaaatgattgaagaaggagatattcattggcaaattatttcttctgaattcgaggaagatgtaaagaaggagttgattaagaatatagttatagaggctatacacacggttactggaccagtggggcaactgtggatgtaatagtgaaattacattttttataaatagatgttagtacagtgttataaatggatgaagcatattactctggcaacttggaatcagtactcggatacgtgtccgatatgcataccgaactcgcatcaatatctcaattagttattgccaagatagaaactatagataatgatatattaaacaaggacattgtaaattttatcatgtgtagatcaaacttggataatccatttatctctttcctagatactgtatatactattatagatcaagagatctatcagaccgaattgattaattcattagacgacaatgaaattatcgattgtatagttaacaagtttatgagcttttataaggataacctagaaaatatagtagatgctatcattactctaaaatatataatgaataatccagattttaaaactacgtatgccgaagtactcggttccagaatagccgatatagatattaaacaagtgatacgtaagaatatactacaattgtctaatgatatccgcgaacgatatttgtgaaaaatattaaaaaaaaatactttttttattaaatgacgtcgcttcgcgaatttagaaaattatgctgtgatatatatcacgcatcaggatataaagaaaaatctaaattaattagagactttataacagatagggatgataaatatttgatcattaagctattgcttcccggattagacgatagaatttataacatgaacgataaacaaattataaaattatatagtataatatttaaacaatctcaggaagatatgctacaagatttaggatacggatatataggagacactattaggactttcttcaaagagaacacagaaatccgtccacgagataaaagcattttaactttagaagaagtggatagttttttaactacgttatcatccgtaactaaagaatcgcatcaaataaaattattgactgatgtagcatctgtttgtacatgtaatgatttaaaatgtgtagtcatgcttattgataaagatctaaaaattaaagcgggccctcggtacgtacttaacgctattagtcctcatgcctatgatgtgtttagaaaatctaataacttgaaagagataatagaaaatgcatctaaacaaaatctagactctatatctatttctgttatgactccaattaatcccatgttagcggaatcgtgtgattctgtcaataaggcgtttaaaaaatttccatcaggaatgtttgcggaagtcaaatacgatggtgaaagagtacaagttcataaaaataataacgagtttgccttctttagtagaaacatgaaaccagtactctctcataaagtggattatctcaaagaatacataccgaaagcatttaaaaaagctacgtctatcgtattggattctgaaattgttcttgtagacgaacataatgtaccgctaccgtttggaagtttaggaatacacaaaaagaaagaatataaaaactctaacatgtgtttgttcgtgtttgactgtttgtactttgatggattcgatatgacggacattccattgtacgaacgaagatcttttctcaaagatgttatggttgaaatacccaatagaatagtattctcagagttgacgaatattagtaacgagtctcagttaactgacgtattggatgatgcactaacgagaaaattagaaggattggtcttaaaagatattaatggagtatacgaaccgggaaagagaagatggttaaaaataaagcgagactatttgaacgagggttccatggcagattctgccgatttagtagtactaggtgcctactatggtaaaggagcaaagggtggtatcatggcagtctttctaatgggttgttacgacgatgaatccggtaaatggaagacggttaccaagtgttcaggacacgatgataatacgttaagggagttgcaagaccaattaaagatgattaaaattaacaaggatcccaaaaaaattccagagtggttagtagttaataaaatctatattcccgattttgtagtagaggatccgaaacaatctcagatatgggaaatttcaggagcagagtttacatcttccaagtcccataccgcaaatggaatatccattagatttcctagatttactaggataagagaggataaaacgtggaaagaatctactcatctaaacgatttagtaaacttgactaaatcttaatagttacatacaaactgaaaattaaaataacaccatttagttggtggtcgccatggatggtgttattgtatactgtctaaacgcgttagtaaaacatggcgaggaaataaatcatataaaaaatgatttcatgattaaaccatgttgtgaaagagtttgtgaaaaagtcaagaacgttcacattggcggacaatctaaaaacaatacagtgattgcagatttgccatatatggataatgcggtatccgatgtatgcaattcactgtataaaaagaatgtatcaagaatatccagatttgctaatttgataaagatagatgacgatgacaagactcctactggtgtatataattattttaaacctaaagatgttattcctgttatcatatctataggaaaggataaagatgtctgtgaactattaatctcatcagacatatcgtgtgcatgcgtggagttaaattcatatcacgtagccattcttcccatgaatgtttccttttttaccaaaggaaatgcctcgttgattattctcctgtttgatttctctatcgatgcagcacctctcttaagaagtgtaaccgataataatgttattatatctagacaccagcgtctacatgacgagcttccgagttccaattggttcaagttttacataagtataaagtccgactattgttctatattatatatggttgttgatggatctgtgatgcatgcgatagctgataatagaactcacgcaattattagcaaaaatatattagacaatactacaattaacgatgagtgtagatgctgttattttgaaccacagattaggattcttgatagagatgagatgctcaatggatcatcgtgtgatatgaacagacattgtattatgatgaatttacctgatgtaggcgaatttggatctagtatgttggggaaatatgaacctgacatgattaagattgctctttcggtggctggtaatttaataagaaatcgagactacattcccgggagacgaggctatagctactacgtttacggtatagcctctagataatttttttaagcacgaaataaaaaacataattttaaaccaatctatttcatactattttgtgtgatcaccatggacataaagatagatattagtatttctggtgataaatttacggtgactactaggagggaaaatgaagaaagaaaaaaatatctacctctccaaaaagaaaaaactactgatgttatcaaacctgattatcttgagtacgatgacttgttagatagagatgagatgtttactattctagaggaatattttatgtacagaggtctattaggcctcagaataaaatatggacgactctttaacgaaattaaaaaattcgacaatgatgcggaagaacaattcggtactatagaagaactcaagcagaaacttagattaaattctgaagagggagcagataactttatagattatataaaggtacaaaaacaggatatcgtcaaacttactgtatacgattgcatatctatgataggattgtgtgcatgcgtggtagatgtttggagaaatgagaaactgttttctagatggaaatattgtttacgagcgattaaactgtttattaatgatcacatgcttgataagataaaatctatactgcagaatagactagtatatgtggaaatgtcatagaaagttaatgagagcaaaaatatataaggttgtattccatatttgttattttttctgtaatagttaaaaaaatacattcgatggtctatctatcagattattatgtgttataaggtactttttctcataataaactagagtatgagtaagatagtgtttttcaaaacatataaatctaaaattgatggatgagatatacagctattaatttcgaaaatatataaatctaaaattgatggataagatatacagctattaatttcgaaaatatattttaatctgataactttaaacatggatttttgatggtggtttaacgttttaaaaaaagattttgttattgtagtatatgataatattaaaagatggatataaagaatttgctgactgcatgtactattttttacattactacattggctacggcagatatacctactccgccaccaacgggtcatgtgacaagggagaatatcttgataagaggcataatcaatgttgtaatcggtgtccacctggagaatttgccaaggttagatgtaatggtaacgataacacaaaatgtgaacgctgcccacctcatacatataccacaatccccaattattctaatggatgtcatcaatgtagaaaatgcccaaccggatcatttgataaggtaaagtgtaccggaacacagaacagtaaatgttcgtgtcttcctggttggtattgcgctactgattcttcacagactgaagattgttgaaattgtgtaccaaaaaggagatgtccatgcggatactttggtggaatagatgaacaaggaaatcctatttgtaaatcgtgctgtattggtgaatattgcaactacctacgtaattatagacttgatccattttctccatgcaaactatctaaatgtaattaattatgattttgatgataatgttaccatacattatatcgctacttggttagtgtattattcagtatgaagacctattaataattacttatcttttgacgatcttgttataattataatataaaaacttatggcatagtaactcataattgctgacgcgataaattcgtaataatctgttttgttcaaatttttataaggaatctacaggcataaaaataaaaatataatttataatatactcttacagcgcgccatcatgaatagcagcagtaaattaattgctgttattaatggatttagaaatagtggacgattttgtgatattaatatagttattaatgatgaaaggataaacgctcacagactcatcctatctggagcctccgaatatttttccattctgttttccaataattttatcgattctaatgaatacgaagttaatctaagtcatttagattatcaaagtgttaacgatttgatcgattacatttatgggatacctttgagcctaactaacgataacgtgaaatatattctttcaaccgctgattttttacaaattggatctgccattactgagtgcgaaaaatacatacttaaaaatctttgttctagaaactgtatcgatttctacatatacgctgataaatataataacaagaaaatagaatcagcgtcgtttaacacaatattacgaaatattttgagactcatcaacgatgaaaactttaaatacttaacagaggaatcaatgataaaaattttaagcgatgatatgttaaatataaaaaatgaggattttgcaccactaattctcattaaatggttagagagtactcaacaatcatgcaccgtcgagttacttagatgcctcagaatatcattgctttccccacaagttataaaatcactttatagtcatcaactggttagttcaatctacgaatgtataacattcttaaacaatatagcattcttggatgaatcatttcctagataccatagcatcgagttgatatctatcggtataagtaattcgcatgataagatttccataaactgctacaatcataaaaaaaatacatgggaaatgatatcttcacgtagatataggtgtagtttcgcagtggccgtcctggataatattatctatatgatgggtggatatgatcagtccccgtatagaagttcaaaggttatagcgtacaatacatgtacaaattcttggatatatgatataccagagctaaaatatcctcgttctaattgtgggggactggctgatgacgaatacatttattgtataggcggcatacgcgatcaggattcatcgttgacatctagtattgatagatggaagccatcaaaaccatattggcagaagtatgctaaaatgcgcgaaccaaaatgtgatatgggggttgcgatgttaaacggattaatatatgtcatgggtggaatcgttaaaggtgacacgtgtaccgacgcactagagagtttatcagaagatggatggatgaagcatcaacgtcttccaataaaaatgtccaatatgtcgacgattgttcatgatggcaagatttatatatctggaggttacaacaatagtagtgtagttaatgtaatatcgaatctagtccttagctataatccgatatatgatgaatggaccaaattatcatcattaaacattcctagaattaatcccgctctatggtcagcgcataataaattatatgtaggaggaggaatatctgatgatgttcgaactaatacatctgaaacatacgataaagaaaaagattgttggacattggataatggtcacgtgttaccacgcaattatataatgtataaatgcgaaccgattaaacataaatatccattggaaaaaacacagtacacgaatgattttctaaagtatttggaaagttttataggtagttgatagaacaaaatacataattttgtaaaaataaatcactttttatactaatatgacacgattaccaatacttttgttactaatatcattagtatacgctacaccttttcctcagacatctaaaaaaataggtgatgatgcaactctatcatgtaatcgaaataatacaaatgactacgttgttatgagtgcttggtataaggagcccaattccattattcttttagctgctaaaagcgacgtcttgtattttgataattataccaaggataaaatatcttacgactctccatacgatgatctagttacaactatcacaattaaatcattgactgctagagatgccggtacttatgtatgtgcattctttatgacatcaactacaaatgacactgataaagtagattatgaagaatactccacagagttgattgtaaatacagatagtgaatcgactatagacataatactatctggatctacacattcaccagaaactagttctgagaaaccagaggatatagataattttaattgctcgtcggtattcgaaatcgcgactccggaaccaattactgataatgtagaagatcatacagacaccgtcacatacactagtgatagcattaatacagtaagtgcatcatctggagaatccacaacagacgagactccggaaccaattactgataaagaagaagatcatacagtcacagacactgtctcatacactacagtaagtacatcatctggaattgtcactactaaatcaaccaccgatgatgcggatctttatgatacgtacaatgataatgatacagtaccaccaactactgtaggcggtagtacaacctctattagcaattataaaaccaaggactttgtagaaatatttggtattaccgcattaattatattgtcggccgtggcaatattctgtattacatattatatatataataaacgttcacgtaaatacaaaacagagaacaaagtctagatttttgacttacataaatgtctgggatagtaaaatctatcatattgagcggaccatctggttcaggaaagacagccatagccaaaagactatgggaatatatttggatttgtggtgtcccataccactagatttcctcgtcctatggaacgagaaggtgtcgattaccattacgttaacagagaggccatctggaagggaatagccgccggaaactttctagaacatactgagtttttaggaaatatttacggaacttctaaaactgctgtgaatacagcggctattaataatcgtatttgtgtgatggatctaaacatcgatggcgttagaagtcttaaaaatacgtacctaatgccttactcggtgtatataagacctacctctcttaaaatggttgagaccaagcttcgttgtagaaacactgaagcggatgatgagattcatcgtcgtgtgatgttggcaaaaactgacatggatgaggcaggtgaagccggtctattcgacactattatcattgaagatgatgtgaatttagcatatagtaagttaattcagatactacaggaccgtattagaatgtattttaacactaattagagacttaagacttaaaacttgataattaataatataactcgtttttatatgtggctatttcaacgtctaatgtattagttaaatattaaaacttaccacgtaaaacttaaaatttaaaatgatatttcattgacagatagatcacacattatgaactttcaaggacttgtgttaactgacaattgcaaaaatcaatgggtcgttggaccattaataggaaaaggtggattcggtagtatttatactactaatgacaataattatgtagtaaaaatagagcccaaagctaacggatcattatttaccgaacaggcattttatactagagtacttaaaccatccgttatcgaagaatggaaaaaatctcacaatataaagcacgtaggtcttatcacgtgcaaggcatttggtctatacaaatccattaatgtggaatatcgattcttggtaattaatagattaggtgcagatctagatgcggtgatcagagccaataataatagattaccaaaaaggtcggtgatgttgatcggaatcgaaatcttaaataccatacaatttatgcacgagcaaggatattctcacggagatattaaagcgagtaatatagtcttggatcaaatagataagaataaattatatctagtggattacggattggtttctaaattcatgtctaatggcgaacatgttccatttataagaaatccaaataaaatggataacggtactctagaatttacacctatagattcgcataaaggatacgttgtatctagacgtggagatctagaaacacttggatattgtatgattagatggttgggaggtatcttgccatggactaagatatctgaaacaaagaattgtgcattagtaagtgccacaaaacagaaatatgttaacaatactgcgactttgttaatgaccagtttgcaatatgcacctagagaattgctgcaatatattaccatggtaaactctttgacatattttgaggaacccaattacgacgagtttcggcacatattaatgcagggtgtatattattaagtgtggtgtttggtcgatgtaaaatttttgtcgataaaaattaaaaaataacttaatttattattgatctcgtgtgtacaaccgaaatcatggcgatgttttacgcacacgctctcggtgggtacgacgagaatcttcatgcctttcctggaatatcatcgactgttgccaatgatgtcaggaaatattctgttgtgtcagtttataataacaagtatgacattgtaaaagacaaatatatgtggtgttacagtcaggtgaacaagagatatattggagcactgctgcctatgtttgagtgcaatgaatatctacaaattggagatccgatccatgatcaagaaggaaatcaaatctctatcatcacatatcgccacaaaaactactatgctctaagcggaatcgggtacgagagtctagacttgtgtttggaaggagtagggattcatcatcacgtacttgaaacaggaaacgctgtatatggaaaagttcaacatgattattctactatcaaagagaaggccaaagaaatgaatgcactcagttcaggacctatcatcgattaccacgtctggataggagattgtatctgtcaagttactgctgtggacgtacatggaaaggaaattatgagaatgagattcaaaaagggtgcggtgctacagatcccaaatctggtaaaagttaaacttggggagaatgatacagaaaatctttcttctactatatcggcggcaccatcgaggtaaccacctctcaagaagaccgcgtgaataatgtactcatgaaacgtttggaaactatacgccatatgtggtctgttgtatatgatcattttgatattgtgaatggtaaagaatgctgttatgtgcatacgcattcatctaatcaaaatcctataccgagtactgtaaaaacaaatttgtacatgaagactatgggatcatgcattcaaatggattccatggaagctctagagtatcttagcgaactgaaggaatcaggtggatggagtcccagaccagaaatgcaggaatttgaatatccagatggagtggaagacactgaatcaattgagagattggtagaggagttcttcaatagatcagaacttcaggctggtaaattagtcaaatttggtaattctattaattgttaaacatacatctgtttcagctaagcaactaagaacacgtatacggcagcagcttccttttatactctcatcttttaccaacacaaagggtggatatttgttcattggagttgataataatacacacaaagtatttggattcacggtgggttacgactacctcagactgatagagaatgatatagaaaagcatatcaaaagactttgtgttgtgcatttctgtgagaagaaagaggacatcaagtacacgtgtcgattcatcaaggtatataaacctggggatgaggctacctcgacatacgtgtgcgctatcaaagtggaaagatgctgttgtgctgtgtttgcagattggccagaatcatggtatatggatactaatggtatcaagaagtattctccagatgaatgggtgtcacatataaaattttaattaatgtaactatagagaacaaataataggttgtaatatcatatagacaataactaacaattaattagtaactgttatctcttttttaactaaccaactaactatatacctattaatacatcgtaattatagttcttaacatctattaatcattgattcgcttctttaattttttataaactaacattgttaattgaaaagggataacatgttacagaatataaattatatatggatttttttaaaaaggaaatacttgactggagtgtatatttatctcttcattatatagcacgcgtgtgttccaattcttccacatcccatataatacaggattataatctcgttcgaacatacgagaaagtggataaaacaatagttgattttttatctaggttgccaaatttattccatattttagaatatggggaaaatattctacatatttattctatggatgatgctaatacgaatattataattttttttctagatagagtattaaatattaataagaacgggtcatttatacacaatctcaggttatcatcatccattaatataaaagaatatgtatatcaattagttaataatgatcatccagataataggataagactaatgcttgaaaatggacgtagaacaagacattttttgtcctatatatcagatacagttaatatctatatatgtattttaataaatcatggattttatatagatgcagaagacagttacggttgtacattattacatagatgtatatatcactataagaaatcagaatcagaatcatacaatgaattaattaagatattgttaaataatggatccgatgtagataaaaaagatacgtacggaaacacaccttttatcctattatgtaaacacgatatcaacaacgtggaattgtttgagatatgtttagagaatgctaatatagactctgtagactttaatagatatacacctcttcattatgtctcatgtcgtaataaatatgattttgtaaagttattaatttctaaaggagcaaatgttaatgcgcgtaataaattcggaactactccattttattgtggaattatacacggtatctcgcttataaaactatatttggaatcagacacagagttagaaatagataatgaacatatagttcgtcatttaataatttttgatgctgttgaatctttagattatctattatccagaggagttattgatattaactatcgtactatatacaacgaaacatctatttacgacgctgtcagttataatgcgtataatacgttggtctatctattaaacagaaatggtgattttgagacgattactactagtggatgtacatgtatttcggaagcagtcgcaaacaacaacaaaataataatggaagtactattgtctaaacgaccatctttgaaaattatgatacagtctatgatagcaattactaaaaataaacaacataatgcagatttattgaaaatgtgtataaaatatactgcgtgtatgaccgattatgatactcttatagatgtacagtcgctacagcaatataaatggtatattttaaaatgtttcgatgaaatagatatcatgaagagatgttatataaaaaataaaactgtattccaattagttttttgtatcaaagacattaatactttaatgagatatggtaaacatccttctttcgtgaagtgcactagtctcgacgtatacggaagtcgtgtacgtaatatcatagcatctattagatatcgtcagagattaattagtctattatccaagaagctggatgcgggagataaatggtcgtgttttcctaacgaaataaaatataaaatattggaaaactttaacgataacgaactatccacatatctaaaaatcttataaacactattaaaatataaaatctaagtaggataaaatcacactacatcattgtttccttttagtgctcgacagtgtatactatttttaacactcataaataaaaatgaaaacgatttccgttgttacgttgttatgcgtactacctgctgttgtttattcaacatgtactgtacccactatgaataacgctaaattaacgtctaccgaaacatcgtttaatgataaacagaaagttacatttacatgtgatcagggatatcattctttggatccaaatgctgtctgcgaaacagataaatggaaatacgaaaatccatgcaagaaaatgtgcacagtttctgattatgtctctgaattatatgataagccattatacgaagtgaattccaccatgacactaagttgcaacggcgaaacaaaatattttcgttgcgaagaaaaaaatggaaatacttcttggaatgatactgttacgtgtcctaatgcggaatgtcaacctcttcaattagaacacggatcgtgtcaaccagttaaagaaaaatactcatttggggaatatatgactatcaactgtgatgttggatatgaggttattggtgcttcgtacataagttgtacagctaattcttggaatgttattccatcatgtcaacaaaaatgtgatataccgtctctatctaatggattaatttccggatctacattttctatcggtggcgttatacatcttagttgtaaaagtggttttatactaacgggatctccatcatccacatgtatcgacggtaaatggaatcccatactcccaacatgtgtacgatctaacgaaaaatttgatccagtggatgatggtcccgacgatgagacagatttgagcaaactctcgaaagacgttgtacaatatgaacaagaaatagaatcgttagaagcaacttatcatataatcatagtggcgttaacaattatgggcgtcatatttttaatctccgttatagtattagtttgttcctgtgacaaaaataatgaccaatataagttccataaattgctaccgtaaatataaatccgttaaaataattaataatttaataacaaacaagtatcaaaagattaaagacttatagctagaatcaattgagatgtcttcttcagtggatgttgatatctacgatgccgttagagcatttttactcaggcactattataacaagagatttattgtgtatggaagaagtaacgccatattacataatatatacaggctatttacaagatgcgccgttataccgttcgatgatatagtacgtactatgccaaatgaatcacgtgttaaacaatgggtgatggatacacttaatggtataatgatgaatgaacgcgatgtttctgtaagcgttggcaccggaatactattcatggaaatgtttttcgattacaataaaaatagtatcaacaatcaactaatgtatgatataattaatagcgtatctataattctagctaatgagagatatagaagcgcttttaacgacgatggtatatacatccgtagaaatatgattaacaagttgtacggatacgcatctctaactactattggcacgatcgctggaggtgtttgttattatctgttgatgcatctagttagtttgtataaataattatttcaatatactagttaaaattttaagattttaaatgtataaaaaactaataacgtttttatttgtaataggtgcattagcatcctattcgaataatgagtacactccgtttaataaactgagtgtaaaactctatatagatggagtagataatatagaaaattcatatactgatgataataatgaattggtgttaaattttaaagagtacacaatttctattattacagagtcatgcgacgtcggatttgattccatagatatagatgttataaacgactataaaattattgatatgtataccattgactcgtctactattcaacgcagaggtcacacgtgtagaatatctaccaaattatcatgccattatgataagtacccttatattcacaaatatgatggtgatgagcaacaatattctattactgcagagggaaaatgctataaaggaataaaatatgaaataagtatgatcaacgatgatactctattgagaaaacatactcttaaaattggatctacttatatatttgatcgtcatggacatagtaatacatattattcaaaatatgatttttaaaaatttaaaatatattatcacttcagtgacagtagtcaaataacaaacaacaccatgagatatattataattctcgcagttttgttcattaatagtatacacgctaaaataactagttataagtttgaatccgtcaattttgattccaaaattgaatggactggggatggtctatacaatatatcccttaaaaattatggcatcaagacgtggcaaacaatgtatacaaatgtaccagaaggaacatacgacatatccgcatttccaaagaatgatttcgtatctttctgggttaaatttgaacaaggcgattataaagtggaagagtattgtacgggactatgcgtcgaagtaaaaattggaccaccgactgtaacattgactgaatacgacgaccatatcaatttgtacatcgagcatccgtatgctactagaggtagcaaaaagattcctatttacaaacgcggtgacatgtgtgatatctacttgttgtatacggctaacttcacattcggagattctaaagaaccagtaccatatgatatcgatgactacgattgcacgtctacaggttgcagcatagactttgtcacaacagaaaaagtgtgcgtgacagcacagggagccacagaagggtttctcgaaaaaattactccatggagttcgaaagtatgtctgacacctaaaaagagtgtatatacatgcgcaattagatccaaagaagatgttcccaatttcaaggacaaaatggccagagttatcaagagaaaatttaataaacagtctcaatcttatttaactaaatttctcggtagcacatcaaatgatgttaccacttttcttagcatgcttaacttgactaaatattcataactaatttttattaatgatacaaaaacgaaataaaactgcatattatacactggttaacgcccttataggctctaaccattttcaagatgaggtccctgattatagtccttctgttcccctctatcatctactccatgtctattagacgatgtgagaagactgaagaggaaacatggggattgaaaatagggttgtgtataattgccaaagatttctatcccgaaagaactgattgcagtgttcatctcccaactgcaagtgaaggattgataactgaaggcaatggattcagggatatacgaaacaccgataaattataaaaaaagcaatgtgtccgctgtttccgttaataatactattttcgtaactggcggattattcataaataactctaatagcacgatcgtggttaacaatatggaaaaacttgacatttataaagacaaacaatggtcgattatagaaatgcctatggctagggtatatcacggcatcgactcgacatttggaatgttatattttgccggaggtctatccgttaccgaacaatatggtaatttagagaaaaacaacgagatatcttgttacaatcctagaacgaataagtggtttgatatttcatatactatttataagatatccatatcatcattgtgtaaactaaataacgtcttctatgtatttagtaaggacattggatatgtggaaaagtatgatggtgcatggaagttagtacatgatcgtctccccgctataaaggcattatcaacttctccttattgattgaaaatgaaaatataaatagtttttatgtatagcagtattaccctatagttttattgcttactactaacatggatacagatgttacaaatgtagaagatatcataaatgaaatagatagagagaaagaagaaatactaaaaaatgtagaaattgaaaataataaaaacattaacaagaatcatccaagtggatatattagagaagcactcgttattaatacaagtagtaatagtgattccattgataaagaagttatagaatgtatcagtcacgatgtaggaatatagatcatatctactaatttttataatcgatacaaaacataaaaaacaactcgttattacatagcaggcatggaatccttcaagtattgttttgataacgatggcaagaaatggattatcggaaatactttatattctggtaattcaatactatataaggtcagaaaaaatttcactagttcgttctacaattacgtaatgaaaatagatcacaaatcacacaagccattgttgtctgaaatacgattctatatatctgtattggatcctttgactatcgacaactggacacgggaacgtggtataaagtatttggctattccagatctgtatggaattggagaaaccgatgattatatgttcttcgttataaagaattcgggaagagtattcgccccaaaggatactgaatcagtcttcgaagcatgcgtcactatgataaacacgttagagtttatacactctcgaggatttacccatggaaaaatagaaccgaggaatatactgattagaaataaacgtctttcactaattgactattctagaactaacaaactatacaagagtggaaactcacatatagattacaacgaggacatgataacttcaggaaatatcaattatatgtgtgtagacaatcatcttggagcaacagtttcaaaacgaggagatttagaaatgttgggatattgcatgatagaatggttcggtggcaaacttccatggaaaaacgaaagtagtataaaagtaataaaacaaaaaaaagaatataaaaaatttatagctactttctttgaggactgttttcctgaaggaaatgaacctctggaattagttagatatatagaattagtatacacgttagattattctcaaactcctaattatgacagactacgtaaactgtttatacaagattgaaattatattctttttttatagagtgtggtagtgttacggatatctaatattaatattagactatctctatcgcgctacacgaccaatatcgattactatggatatcttcagggaaatcgcatcttctatgaaaggagagaatgtattcatttctccagcgtcaatctcgtcagtattgacaatactgtattatggagctaatggatccactgctgaacagctatcaaaatatgtagaaacggaggagaacacggataaggttagcgctcagaatatctcattcaaatccatgaataaagtatatgggcgatattctgccgtgtttaaagattcctttttgagaaaaattggcgataagtttcaaactgttgacttcactgattgtcgcactatagatgcaatcaacaagtgtgtagatatctttactgaggggaaaatcaatccactattggatgaaccattgtctcctgatacctgtctcctagcaattagtgccgtatactttaaagcaaaatggttgatgccattcgaaaaggaatttaccagtgattatcccttttacgtatctccgacggaaatggtagatgtaagtatgatgtctatgtacggcaaggcatttaatcacgcatctgtaaaggaatcattcggcaacttttcaatcatagaactgccatatgttggagatactagtatgatggtcattcttccagacaagattgatggattagaatccatagaacaaaatctaacagatacaaattttaagaaatggtgtaactctctggaagctacgtttatcgatgttcacattcccaagtttaaggtaacaggttcgtataatcttgtggatactctagtaaagtcaggactgacagaggtgttcggttcaactggagattatagcaatatgtgtaattcagatgtgagtgtcgacgctatgattcacaaaacgtatatagatgtcaatgaagagtatacagaagcagctgcagcaacttgtgcactggtgtcagactgtgcatcaacaattacaaatgagttctgtgtagatcatccgttcatctatgtgattaggcatgttgatggaaaaattcttttcgttggtagatattgctctccgacaactaattgttaaccattttttttaaaaaaatagaaaaaacatgtggtattagtgcaggtcgttgttcttccaattgcaattggtaagatgacggccaactttagtacccacgtcttttcaccacagcactgtggatgtgacagactgaccagtattgatgacgtcagacaatgtttgactgaatatatttattggtcgtcctatgcataccgcaacaggcaatgcgctggacagttgtattccacactcctctcttttagagatgatgcggaatcagtgttcatcgacattcgcgagctggtaaaaaatatgccgtgggatgatgtcaaagattgtacagaaatcatccgttgttatataccggatgagcaaaaaaccatcagagagatttcggccatcatcggactttgtgcatatgctgctacttactggggaggtgaagaccatcccactagtaacagtctgaacgcattgtttgtgatgcttgagatgctcaattacgtggattataacatcatattccggcgtatgaattgatgagttgtacatcttgacattttctttcttctcttctccctttcttctcttctcccttcctccctcttctccctttcccagaaacaaacttttttacccactataaaataaaatgagtatactacctattatatttcttcctatatttttttattcttcattcgttcagacttttaacgcgcctgaatgtatcgacaaagggcaatattttgcatcattcatggagttagaaaacgagccagtaatcttaccatgtcctcaaataaatacgctatcatccggatataatatattagatattttatgggaaaaacgaggagcggataatgatagaattataccgatagataatggtagcaatatgctaattctgaacccgacacaatcagactctggtatttatatatgcattaccacgaacgaaacctactgtgacatgatgtcgttaaatttgacaatcgtgtctgtctcagaatcaaatatagatcttatctcgtatccacaaatagtaaatgagagatctactggcgaaatggtatgtcccaatattaatgcatttattgctagtaacgtaaacgcagatattatatggagcggacatcgacgccttagaaataagagacttaaacaacggacacctggaattattaccatagaagatgttagaaaaaatgatgctggttattatacatgtgttttagaatatatatacagaggtaaaacatataacgtaaccagaattgtaaaattagaggtacgggataaaataataccttctactatgcaattaccagatggcattgtaacttcaataggtagtaatttgactattgcgtgtagagtatcgttgagacctcccacaacggatgcagacgtcttttggataagtaatggtatgtattacgaagaagatgatggggacggagacggtagaataagtgtagcaaataaaatctatatgaccgataagagacgtgttattacatcccggttaaacattaatcctgtcaaggaagaagatgctacaacgtttacgtgtatggcgtttactattcctagcatcagcaaaacagttactgttagtataacgtgaatgtatgttgttacatttccatgtcaattgagtttataagaatttttatacattatcttccaacaaacaattgacgaacgtattgctatgattaactcccacgatactatgcatattattaatcattaacttgcagactatacctagtgctattttgacatactcatgttcttgtgtaattgcggtatctatattattaaagtacgtaaatctagctatagttttattatttaattttagataatataccgtctccttatttttaaaaattgccacatcctttattaaatcatgaatgggaatttctatgtcatcgttagtatattgtgaacaacaagagcagatatctataggaaagggtggaatgcgatacattgatctatgtagttttaaaacacacgcgaactttgaagaatttatataaatcattccatcgatacatccttctatgttgacatgtatatatccaggaattcttttattaatgtcaggaaatgtataaactaaaacattgcccgaaagcggtgcctctatctgcgttatatccgttcttaacttacaaaatgtaaccaatacctttgcatgacttgttttgttcggcaacgttagtttaaacttgacgaatggattaattacaatagcatgatccgcgcatctattaagtttttttactttaacgcccttgtatgtttttacagagactttatctaaatttctagtacttgtatgtgttataaatataacgggatatagaactgaatcacctaccttagatacccaattacattttatcagatccagataataaacaaattttgtcgccctaactaattctatattgttatatattttacaattggttatgatatcatgtaataacttggagtctaacgcgcatcgtcgtacgtttatacaattgtgatttagtgtagtatatctacacatgtatttttccgcactatagtattctggactagtgataaaactatcgttatatctgtcttcaatgaactcatcgagatattgctctctgtcatattcatacacctgcataaactttctagacatcttacaatccgtgttattttaggatcatatttacatatttacgggtatatcaaagatgttagattagttaatgggaatcgtctataataatgaatattaaacaattatatgaggacttttaccacaaagcatcataaaaatgagtcgtcgtctgatttatgttttaaatatcaaccgcaaatcaactcataaaatacaagagaatgaaatatatacatattttagtcattgcaatatagaccatacttctacagaacttgattttgtagttaaaaactatgatctaaacagacgacaacatgtaactgggtatactgcactacactgctatttgtataataattactttacaaacgatgtactgaagatattattaaatcatgacgtaaatgtaacgatgaaaaccagtagcggacgtatgcctgtttatatattgcttactagatgttgcaatatttcacatgatgtagtgatagatatgatagacaaagataaaaaccacttattacatagagactattccaacctattactagagtatataaaatctcgttacatgttattaaaggaagaggatatcgatgagaacatagtatccactttattagataagggaatcgatcctaactttaaacaagacggatatacagcgttacattattattatttgtgtctcgcacacgtttataaaccaggtgagtgtagaaaaccgataacgataaaaaaggccaagcgaattatttctttgtttatacaacatggagctaatctaaacgcgttagataattgtggtaatacaccattccatttgtatcttagtattgaaatgtgtaataatattcatatgactaaaatgctgttgacttttaatccgaatttcaaaatatgtaataatcatggattaacgcctatactatgttatataacttccgactacatacaacacgatattcttgttatgttaatacatcactatgaaacaaatgttggagaaatgccgatagatgagcgtcgtatgatcgtattcgagtttatcaaaacatattctacacgtccggcagattcgataacttatttgatgaataggtttaaaaatataaatatttatacccgctatgaaggaaagacattattacacgtagcatgtgaatataataatacacacgtaatagattatcttatacgtatcaacggagatataaatgcgttaaccgacaataacaaacacgctacacaactcattatagataacaaagaaaattccccgtataccatcgattgtttactgtatatacttagatatattgtagataagaatgtgataagatcgttggtggatcaacttccatctctacctatcttcgatataaaatcatttgagaaattcatatcctactgtatacttttagatgacacattttacgataggcacgttaagaatcgcgattctaaaacgtatcgatacgcattttcaaaatacatgtcgtttgataaatacgatggtataataactaaatgtcacgacgaaacaatgttactcaaactgtccactgttctagacactacactatatgcagttttaagatgccataattcgaaaaagttaagaagatacctcaacgagttaaaaaaatataataacgataagtcctttaaaatatattctaatattatgaatgagagataccttaatgtatattataaagatatgtacgtgtcaaaggtatatgataaactatttcctgttttcacagataaaaattgtctactaacattactaccttcagaaattatatacgaaatattatacatgctgacaattaacgatctttataatatatcgtatccacctaccaaagtatagttgtatttttctcatgcgatgtgtgtaaaaaaactgatattatataaatattttagtgccgtataataaagatgacgatgaaaatgatggtacatatatatttcgtatcattattgttattgctattccacagttacgccatagacatcgaaaatgaaatcacagaattcttcaataaaatgagagatactctaccagctaaagactctaaatggttgaatccagcatgtatgttcggaggcacaatgaatgatatagccgctctaggagagccattcagcgcaaagtgtcctcctattgaagacagtcttttatcgcacagatataaagactatgtggttaaatgggagaggctagaaaagaatagacggcgacaggtttctaataaacgtgttaaacatggtgatttatggatagccaactatacatctaaattcagtaaccgtaggtatttgtgtaccgtaactacaaagaatggtgactgtgttcagggtatagttagatctcatattaaaaaacctccttcatgcattccaaaaacatatgaactaggtactcatgataagtatggcatagacttatactgtggaattctttacgcaaaacattataataatataacttggtataaagataataaggaaattaatatcgacgacattaagtattcacaaacgggaaagaaattaattattcataatccagagttagaagatagtggaagatacaactgttacgttcattacgacgacgttagaatcaagaatgatatcgtagtatcaagatgtaaaatacttacggttataccgtcgcaagaccacaggtttaaactaatactagatccaaaaatcaacgtaacgataggagaacctgccaatataacatgcactgctgtgtcaacgtcattattgattgacgatgtactgattgaatgggaaaatccatccggatggcttataggattcgattttgatgtatactctgttttaactagtagaggcggtattaccgaggcgaccttgtactttgaaaatgttactgaagaatatataggtaatacatataaatgtcgtggacacaactattattttgaaaaaacccttacaactacagtagtattggagtaaatacacaatgcatttttatatacattactgaataattattattattatttatatcgtatttgtgctataacgcgactatctaggtatttgtatctcactgatagagaacatataaatatagactctattaaacagttgtgtaaaatatcaaatcctaatagatgtggatgtacggctttacatgagtacttttataattatagatcagtcaacggaaaatacaagtatagatacaacggttactatcaatattatttatctagcgattatgaaaattataatgaatattattatgatgattatgatagaactggtatgaacagtgagagtgataatatatcaatcaaaacagaatatgaattctatgatgaaacacaagatcaaagtacacaactagtaggttacgacattaaactcaaaaccaatgaggatgattttatggctatgatagatcagtgggtgtccatgattatatagatgaatcaattaataaagtagtatatggaagagagtctcacgtaagatggcgggatatatggcaagaacataatgatggcgtatacagtataggaaaggagtgcatagataatatatacgaagacaaccataccgtagacgaattctacaagatagacagcgtatcagatgtagatgacgcggaacacatatctccgataactaatgatgtatctacacaaacatgggaaaagaaatcagagttagatagatacatggaaatgtatcctcgtcatagatatagtaagcattctgtctttaagggattttctgacaaagttagaaaaaatgatttagacatgaatgtggtaaaagaattactttctaacggtgcatctctaacaattaaggatagcagtaataaggatccaataaccgtttattttcgaagaacgataatgaatttagaaatgattgatattattaacaaacatacaactattgatgaacgaaagtatatagtacactcctatctaaaaaattataaaaatttcgattatccatttttcaggaagttagttttgactaataaacattgtctcaacaattattataatataagcgacagcaaatatggaacaccgctacatatattggcgtctaataaaaaattaataactcctaattacatgaagttattagtgtataacggaaatgatataaacgcacgaggtgaagatacacaaatgcgaactccattacacaaatatttgtgtaaatttgtatatcataatattgaatatggtatccgatactataatgaaaagattatagacgcatttatagagttaggagccgatctaactattccaaataacgatggaatgataccagtagtttactgtatacactcaaatgcagaatatggttataacaatattactaacataaagataatacgtaaactacttaatcttagtagacgtgcgtcacataatctatttagagatcgagtcatgcacgattatataagtaatacatatattgatcttgagtgtttagatattattagatcgttggatggattcgatatcaatggttactttgaaggacgtacaccacttcattgcgctatacaacataacttcactcagattgctaagtacttattagatcgaggagctgatatagtcgtacccaacacattgattatacatcagtacatacagtaaatagcatagatatggaggaggatacaaatatttcaaataaagttataaggtacaacactgtcaataatatatggaagacattacctaacttctggactggaactataaatccaggcgtggtctcgcataaagatgatatatatgttgtatgcgacatcaaagatgaaaaaaatgttaagacttgtatatttagatataacacgaatacgtataacggatgggaattggttacgacgacagaaagcagattatcagctctgcatactattcttcatgacaataccataatgatgttacattgttatgaatcgtatatgttacaagatacatttaatgtgtacactcgcgaatggaatcatatgtgtcatcaacattcgaatagttatatcatgtacaatatactacccatctactaaatataatagaataaaataaatgagtatgatcattttagataacgattgattttatcattaccgcttcattcttatattctttgcttacggaacctatatttagaaacatctactaacgattttttatgcttgcattattaatggtatgtaatatgattgattgtgtacgcaataccaatttgttaagtatgaatacggggtacaaacataaactgaaatttaacattatttatttatgatatatatcgttatcgttattgtttggtctataccatggatatctttaaagaactaatcttaaaacaccctgatgaaaatgttttgatttctccagtttctattttatctactttatctattctaaatcatggagcagctggttctacagctgaacaactatcaaaatatatagagaatatgaatgagaatacacccgatgataagaaggatgacaataatgacatggacgtagatattccgtattgtgcgacactagctaccgcaaataaaatatacggtagcgatagtatcgagttccacgcctccttcctacaaaaaataaaagacgattttcaaactgtaaactttaataatgctaaccaaacaaaggaactaatcaacgaatgggttaagacgatgacaaatggtaaaattaattccttattgactagtccgctatccattaatactcgtatgacagttgttagcgccgtccattttaaagcaatgtggaaatatccattttctaaacatcttacatatacagacaagttttatatttctaagaatatagttaccagtgttgatatgatggtgggtaccgagaataacttgcaatatgtacatattaatgaattattcggaggattctctattatcgatattccatacgagggaaactctagtatggtaattatactaccggacgacatagaaggtatatataacatagaaaaaaatataacagatgaaaaatttaaaaaatggtgtggtatgttatctactaaaagtatagacttgtatatgccaaagtttaaagtggaaatgacagaaccgtataatctggtaccgattttagaaaatttaggacttactaatatattcggatattatgcagattttagcaagatgtgtaatgaaactatcactgtagaaaaatttctacatacgacgtttatagatgttaatgaggagtatacagaagcatcggccgttacaggagtatttatgactaacttttcgatggtatatcgtacgaaggtctacataaaccatccattcatgtacatgattaaagacaacacaggacgtatactttttatagggaaatactgctatccgcaataaatataaacaaatagacttttatcacgtttatctatgtctaaatattacaaatagtaatagtataaactaaagctgataatacttaaaaaaataataatatcatttacaattaatagtataaactaaaaattaaacaaatcgttattataagtaatatcaaaatgatgatatacggattaatagcgtgtcttatattcgtgacttcatccatcgctagtccactttatattcccgttattccacccattacggaagataaatcgttcaatagtgtagaggtattagtttccttgtttagagatgaccaaaaagactatacggtaacttctcagttcaataactacactatcgataccaaagactggactatcggcgtactatccacacctgatggtttggatataccattgactaatataacttattggtcacggtttactataggtcgtgcattgttcaaatcagagtctgaggatattttccaaaagaaaatgagtattctaggtgtttctatagaatgtaagaagtcgtcgacattacttacttttttgaccgtgcgtaaaatgactcgagtatttaataaatttccagatatggcttattatcgaggagactgtttaaaagccgtttatgtaacaatgacttataaaaatactaaaactggagagactgattacacgtacctctctaatggggggttgcctgcatactatcgtaatggggtcgatggttgattattgattagtatattccttattcacacaaaaagaacatttttataaacatgaaaccactgtctaaatgtaattatgatcttgatttatagatgaagatcagcctttagaggattttaaccagtatgtttaatatgaaaaaaataaacataacatattttgagattaagcgctattgtgcttaattattttgctctataaactgaatatatagccacaattattgacgggcttgtttatgaccggcaatcatgaatttacagaaattatctctggctatatatcttactgcgacatgttcgtggtgttatgaaacatgcataagaaaaactgcgttgtatcatgacattcaattggagcatgtagaagacaataaagatagtgtagcgtcgctaccgtacaagtagtcaatcaaagagaacgtagtagattgttggctacatttaattggacagatatagctgagggtgttagaaatgagttcattaaaatatgtgatatcaacggaacatatttatataattatactattgctgttagtataattattgattccacggaagaactaccaacagttactccaattacaacaacatatgaaccttctacatataattatactatcgatgatagcactgttattactactgaagaactacaagtgactcctcatatggatctccatcgatgatacatgtattaaaatactttccgaataagtcttttaaatattgtattaattatgaaaaactatgctatgcgagtatgatgcaaagatgtttaatgatacgatactagattttatctctagcgagagatgtcgttagaatcatttatcataactacgtttaataataattcatcaacgaatatcgataacatgtgtcatttatacgttaaagtctgtccgtcttctctattgtttagactgtttgtagaatgctgtgatataaacaaactagtagaaggtacgactccgttacactgttatctaatgaatgaaggatttgaatcatctgttttaaaaaacctattaaaggagtatgtcatgaatacgtttaatgttcatgacatccattacacaaatatttaactcatgatgaagttgagaatgatatgctttctgatagtatagatagctttagctaatataaaaatatattaatccactatatattctagacttgatttaaaaccgataaactactactacgtactgtataagttgttaaaaaaaggagcagaccctaattatgtagatgatagaggtaatacttttcttcattacttctgcatctatatgtccacttatgagaaaacgtcatttaataagatgcatcgtgaaaagaaatttattaaagagttggtaaaatatgaaaccgaaagtaaataatataggaaatacacctctacataactacgtatctcaatatgatatcactctcattcctcatccacaacccattaaaaaaatggaaattaaagccctctattagcataaacggctacaggtctacctttacaatggcctctccttgtgcccagttcagaccctgtcattgccacgctactaaggactccctgaataccgtggccgacgtcagacattgtctgactgaatacatcctgtgggtttctcatagatggacccatagagaaagcgcagggtctctctacaggcttctcatctctttcagaactgatgcaacggagctctttggtggtgagttgaaggattcacttccgtgggacaatatcgacaattgcgtggagatcattaaatgtttcatcagaaatgactccatgaaaaccgccgaagaacttcgtgcaatcattggactttgtactcaatcagctatcgtctctggaagagtcttcaacgataagtatatcgacatactacttatgctgcgaaagattctgaacgagaacgactatctcaccctcttggatcatatccgcactgctaaatactaaatctccttcatgctctctcactacactttttatcatcttatgaggaatgattgccttcatcatttttcgtgaaataggaataattagcaccagaatagctatggattgcacatgtattctatgtcgtctactggatgaagatgtgacgtacaaaaaaataaaactagaaattgaaacgtgtcacaacttatcaaaacatatagatagacgaggaaacaatgcgctacattgttacgtcttcaataaatgcgatacagacattaagattgttcgactgttactctctcgcggagtcgagagactttgtagaaacaacgaaggattaactccgctaggagcatacagtaagcatagatacgtaaaatctcaaattgtgcatctactgatatccagctattcgaattcctctaacgaactcaagtcgaatataaatgatttcgatctgtattcgtatatgtcttcggataatatcgacttacgtctgctaaaatacctaattgtggataaacggatacgtccgtccaagaatacgaattatgcaatcaatggtctcggattggtggatatatacgtaacgacgcctaatccgagaccagaagtattgctatggcttcttaaatcagaatgttacagcaccggttacgtatttcgtacctgtatgtacgacagtgatatgtgtaagaactctcttcattactatatatcgtctcatagagaatctcaatctctatccaaggatgtaattaaatgtttgatcaataacaatgtttccatccatggcagagacgaaggaggatctttacccatccaatactactggtcttgctcaaccatagatatagagattgttaaattattaataaaggatgtggacacgtgtagagtatacgacgtcagccctatattagaggcggattatctaaacaagcgatttagagtaaccccatataatgtagacatggaaatcgttaatcttcttattgagagacgtcatactcttgtcgacgtaatgcgtagtattacttcttacgattccagagactataaccactacatcatcgataacattctaaagagatttagacaacaggatgaatccatcgtacaagccatgttgataaactacttacattacggcgatatggtcgttcgatgcatgttagataacggacaacaactatcctctgcacgactactttgttaataataatctcgtcgatgtaaacgtcgtaaggtttatcgtggaaaataatggacacatggctgtaaatcacgtatcgaacaatggccgtctatgtatgtacggtctgatattatcgagatttaataattgcgggtatcactgttatgaaaccatactaatagatgtatttgatatactaagcaagtacatggataatatagatatgatcgataatgagaataaaactctactatattacgcggtcgatgtcaataatatacaatttgcaaagcggttattggaatatggagcgagtgttacaacatcacgctcgataatcaatacggccatccagaaaagtagttacagaagagaaaacaaaacgaggatagttgatttattacttagctaccatcccactctagagactatgattgacgcatttaatagagatatacgctatctatatcctgaaccattattcgcctgtatcagatacgccttaatcctagatgatgattttccttctaaagtaagtatgatatctccggtcgtcataaggaactaaagcgctatagagtagacattaatagaatgaagaatgcctacatatcaggcgtctccatgtttgatatattatttaaacgaagcaaacgccacagattgagatacgcaaagaatccgacatcaaatggtacaaaaaagaactaacgtccatcattacagaaactgtaaagaacaatgagaggatcgactccatagtggacaacattaatacagacgataacttgatttcgaaattacccatggagatactttattactccattaaataatttatcatggagcgataatgtcctgtttcatttgtttccatgacatattacaaaatcgattccgtccaagatgataaaaacatttaccggcatcataaacacggagtttattttatatgtctcgcataaacattactaaaaaaatatattgttcggttttctttcacatctttaattatgaaaaagtaaatcattatgagatggacgagattgtacgcatcgttcgcgacagtatgtggtacatacctaacgtatttatggacgacggtaagaatgaaggtcacgtttctgtcaacaatgtttgtcatatgtattttacgttctttgatgtggatacatcgtctcatctgtttaagctagttattaaacactgcgatctgaataaacgaggtaactctccattacattgctatacgatgaatacacgatttaatccatctgtattaaagatattgttacaccacggcatgcgtaactttgatagcaaggatgaaaaaggacatattcctctacaccactatctgattcattcactatcaatcgataacaagatctttgatatactaacggacaccattgatgactttagtaaatcatccgatctattgctgtgttatcttagatataaattcaatgggagcttaaactattacgttctgtacaaaggatccgaccctaattgcgtcgacgaggatggactcacttctcttcattactactgtaaacacatatccacgttctacaaaagcaattattacaagttaagtcacactaagatgcgagccgagaagcgattcatctacgcgataatagattatggagcaaacattaacgcggttacacacttaccttcaacagtataccaaacatagtcctcgtgtggtgtatgctcttttatctcgaggagccgatacgaggatacgtaataatcttgattgtacacccatcatggaacgattgtgcaacaggtcatattctcataatgttactcaattggcacgaacaaaaggaagaaggacaacatctactttatctattcataaaacataatcaaggatacactctcaatatactacggtatctactagataggttcgacattcagaaagacgaatactataataccgcctttcaaaattgtaacaacaatgttgcctcatacatcggatacgacatcaaccttccgactaaagacggtattcgacttggtgtttgaaaacagaaacatcatatacaaggcggatgttgtgaatgacatcatccaccacagactgaaagtatctctacctatgattaaatcgttgttctacaagatgtcagaattctctccctacgacgattactacgtaaaaaagatactagcctactgcctattaagggacgagtcattcgcggaactacatagtaaattctgtttaaacgaggactataaaagtgtatttatgaaaaatatatcattcgataagatagattccatcatcgtgacataagtcgccttaaagagattcgaatctccgacaccgacctgtatacggtatcacagctatcttaaagccatacattcggacagacacatttcatttcccatgtacgacgatctcatagaacagtgccatctatcgatggagcataaaagtaaactcgtcgacaaagcactcaataaattagagtctaccatcggtcaatctagactatcgtatttgcctccggaaattatgcgcaatatcatctaaacagtatgttgtacggaaagaaccattacaaatattatccatgatagaaagaaaatatctatatgattggagaagtaggaaacaggaacaagacgacgattactacattattaaatcatgaagtccgtattatactcgtatatattgtttctctcatgtataataataaacggaagagatatagcaccgcatgcaccatccgatggaaagtgtaaagacaacgaatacaaacgccataatttgtgtccgggaacatacgcttccagattatgcgatagcaagactaacacacgatgtacaccctgtggttcgggtaccttcacatctcgcaataatcatttacccgcttgtctaagttgtaacggaagacgcgatcgtgtaacacgactcacaatagaatctgtgaatgctctcccggatattattgtcttctcaaaggatcatccggatgcaaggcatgtgtttcccaaacaaaatgtggaataggatacggagtatccggagacgtcatctgttctccgtgtggtctcggaacatattctcacaccgtctcttccgcagataaatgcgaacccgtacccagtaatacctttaactatatcgatgtggaaattaatctgtatcccgtcaacgacacgtcgtgtactcggacgaccactaccggtctcagtgaatccatctcaacgtcggaactaactattactatgaatcataaagactgtaatcccgtatttcgtgaggaatacttctctgtccttaataaggtagcaacttcaggtttctttacaggagaaaggtgtgcactctgaatttcgagattaaatgcaataacaaagattcttcctccaaacagttaacgaaagcaaagaatgatgacggtatcatgccgcattcggagacagtaactctagtgggcgactgtatatctagcgtcgacatctatatactatatagtaataccaatactcaagactacgaaactgatacaatctcttatcatgtgggtaatgttctcgatgtcgatagccatatgcccggtagttgcgatatacataaactgatcactaattccaaacccacccgctttttatagtaagtttttcacccataaataataaatacaataattaatttctcgtaaaagtagaaaatatattctaatttattgcatggtaaggaagtagaatcataaagaacagtactcaatcaatagcaattatgaaacaatatatcgtcctggcatgcatgtgcctgccagtcttcagcaatcatcctcatcctcatcctcgtgtacggaagaagaaaacaaacatcatatgggaatcgatgttattatcaaagtcacaaagcaagaccaaacaccgaccaatgataagatttgccaatccgtaacggaaattacagagtccgagtcagatccaaatcccgaggtggaatcagaagatgattccacatcagtcgaggatgtagatcctcctaccacttattactccatcatcggtggaggtctgagaatgaactttggattcaccaaatgtcctcagattaaatccatctcagaatccgctgatggaaacacagtgaatgctagattgtccagcgtgtccccaggacaaggtaaggactctcccgcgatcactcatgaagaagctcttgctatgatcaaagactgtgaggtgtctatcgacatcagatgtagcgaagaagagaaagacagcgacatcaagacccatccagtactcgggtctaacatctctcataagaaagtgagttacgaagatatcatcggttcaacgatcgtcgatacaaaatgtgtcaagaatctagagtttagcgttcgtatcggagacatgtgcaaggaatcatctgaacttgaggtcaaggatggattcaagtatgtcgacggatcggcatctgaaggtgcaaccgatgatacttcactcatcgattcaacaaaactcaaagcgtgtgtctgaatcgataactctattcatctgaaattggatgagtagggttaatcgaacgattcaggcacaccacgaattaaaaaagtgtaccggacactatattccggtttgcaaaacaaaaatgttcttaactacattcacaaaaagttacctctcgcgacttcttctttttctgtctcaatagtgtgatacgattatgacactattcctattcctattcctatttcctttcagggtatcacaaaaatattaaacctctttctgatggtctcataaaaaaagttttacaaaaatatttttattctctttctctctttgatggtctcataaaaaaagttttacaaaaatatttttattctctttctctctttgat

SEQ ID NO: 10 - DNA, 197616 bp, Vaccinia virus
  source 1..197616: mol_type = other DNA
  misc_feature 1..197616: note = VIR46
atcaaagagagaaagagaataaaaatatttttgtaaaactttttttatgagaccatcaaagagagaaagagaataaaaatatttttgtaaaactttttttatgagaccatcagaaagaggtttaatatttttgtgataccctgaaaggaaataggaataggaataggaatagtgtcataatcgtatcacactattgagacagaaaaagaagaagtcgcgagaggtaactttttgtgaatgtagttaagaacatttttgttttgcaaaccggaatatagtgtccggtacacttttttaattcgtggtgtgcctgaatcgttcgattaaccctactcatccaatttcagatgaatagagttatcgattcagacacacgctttgagttttgttgaatcgatgagtgaagtatcatcggttgcaccttcagatgccgatccgtcgacatacttgaatccatccttgacctcaagttcagatgattccttgcacatgtctccgatacgaacgctaaactctagattcttgacacattttgtatcgacgatcgttgaaccgatgatatcttcgtaactcactttcttatgagagatgttagacccgagtactggatgggtcttgatgtcgctgtctttctcttcttcgctacatctgatgtcgatagacacctcacagtctttgatcatagcaagagcttcttcatgagtgatcgcgggagagtccttaccttgtcctggggacacgctggacaatctagcattcactgtgtttccatcagcggattctgagatggatttaatctgaggacatttggtgaatccaaagttcattctcagacctccaccgatgatggagtaataagtggtaggaggatctacatcctcgactgatgtggaatcatcttctgattccacctcgggatttggatctgactcggactctgtaatttccgttacggattggcaaatcttatcattggtcggtgtttggtcttgctttgtgactttgataataacatcgattcccatatgatgtttgttttcttcttccgtacacgaggatgaggatgaggatgattgctgaagactggcaggcacatgcatgccaggacgatatattgtttcataattgctattgattgagtactgttctttatgattctacttccttaccatgcaataaattagaatatattttctacttttacgagaaattaattattgtatttattatttatgggtgaaaaacttactataaaaagcgggtgggtttggaattagtgatcagtttatgtatatcgcaactaccgggcatatggctatcgacatcgagaacattacccacatgataagagattgtatcagtttcgtagtcttgagtattggtattactatatagtatatagatgtcgacgctagatatacagtcgcccactagagttactgtctccgaatgcggcatgataccgtcatcattctttgctttcgttaactgtttggaggaagaatctttgttattgcatttaatctcgaaattcagagtgcacacctttctcctgtaaagaaacctgaagttgctaccttattaaggacagagaagtattcctcacgaaatacgggattacagtctttatgattcatagtaatagttagttccgacgttgagatggattcactgagaccggtagtggtcgtccgagtacacgacgtgtcgttgacgggatacagattaatttccacatcgatatagttaaaggtattactgggtacgggttcgcatttatctgcggaagagacggtgtgagaatatgttccgagaccacacggagaacagatgacgtctccggatactccgtatcctattccacattttgtttgggaaacacatgccttgcatccggatgatcctttgagaagacaataatatccgggagagcattcacagattctattgtgagtcgtgttacacgatcgcgtcttccgttacaacttagacaagcgggtaaatgattattgcgagatgtgaaggtacccgaaccacagggtgtacatcgtgtgttagtcttgctatcgcataatctggaagcgtatgttcccggacacaaattatggcgtttgtattcgttgtctttacactttccatcggatggtgcatgcggtgctatatctcttccgtttattattatacatgagagaaacaatatatacgagtataatacggacttcatgatttaataatgtagtaatcgtcgtcttgttcctgtttcctacttctccaatcatatagatattttctttctatcatggataatatttgtaatggttctttccgtacaacatactgtttagatgatattgcgcataatttccggaggcaaatacgatagtctagattgaccgatggtagactctaatttattgagtgctttgtcgacgagtttacttttatgctccatcgatagatggcactgttctatgagatcgtcgtacatgggaaatgaaatgtgtctgtccgaatgtatggctttaagatagctgtgataccgtatacaggtcggtgtcggagattcgaatctctttaaggcgacttatgtcacgatgatggaatctatcttatcgaatgatatatttttcataaatacacttttatagtcctcgtttaaacagaatttactatgtagttccgcgaatgactcgtcccttaataggcagtaggctagtatcttttttacgtagtaatcgtcgtagggagagaattctgacatcttgtagaacaacgatttaatcataggtagagatactttcagtctgtggtggatgatgtcattcacaacatccgccttgtatatgatgtttctgttttcaaacaccaagtcgaataccgtctttagtcggaaggttgatgtcgtatccgatgtatgaggcaacattgttgttacaattttgaaaggcggtattatagtattcgtctttctgaatgtcgaacctatctagtagataccgtagtatattgagagtgtatccttgattatgttttatgaatagataaagtagatgttgtccttcttccttttgttcgtgccaattgagtaacattatgagaatatgacctgttgcacaatcgttccatgatgggtgtacaatcaagattattacgtatcctcgtatcggctcctcgagataaaagagcatacaccacacgaggactatgtttggtatactgttgaaggtaagtgtgtaaccgcgttaatgtttgctccataatctattatcgcgtagatgaatcgcttctcggctcgcatcttagtgtgacttaacttgtaataattgcttttgtagaacgtggatatgtgtttacagtagtaatgaagagaagtgagtccatcctcgtcgacgcaattagggtcggatcctttgtacagaacgtaatagtttaagctcccattgaatttatatctaagataacacagcaatagatcggatgatttactaaagtcatcaatggtgtccgttagtatatcaaagatcttgttatcgattgatagtgaatgaatcagatagtggtgtagaggaatatgtcctttttcatccttgctatcaaagttacgcatgccgtggtgtaacaatatctttaatacagatggattaaatcgtgtattcatcgtatagcaatgtaatggagagttacctcgtttattcagatcgcagtgtttaataactagcttaaacagatgagacgatgtatccacatcaaagaacgtaaaatacatatgacaaacattgttgacagaaacgtgaccttcattcttaccgtcgtccataaatacgttaggtatgtaccacatactgtcgcgaacgatgcgtacaatctcgtccatctcataatgatttactttttcataattaaagatgtgaaagaaaaccgaacaatatatttttttagtaatgtttatgcgagacatataaaataaactccgtgtttatgatgccggtaaatgtttttatcatcttggacggaatcgattttgtaatatgtcatggaaacaaatgaaacaggacattatcgctccatgataaattatttaatggagtaataaagtatctccatgggtaatttcgaaatcaagttatcgtctgtattaatgttgtccactatggagtcgatcctctcattgttctttacagtttctgtaatgatggacgttagttcttttttgtaccatttgatgtcggattctttgcgtatctcaatctgtggcgtttgcttcgtttaaataatatatcaaacatggagacgcctgatatgtaggcattcttcattctattaatgtctactctatagcgctttagttccttatgacgaccggagatatcatacttactttagaaggaaaatcatcatctaggattaaggcgtatctgatacaggcgaataatggttcaggatatagatagcgtatatctctattaaatgcgtcaatcatagtctctagagtgggatggtagctaagtaataaatcaactatcctcgttttgttttctcttctgtaactacttttctggatggccgtattgattatcgagcgtgatgttgtaacactcgctccatattccaataaccgctttgcaaattgtatattattgacatcgaccgcgtaatatagtagagttttattctcattatcgatcatatctatattatccatgtacttgcttagtatatcaaatacatctattagtatggtttcataacagtgatacccgcaattattaaatctcgataatatcagaccgtacatacatagacggccattgttcgatacgtgatttacagccatgtgtccattattttccacgataaaccttacgacgtttacatcgacgagattattattaacaaagtagtcgtgcagaggatagttgttgtccgttatctaacatgcatcgaacgaccatatcgccgtaatgtaagtagtttatcaacatggcttgtacgatggattcatcctgttgtctaaatctctttagaatgttatcgatgatgtagtggttatagtctctggaatcgtaagaagtaatactacgcattacgtcgacaagagtatgacgtctctcaataagaagattaacgatttccatgtctacattatatggggttactctaaatcgcttgtttagataatccgcctctaatatagggctgacgtcgtatactctacacgtgtccacatcctttattaataatttaacaatctctatatctatggttgagcaagaccagtagtattggatgggtaaagatcctccttcgtctctgccatggatggaaacattgttattgatcaaacatttaattacatccttggatagagattgagattctctatgagacgatatatagtaatgaagagagttcttacacatatcactgtcgtacatacaggtacgaaatacgtaaccggtgctgtaacattctgatttaagaagccatagcaatacttctggtctcggattaggcgtcgttacgtatatatccaccaatccgagaccattgattgcataattcgtattcttggacggacgtatccgtttatccacaattaggtattttagcagacgtaagtcgatattatccgaagacatatacgaatacagatcgaaatcatttatattcgacttgagttcgttagaggaattcgaatagctggatatcagtagatgcacaatttgagattttacgtatctatgcttactgtatgctcctagcggagttaatccttcgttgtttctacaaagtctctcgactccgcgagagagtaacagtcgaacaatcttaatgtctgtatcgcatttattgaagacgtaacaatgtagcgcattgtttcctcgtctatctatatgttttgataagttgtgacacgtttcaatttctagttttatttttttgtacgtcacatcttcatccagtagacgacatagaatacatgtgcaatccatagctattctggtgctaattattcctatttcacgaaaaatgatgaaggcaatcattcctcataagatgataaaaagtgtagtgagagagcatgaaggagatttagtatttagcagtgcggatatgatccaagagggtgagatagtcgttctcgttcagaatctttcgcagcataagtagtatgtcgatatacttatcgttgaagactcttccagagacgatagctgattgagtacaaagtccaatgattgcacgaagttcttcggcggttttcatggagtcatttctgatgaaacatttaatgatctccacgcaattgtcgatattgtcccacggaagtgaatccttcaactcaccaccaaagagctccgttgcatcagttctgaaagagatgagaagcctgtagagagaccctgcgctttctctatgggtccatctatgagaaacccacaggatgtattcagtcagacaatgtctgacgtcggccacggtattcagggagtccttagtagcgtggcaatgacagggtctgaactgggcacaaggagaggccattgtaaaggtagacctgtagccgtttatgctaatagagggctttaatttccatttttttaatgggttgtggatgaggaatgagagtgatatcatattgagatacgtagttatgtagaggtgtatttcctatattatttactttcggtttcatattttaccaactctttaataaatttcttttcacgatgcatcttattaaatgacgttttctcataagtggacatatagatgcagaagtaatgaagaaaagtattacctctatcatctacataattagggtctgctcctttttttaacaacttatacagtacgtagtagtagtttatcggttttaaatcaagtctagaatatatagtggattaatatatttttatattagctaaagctatctatactatcagaaagcatatcattctcaacttcatcatgagttaaatatttgtgtaatggatgtcatgaacattaaacgtattcatgacatactcctttaataggttttttaaaacagatgattcaaatccttcattcattagataacagtgtaacggagtcgtaccttctactagtttgtttatatcacagcattctacaaacagtctaaacaatagagaagacggacagactttaacgtataaatgacacatgttatcgatattcgttgatgaattattattaaacgtagttatgataaatgattctaacgacatctctcgctagagataaaatctagtatcgtatcattaaacatctttgcatcatactcgcatagcatagtttttcataattaatacaatatttaaaagacttattcggaaagtattttaatacatgtatcatcgatggagatccatatgaggagtcacttgtagttcttcagtagtaataacagtgctatcatcgatagtataattatatgtagaaggttcatatgttgttgtaattggagtaactgttggtagttcttccgtggaatcaataattatactaacagcaatagtataattatataaatatgttccgttgatatcacatattttaatgaactcatttctaacaccctcagctatatctgtccaattaaatgtagccaacaatctactacgttctctttgattgactacttgtacggtagcgacgctacactatctttattgtcttctacatgctccaattgaatgtcatgatacaacgcagtttttcttatgcatgtttcataacaccacgaacatgtcgcagtaagatatatagccagagataatttctgtaaattcatgattgccggtcataaacaagcccgtcaataattgtggctatatattcagtttatagagcaaaataattaagcacaatagcgcttaatctcaaaatatgttatgtttatttttttcatattaaacatactggttaaaatcctctaaaggctgatcttcatctataaatcaagatcataattacatttagacagtggtttcatgtttataaaaatgttctttttgtgtgaataaggaatatactaatcaataatcaaccatcgaccccattacgatagtatgcaggcaaccccccattagagaggtacgtgtaatcagtctctccagttttagtatttttataagtcattgttacataaacggcttttaaacagtctcctcgataataagccatatctggaaatttattaaatactcgagtcattttacgcacggtcaaaaaagtaagtaatgtcgacgacttcttacattctatagaaacacctagaatactcattttcttttggaaaatatcctcagactctgatttgaacaatgcacgacctatagtaaaccgtgaccaataagttatattagtcaatggtatatccaaaccatcaggtgtggatagtacgccgatagtccagtctttggtatcgatagtgtagttattgaactgagaagttaccgtatagtctttttggtcatctctaaacaaggaaactaatacctctacactattgaacgatttatcttccgtaatgggtggaataacgggaatataaagtggactagcgatggatgaagtcacgaatataagacacgctattaatccgtatatcatcattttgatattacttataataacgatttgtttaatttttagtttatactattaattgtaaatgatattattatttttttaagtattatcagctttagtttatactattactatttgtaatatttagacatagataaacgtgataaaagtctatttgtttatatttattgcggatagcagtatttccctataaaaagtatacgtcctgtgttgtctttaatcatgtacatgaatggatggtttatgtagaccttcgtacgatataccatcgaaaagttagtcataaatactcctgtaacggccgatgcttctgtatactcctcattaacatctataaacgtcgtatgtagaaatttttctacagtgatagtttcattacacatcttgctaaaatctgcataatatccgaatatattagtaagtcctaaattttctaaaatcggtaccagattatacggttctgtcatttccactttaaactttggcatatacaagtctatacttttagtagataacataccacaccattttttaaatttttcatctgttatatttttttctatgttatatataccttctatgtcgtccggtagtataattaccatactagagtttccctcgtatggaatatcgataatagagaatcctccgaataattcattaatatgtacatattgcaagttattctcggtacccaccatcatatcaacactggtaactatattcttagaaatataaaacttgtctgtatatgtaagatgtttagaaaatggatatttccacattgctttaaaatggacggcgctaacaactgtcatacgagtattaatggatagcggactagtcaataaggaattaattttaccatttgtcatcgtcttaacccattcgttgattagttcctttgtttggttagcattattaaagtttacagtttgaaaatcgtcttttattttttgtaggaaggaggcgtggaactcgatactatcgctaccgtatattttatttgcggtagctagtgtcgcacaatacggaatatctacgtccatgtcattattgtcatccttcttatcatcgggtgtattctcattcatattctctatatattttgatagttgttcagctgtagaaccagctgctccatgatttagaatagataaagtagataaaatagaaactggagaaatcaaaacattttcatcagggtgttttaagattagttctttaaagatatccatggtatagaccaaacaataacgataacgatatatatcataaataaataatgttaaatttcagtttatgtttgtaccccgtattcatacttaacaaattggtattgcgtacacaatcaatcatattacataccattaataatgcaagcataaaaaatcgttagtagatgtttctaaatataggttccgtaagcaaagaatataagaatgaagcggtaatgataaaatcaatcgttatctaaaatgatcatactcatttattttattctattatattaacacatacatttttaacagcaacacattcaatattgtattgttatttttatattatttacacaattaacaatatattattagtttatattactgaattaataatataaaattcccaatcttgtcataaacacacactgagaaacagcataaacacaaaatccatcaaaaatgtcgatgaaatatctgatgttgttgttcgctgctatgataatcagatcattcgccgatagtggtaacgctatcgaaacgacattgccagaaattacaaacgctacaacagatattccagctatcagattatgcggtccagagggagatggatattgtttacacggtgactgtatccacgctagagatatcgacggtatgtattgtagatgctctcatggttatacaggcattagatgtcagcatgtagtattagtagactatcaacgttcagaaaaaccaaacactacaacgtcatatatcccatctcccggtattgtgcttgtattagtaggcattattattatgtgttgtctattatctgtttataggttcactcgaagaactaataaactacctctacaagatatggttgtgccataatttttataaatttttttatgagtatttttacaaaaaaaatgtataaagtgtatgtcttatgtatatttataaaaatgctaagtatgcgatgtatctatgttatttgtatttatctaaacaatacctctacctctagatattatacaaaaattttttatttcggcatattaaagtaaaatctagttaccttgaaaatgaatacagtgggtggttccgtatcaccagtaagaacataatagtcgaatacagtatccgattgagattttgcatacaatactagtctagaaagaaatttgtaatcattttctgtgacgggagtccatatatctgtatcatcgtctagtttatcagtgtcccatgctatatttctgttatcatcattagttaatgaaaataactctcgtgcttcagaaaagtcaaatattgtatccatacatacatctccaaaactatcgcttatacgtttatctttaacgatacctatacctagatggttatttactaacagacattttccagatctattgactataactcctatagtttccacatcaaccaagtaatgatcatctattgttatataacaataacataactcttttccatttttatcagtatgtatatctatatcaacgtcgtcgttgtagtgaatagtagtcattgatctattatatgaaacggatatgtctagaacggcaattgtcttacgtccagttaacactttcgttgatttaaagtctagagtctttgcaaacataatatccttatccgactttatatttcctgtagggtggtataattttattttgcctccacatatcggtgtttccaaatatattactagacaatattccatatagttattagttaagggtacccaattagaacacgtacgcttattatcatcatttggatcgtatttcataaaagttattgtactatcgatgtcaacacattctacattttttaatcgtctatatagtatttttctgatattttctataatatcagaattgtcttccatcggaagttgtatactatcggaatcagttacatgtttaaataattctctgatgtcattccttatacaatcaaattcattattaaacagtttaatagtctgtagacctttatcgtcgtaaatatccattgtcttattagttacgcttatttttatgtgttttacgttgctttattatattttataagaatgattgtttgacgaatcacgagaactattaagacacattattaggtatatattataaaaaagtttttgattacgatgttataagaggaaagaggacacattaacatcatacatcaattaactacattcttataacatcgtaatcaaaagaattgcaattttgatgtataacaactgtcaatgggttatggaattgtatattacatattatacggtatgttggtaacgacaaataccgatcggtaatcgtttgccggtgtaatagaattatatatatctatctattacaccggctgagtatacataataataagttgtggtagtatgatctccatatttataatttaggactttgtattcagtatttttggaatcataaaaaataaaaaaaagttttactaatttaaaatttaaaaagtatttacatttttttcactgtttagtcgcggatatggaattcgatcctgccaaaatcaatacatcatctatagatcatgtaacaatattacaatacatagatgaaccaaatgatataagactaacagtatgcattatccgaaatattaataacattacatattatatcaatatcacaaaaataaatacacatttggctaatcaatttcgggcttggaaaaaacgtatcgccggaagggactatatgactaacttatctagagatacaggaatacaacaatcaaaacttactgaaactatacgtaactgtcaaaaaaatagaaacatatatggtctatatatacactacaatttagttattaatgtggttattgattggataaccgatgtgattgttcaatcaatattaagagggttggtaaattggtacatagctaataatacctatactccaaatacacccaataatacaacaaccatttctgagttggatatcatcaaaatactaaataaatacgaggacgtgtatagagtaagtaaagaaaaagaatgtggaatttgctatgaagttgtttactcaaaacgattagaaaacgatagatactttggtttattggattcgtgtactcatatattttgcataacatgcatcaatatatggcataaaacacgaagagaaaccggtgcgtcggataattgtcctatatgtcgtacccgttttagaaacataacaatgagcaagttctataagctagttaactaataaataaaaagtttaatttgttgacgacgtatgtcgttattttttctcgtataaaagattaatttgattctaatataatctttagtattggataaatatcaattcaaattaattccattagattatatcataaataaaaatagtagcacgcactacttcagccaaatattcttttttgaaacgccatctatcgtagtgaggacacaagtgaacctataatgagcaaatttattagtatcggttacatgaaggactttacgtagagtggtgattccactatctgtggtacgaacggtttcatcttctttgatgccatcacccagatgttctataaacttggtatcctcgtccgatttcatatcctttgccaaccaatacatatagctaaactcaggcatatgttccacacatcctgaacaatgaaattctccagaagatgttacaatgtctagatttggacatttggtttcaaccgcgttaacatatgagtgaacacacccatacatgaaagcgatgagaaataggattttcatcttgccaaaatatcactagaaaaaatttatttatcaattttaaaggtataaaaaatacttattgttgctcgaatattttgtatttgatggtatacggaagattagaaatgtaggtattatcatcaactgattctatggttttatgtattctatcatgtttcactattgcgttggaaataatatcatatgcttccacatatattttattttgttttaactcataatactcacgtaattctggattattggcatatctgtgaataattttagctccatgatcagtaaatattaatgagaacatagtattaccacctaccattatttttttcatttcgttcaattcttgattgcaaagatctatataatcattatagcgttgacttatggactctggaatcttagacgatgtacagtcatctataatcatggcatatttaatacattgttttatagcatagtagttatctacgatgttagatatttctctcaatgaatcaatcacacaatctaatgtaggtttatgacataatagcattttcagcagttcaatgtttctagattcgttgatggcaatggctatacatgtatatccgttatttgatctaatgttgacatctgaaccggattctagcagtaaagatactagagattgtttattatatctaacagccttgtgaagaagtgtttctcctcgtttgtcaatcatgttaatgtctttaagataaggtaggcaaatgtttatagtactaagaattgggcaagcataagacatgtcacaaagaccctttttgtatgtataagtgtagaaattataacatccatagttggatttacataggtgtccaatcgggatctctccatcatcgagatgattgacggcatctcccccttccttttttagtagatatttcatcgtgtaagaatcaatattaatatttctaaagtatccgtgtatagcctctttatttaccacagctccatattccaacatgcattccactaaagggatatcgatatcgccgaatgtcatatactcaattagtatatgttggaggacatccgagttcattgttttcaatatcaaagagatggtttccttatcatttctccatagtggtacaatactacacattattccgtgaggctttccattctccaaaaacaatttgaccaaatctacatctttattgtatctataatcactatttagataatcagccataattcctcgagtgcaacatgttagatcgtctatatatgaataagccgtgttatctattcctttcattaacaatttaacgatgtctatatctatatgagatgacttaatataatattgaagagctgtacaatagtttttatctatagaagacggcttgattccgtgattaattagacatttaacaacttccggacgcacatatgctctcgtatccgactctgaatacagatgagagatgatatacagatgcaatacggtaccgcaatttcgtagttgataatcatcatacgcgtatccgtactcgtcctcataaagaacactgcagccattttctatgaacaaatcaataattttaggaacaggatcattgtcattacataattttctataactgaacgatggttttcacatttaacactcaagtcaaatccatgttctaccaacacctttatcaagtcaacgtctacatttttggatttcatatagctgaatatattaaagtcatttatgttgctaaatccagtggcttctagtagagccatcgctatatcctttaactttaacatgtctactatttgtgtattcttctaatggggtagctgtctccaatttttgcgtaatggattagtgccactgtctagtagtagtttgacgacctcgacattattacaatgctcattaaaaaggtatgcgtgtaaagcattattcttgaattggttcctggtatcattaggatctctgtctctcaacatctgtttaagttcatcgagagccacctcctcattttccaaatagtcaaacattttgactgaatagaagtgaatgagctactgtgaactctatacacccacacaactaatgtcattaaatattatttttttgaatgtatttataccatgtcaaaaacttgtacaattattaataaaaataatttagtgtttaaattttaccagttccagattttacacctccgttaaccccactttttacaccactggacgaccctcctccccacattccaccgccaccagatgtataagttttagatcctttattactaccatcatgtccatggataaagacactccacatgccgccactaccccctttagaagacatattaataagacttaagagttaaggacaagtttaacaataaaattaatcacgagtaccctactaccaacctacactattatatgattatagtttctatttttacagtaccttaactaaagtttctagtcacaagagcaatactaccaacctacactattatatgattatagtttctatttttataggaacgcgtacgagaaaatcaaatgtctaatttctaacggtagtgttgataaacgattatcgtcaatggatacctcctctatcatgtcgtctattttcttactttgttctattaacttattagcattatatattatttgattataaaacttatattgcttattagcccaatctgtaaatatcggattattaacatatcgtttctttgtaggtttatttaacttgtacatcactgtaagcatgtccgtaccatttattttaatttgacgcatatccgcaatttctttttcgcagtcggttataaattctatatatgatggatacatgctacatgtgtacttataatcgactaatatgaagtacttgatacatattttcagtaacgatttattattaccacctatgaataagtacctgtgatcgtctaggtaatcaactgttttcttaatacattcgatggttggtaatttactcagaataatttccaatatcttaatatataattctgctatttctggaatatatttatctgccagtataacacaaatagtaatacatgtaaacccatattttgttattatattaatgtctgcgccattatctattaaccattctactaggctgacactatgcgacttaatacaatgataaagtatactacatccatgtttatctattttgtttatatcatcaatatacggcttacaaagttttagtatcgataacacatccaactcacgcatagagaaggtagggaataatggcataatatttattaggttatcatcattgtcattatctacaactaagtttccattttttaaaatatactcgacaactttaggatctctattgccaaatttttgaaaatatttatttatatgcttaaatctatataatgtagctccttcatcaatcatacatttaataacattgatgtatactgtatgataagatacatattctaacaatagatcttgtatagaatctgtatatcttttaagaattgtggatattaggatattattacgtaaactattacacaattctaaaatataaaacgtatcacggtcgaataatagttgatcaactatataattatcgattttgtgatttttcttcctaaactgtttacgtaaatagttagatagaatattcattagttcatgaccactatagttactatcgaataacgcgtcaaatatttcccgtttaatatcgcatttgtcaagataataatagagtgtggtatgttcacgataagtataataacgcatctctttttcgtgtgaaattaaatagtttatcacgtccaaagatgtagcataaccatcttgtgacctagtaataatataataatagagaactgttttacccattctatcatcataatcagtggtgtagtcgtaatcgtaatcgtctaattcatcatcccaattataatattcaccagcacgtctaatctgttctattttgatcttgtatccatactgtatgttgctacatgtaggtattcctttatccaataatagtttaaacacatctacattgggatttgatgttgtagcgtatttctctacaatattaataccatttttgatactatttatttctatacctttcgaaattagtaatttcaataagtctatatcgatgttatcagaacatagatattcgaatatatcaaaatcattgatatttttatagtcgactgacgacaataacaaaatcacaacatcgtttttgatattattatttttcttggtaacgtatgcctttaatggagtttcaccatcatactcatataatggatttgcaccactttctatcaatgattgtgcactgctggcatcgatgttaaatgttttacaactatcatagagtatcttatcgttaaccatgattggttgttgatgctatcgcattttttggtttctttcatttcagttatgtatggatttagcacgtttgggaagcataagctcatatgatttcagtactgtagtgtcagtactattagtttcgatcagatcaatgtctagatctatagaatcaaaacacgataggtcagaagataatgaatatctgtaggcttcttgttgtactgtaacttctcgttttgttagatggttgcatcgtgctttaacatcaatggtacaaattttatcctcgctttgtgtatcatattcgtccctactataaaattgtatattcagattatcatgagatgtgtatacgctaacggtatcaataaacggagcacaccatttagtcataaccgtaatccaaaaatttttaaagtatatcttaacgaaagaagttgtgtcattgtctacggtgtatggtactagatcctcataagtgtatatatctagagtaatgtttaatttatcaaatggttgataatatggatcctcatggcaatttcctaagacgaaaataagacataaacacgcaataaatctaattgcggacatggttactccttaaaaaaatactaataatcaccttggctatttagtaagtgtcatttaacactatactcatattaatccatggactcataatctctatacgggattaacggatgttctatatacggggatgagtagttctcttctttaactttatactttttactaatcatatttagactgatgtatgggtaatagtgtttgaagagctcgttctcatcatcagaataaatcaatatctctgtttttttgttatacagatgtattacagcctcatatattacgtaatagaacgtgtcatctaccttattaactttcaccgcatagttgtttgcaaatacggttaatcctttgacctcgtcgatttccgaccaatctgggcgtataatgaatctaaactttaatttcttgtaatcattcgaaataatttttagtttgcatccgtagttatcccctttatgtaactgtaaatttctcaacgcgatatctccattaataatgatgtcgaattcgtgctgtatacccatactgaatggatgaacgaataccgacggcgttaatagtaatttactttttcatctttacatattgggtactagttttactatcataagtttataaattccacaagctactatggaataagccaaccatcttagtataacacacatgtcttaaagtttattaattaattacatgttgttttatatatcgctacgaatttaaacagagaaatcagtttaggaaaaaaaattatctatctacatcatcacgtctctgtattctacgatagagtgctactttaagatgagacatatccgtgtcatcaaaaatatactccattaaaatgattattccggcagcgaacttgatattggatatatcacaacctttgttaatatctacgacaatagacagcagtcccatggttccataaacagtgagtttatctttctttgaagagatattttgtagagatcttataaaactgtcgaatgacatcgcatttatatctttagctaaatcgtatatgttaccatcgtaatatctaaccgcgtctatcttaaacgtttccatcgctttaaagacgtttccgatagatggtctcatttcatcagtcatactgagccaacaaatataatcgtgtataacatctttgatagaatcagactctaaagaaaacgaatcggctttattatacgcattcatgataaacttaatgaaaaatgtttttcgttgtttaagttggatgaatagtatgtcttaataattgttattatttcattaattaatatttagtaacgagtacactctataaaaacgagaatgacataactaatcataactagttatcaaagtgtctaggacgcgtaattttcatatggtatagatcctgtaagcattgtctgtattctggagctattttctctatcgcattagtgagttcagaatatgttataaatttaaatcgaataacgaacataactttagtaaagtcgtctatattaactcttttattttctagccatcgtaataccatgtttaagatagtatattctctagttactacgatctcatcgttgtctagaatatcacatactgaatctacatccaattttagaaattggtctgtgttacatatctcttctatattattgttgatgtattgtcgtagaaaactattacgtagaccattttctttataaaacgaatatatagtactccaattatctttaccgatatatttgcacacataatccattctctcaatcactacatctttaagattttcgttgttaagatatttggctaaactatataattctattagatcatcaacagaatcagtatatatttttctagatccaaagacgaactctttggcgtcctctataatattcccagaaaagatattttcgtgttttagtttatcgagatctgatctgttcatatacgccatgattgtacggtacgttatgataaccgcataaaataaaaatccattttcatttttaaccaatactattcataattgagattgatgtaatactttgttactttgaacgtaaagacagtacacggatccgtatctccaacaagcacgtagtaatcaaatttggtgttgttaaacttcgcaatatttatcaatttagatagaaacttatactcatcatctgttttaggaatccatgtattattaccactttccaacttatcattatcccaggctatgtttcgtccatcatcgttgcgcagagtgaataattcttttgtattcggtagttcaaatatataatccatgcatagatcggtaaagctattgtagatgtgatttttcctaaatctaatataaaactcgtttactagcaaacactttcctgatttatcgaccaagacacatatggtttctaaatctatcaagtggtggggatccatagttatgacgcagtaacatagattattaccttcttaactgtcgctaatatctatatatttattgttatcgtattggattctgcatatagatggcttgtatgtcaaagatatagaacacataaccaatttatagtcgcgctttacattctcgaatctaaagttaagagatttagaaaacattatatcctcggatgatgttatcactgtttctggagtaggatatattaaagtctttacagatttcgtccgattcaaataaatcactaaataatatcccacattatcatctgttagagtagtatcattaaatctattatattttatgaaagatatatcactgctcacctctatatttcgtacatttttaaactgtttgtataatatctctctgatacaatcagatatatctattgtgtcggtagacgataccgttacatttgaattaatggtgttccattttacaacttttaacaagttgaccaattcatttctaatagtatcaaacgctccatgattaaatattttaatagtatccattttatatcactacggacacaaagtagctgacataaaccattgtataatttttatgttttatgtttattagcgtacacattttggaagttccggcttccatgtatttcctggagagcaagtagatgatgaggaaccagataggttatatccgtacttgcacttaaagtttacattgtcgttgtatgagtatgatcttttaaacccgctagacaagtatccgtttgatattgtaggatgtggacatttaacaatctgacacgtgggtggatcggaccattctcctcctgaacacaggacaccagagttaccaatcaacgaatatccactattgcaactataagttacaacgcttccatcggtataaaaatcctcgtatccgttatgtcttccgttggatatagatggaggggattggcatttaacagattcacaaataggtgcctcgggattccataccatagatccagtagatcctaattcacaatacgatttagattcaccgatcaaatgatatccgctattacaagagtacgttatactagagccaaagtctactccgccaatatcaagttggccattatcgatatctcgaggcgatgggcatctccgtttaatacattgattaaagagtgtccatccagtacctgtacatttagcatatataggtcccattttttgctttctgtatccaggtagacatagatattctatagtgtctcctatgttgtaattagcattagcatcagtctccacactattcttaaatttcatattaatgggtcgtgacggaatagtacagcatgatagaacgcatcctattcccaacaatgtcaggaacgtcacgctctccaccttcatatttatttatccgtaaaaatgttatcctggacatcgtacaaataataaaaagcccatatatgttcgctattgtagaaattgtttttcacagttgctcaaaaacgatggcagtgacttatgagttacgttacactttggagtctcatctttagtaaacatatcataatattcgatattacgagttgacatatcgaacaaattccaagtatttgattttggataatattcgtattttgcatctgctataattaagatataatcaccgcaagaacacacgaacatctttcctacatggttaaagtacatgtacaattctatccatttgtcttccttaactatatatttgtatagataattacgagtctcgtgagtaattccagtaattacatagatgtcgccgtcgtactctacagcataaactatactatgatgtctaggcatgggagacttttttatccaacgatttttagtgaaacattccacatcgtttaatactacatatttttcatacgtggtataaactccacccattacatatatatcatcgtttacgaataccgacgcgcctgaatatctaggagtaattaagtttggaagtcttatccatttcgaagtgccgtgtttcaaatattctgccacacccgttgaaatagaaaattctaatcctcctattacatataactttccattgttaacacaagtactaacttctgattttaacgacgacatattagtaaccgttttccattttttcgtttcaagatctacccgcgatacggaataaacatgtctattgttaatcatgccgccaataatgtatagacaattatgtaaaacatttgcattatagaattgtctatctgtattaccgactatcgtccaatattctgttctaggagagtaatgggttattgtggatatataatcagagtttttaatgactactatattatgttttataccatttcgtgtcactggctttgtagatttggatatagttaatcccaacaatgatatagcattgcgcatagtattagtcataaacttgggatgtaaaatgttgatgatatctacatcgtttggatttttatgtatccactttaataatatcatagctgtaacatcctcatgatttacgttaacgtcttcgtgggataagatagttgtcagttcatcctttgataattttccaaattctggatcggatgtcaccgcagtaatattgttgattatttctgacatcgacgcattatatagttttttaattccatatcttttagaaaagttaaacatccttatacaatttgtggaattaatattatgaatcatagtttttacacatagatctactacaggcggaacatcaattattatggcagcaactagtatcatttctacattgtttatggtgatgtttatcttcttccagcgcatatagtctaatagcgattcaaacgcgtgatagtttataccattcaatataatcgcttcatcctttagatggtgatcctgaatgcgtttaaaaaaattatacggagatgccgtaataatttccttattcacttgtataatttccccattgatagaaaatatcacgctttccattcttgaagtactataagtaattatagtataatgtaaaggtttatatattcaatattttttataaaaaaatcatttcgacattaattcctttttaaatttccgtctatcatctatagaaacatattctatgaatttataaaatgcttttacgtgtcctatcgtaggcgatagaaccgctaaaaagcctattgaatttctacaaaagaatctattatatggtatagggagagtataaaacattaaatgcccgtacttattaaagtattcagtagccaatcctaactctttcgaatacttattaatggctcttgttctgtacgaatctatttttttgaacaacggacctagtggtatatcttgttctatgtatctaaaataatgtctgactagatccgttagtttaatatcctcagtcatcttgtctagaatggcaaatctaactgcgggtttaggctttagtttagtttttatatctacatctatgtctttatctaacaccaaaaatataatagctaatattttattacaatcatccggatattcttctacgatctcactaactaatgtttctttggttatactagtatagtcactatcggacaaataaagaaaatcagatgatcgatgaataatacatttaaattcatcatctgtaagatttttgagatgtctcattaaaatattattagggtcagtactcattatcattaggcagctattacttattttattatttttcaccatatagatcaatcattagatcatcaaaatatgtttcaatcatcctaaagagtatggtgaatgactcttcccatctaatttctgaacgttcaccaatgtctctagccactttggcactaatagcgatcattcgcttagcgtcttctatattattaactggttgattcaatctatctagcaatggaccgtcggacagcgtcattctcatgttcttaatcaatgtacatacatcgccgtcatctaccaattcatccaacaacataagctttttaaaatcatcattataataggtttgatcgttgtcatttctccaaagaatatatctaataagtagagtcctcatgcttagtaatttaactattttagttaacaactattttttatgttaaatcaattagtacaccgctatgtttaatacttattcatattttagtttttaggattgagaatcaatacaaaaattaatgcatcattaattttagaaatacttagtttccacgtagttaatgaaacatttgaactcatcgtacaagacgttctcgtacaggacgtaactataaaccggtttatatttgttcaagatagatacaaatccgataactttttttacgaattctacgggatccactttaaaagtgtcataccgggttctttttatttttttaaacagatcaatggtgtgatgttgattaggtcttttacgaatttgatatagaatagcgtttacatattctccataatggtcaatcgccatttgttcgtatgtcataaattctttaattatatgacactgtgtattgtttagttcatccttgttcattgttaggaatctatccaaaatggcaattatactagaactataggtgcgttgtatacacatattgatgtgtctgtttatacaatccatgatatttggatccatgctactaccttcgggtaaaattgtagcatcatataccatttctagtactttaggttcattattatccattgcagaggacgtcatgatcgcatcctaaaaaaatatattatttttatgttattttgttaaaaataatcatcgaatacttcgtaagatactccttcatgaacataatcagttacaaaacgtttatatgaagtaaagtatctacgatttttacaaaagtccggatgcataagtacaaagtacgcgataaacggaataataatagatttatctagtctatctttttctatagctttcatagttagatacatggtctcagaagtaggattatgtaacatcagcttcgataaaatgactgggttatttagtcttacacattcgctcatacatgtatgaccgttaactacagagtctacactaaaatgattgaacaatagatagtctaccattgtttcgtattcagatagtacagcgtagtacatggcatcttcacaaattatatcattgtctaatagatatttgacgcatcttatggatcccacttcaacagccatcttaaaatcggtaaaatcatattgctttcctttatcattaataatttctaaaacatcatctctatcataaaagatacaaatattaactgtttgatccgtaataacattgctagtcgatagcaatttgttaataagatgcgctgggctcaatgtcttaataagaagtgtaagaggactatctccgaatttgttttgtttattaacatccgttgatggaagtaaaagatctataatgtctacattcttgactgttttagagcatacaatatggagaggtgtatttccatcatgatctggttttgagggactaattcctagtttcatcatccatgagattgtagaagcttttggattgtctgacataagatgtctatgaatatgatttttgccaaatttatccactatcctggcttcgaatccgatggacattatttttttaaacactctttctgaaggatctgtacacgccaacaacggaccacatccttcttcatcaaccgagttgttaatcttggctccatactgtaccaataaatttattctctctatgacttcatcatctgttcccgagagataatatagaggcgttttatgctgtttatcacacgcgtttggatctgcgccgtgcgtcagcagcatcgcgactattctattattattaattttagaagctatatgcaatggataatttccatcatcatccgtctcatttggagagtatcctctatgaagaagttcttcgacaaatcgttcatctagtcctttaattccacaatacgcatgtagaatgtgataattatttccagaaggttcgatagcttgtagcatattcctaaatacatctaaatttttactattatatttggcataaagagatagataatactcggccgacataatgttgtccattgtagtataaaaattaatatttctatttctatttctgtatatttgcaacaatttactctctataacaaatatcataacttagttcttttatgtcaagaaggcactggtttagttcatctataaatgtcacgccataactaccacgcatgctatactcagaattatgataaagatatttatccttggggtgtaggtaatggggattaatctttgttggatcagtctctaagttaacacatgtcacacatgatccatttatagttatatcacacgatgatgatttatgaattgattccggaagatcgctatcgtattttgtggttccacaattcatttccatacatgttattgtcacactaatattatgatgaactttatctagccgctgagtggtaaacaacagaacagatagtttattatctttaccaacaccctcagccgctgccacaaatctctgatccgtatccatgatggtcatgtttatttctagtccgtatccagtcaacactatgttagcatttctgtcgatatagctttcactcatatgacactcaccaataatagtagaattaatgtcgtaatttacaccaatagtgagttcggcggcaaagtaccaataccggtaatcttgtcgaggaggacatatagtattcttgtattctaccgaatacccgagagatgcgatacaaaagagcaagactaatttgtaaaccatcttactcaaaatatgtaacaatagtacgatgcaatgagtaagacaataggaaatctatcttatatacacataattattctatcaattttaccaattagttagtgtaatgttaacaaaaatgtgggagaatctaattagtttttctttacacaattgacgtacatgagtctgagttccttgtttttgctaattatttcatccaatttattattcttgactatatcgagatcttttgtataggagtcagacttgtattcaacatgcttttctataatcattttagctatttcggcatcatccaatagtacattttccagattagcagaatagatattaatgtcgtatttgaacagagcctgtaacatctcaatgtctttattatctatagccaatttaatgtccggaatgaagagaagggaattattggtgtttgtcgacgtcatatagtcgagcaagagaatcatcatatccacgtgtccattttttatagtggtgtgaatacaactaaggagaatagccagatcaaaagtagatggtatttctgaaagaaagtatgatacaatacttacatcattaagcatgacggcatgataaaatgaagttttccatccagttttcccatagaacatcagtctccaatttttcttaacaaacagttttaccgtttgcatgttaccactatcaaccgcataatacaatgcagtgtttcccttgtcatcaaattgtgaatcatccagtccactgaatagcaaaatctttactattttggtatcttccaatgtggctgcctgatgtaatggaaattcattctctagaagatttttcaatgctccagcgttcaacaacgtacatactagacgcacgttattatcagctattgcataatacaaggcactatgtccatggacatccgccttaaatgtatctttactagagagaaagcttttcagctgcttagacttccaagtattaattcgtgacagatccatgtctgaaacgagacgctaattagtgtatattttttcattttttataattttgtcatattgcaccagaattaataatatctctaatagatctgattagtagatacatggctatcgcaaaacaacatatacacatttaataaaaataatatttattaagaaaattcagatttcacgtacccatcaatataaataaaataatgattccttacaccgtacccatattaaggagattccaccttacccataaacaatataaatccagtaatatcatgtctaatgatgaacacaaatggtgtattaaattccagtttttcaggagatgatctcgccgtagctaccataatagtagatgcctctgctacagttccttgttcgtcgacatctatctttgcattctgaaacattttataaatatataatgggtccctagtcatatgtttaaacgacgcattatctggattaaacatactaggagccatcatttcggctatcgacttaatatccctcttattttcgatagaaaatttagggagtttaagattgtacactttattccctaattgaaacgaccaatagtctaattttgcagccgtaatagaatctgtgaaatgggtcatattatcacctattgccaggtacatactaatattagcatccttatacggaaggcgtaccatgtcatattctttgtcatcgattgtgattgtatttccttgcaatttagtaactacgttcatcatgggaaccgttttcgtaccgtacttattagtaaaactagcattgcgtgttttagtgatatcaaacggatattgccatgtacctttaaaatatatagtattaatgattgcccatagagtattattgtcgagcatattagaatctactacattagacataccggatctacgttctactatagaattaattttattaaccgcatctcgtctaaagtttaatctatataggccgaatctatgatattgttgataatacgacggtttaatacacacagtattatctacgaaactttgataagttagatcagtgtacgtatatttagatgttttcagcttagctaatcctgatattaattctgtaaatgctggacccagatctctttttctcaaatccatagtcttcaataattctattctagtattacctgatgcaggcaatagcgacataaacatagaaaacgaatagccaaacggcgagaagacaatattatcatcttgaatatttttatacgctactataccggcattggtaaatccttgcagacgataggtagacgctgaacacgttaacgatagtatcaataacgcaatcatgattttatggtattaataattaaccttatttttatgttcggtataaaaaaattattgatgtctacacatccttttgtaattgacatctatatatccttttgtataatcaactctaatcactttaacttttacagttttccctaccagtttatccctatattcaacatatctatccatatgcatcttaacactctctgccaagatagcttcagagtgaggatagtcaaaaagataaatatatagagcataatccttctcgtatactctgccctttattacatcgcccgcattgggcaacgaataacaaaatgcaagcatcttgttaacgggctcgtaaattgggataaaaattatgtttttatatctattttattcaagagaatattcaggaatttctttttccggttgtatctcgtcgcagtatatatcatttgtacattgtttcatattttttaatagtttacaccttttagtaggactagtatcgtacaattcatagctgtattttgaattccaatcacgcataaaaatatcttccaattgttgacgaagacctaatccatcatccggtgtaatattaatagatgctccacatgtatccgtaaagtaatttcctgtccaatttgaggtacctatataggccgttttatcggttaccatatatttggcatggtttaccctagaatacggaatgggaggatcagcatctggtacaataaatagctttacttctatatctatgtttttagattttagcatagcgatagatcttaaaaagtttctcatgataaacgaagatcgttgccagcaactaatcaatagcttaacggatacttgtctgtctatagcggatcttcttaattcatcttctatataaggccaaaacaaaattttacccgccttcgaataaataatagggataaagttcataacagatacataaacgaatttactcgcatttctaatacatgacaataaagcggttaaatcattggttctttccatagtacatagttgttgcggcgcagaagcaataaatacagagtgtggaacaccacttacgttaatactaagaggatgatctgtattataatacgacggataaaagtttttccaattatatggtagattgttaactccaagataccagtatacctcaaaaatttgagtgagatccgctgccaagttcctattattgaagatcgcaatacccaattctttgacctgagttagtgatctccaatccatgttagcgcttcctaaataaatatgtgtattatcagatatccaaaattttgtatgaagaactcctcctaggatatttgtaatatctatgtatcgtacttcaactccggccatttgtagtctttcaacatcctttaatggtttgttagatttattgacggctactctaactcttactcctcttttgggtaattgtacaatctcgtttaatattatcgtgccgaaattcgtacccacttcatccgataaactccaataaaaagatgatatatctagtgtttttgtggtattggatagaatttccctccacatgttaaatgtagacaaatatactttatcaaattgcatacctataggaatagtctctgtaatcactgcgattgtattatccggattcattttatttgttaaaaaataatcctatatcacttcactctattaaaaatccaagtttctatttctttcatgactgattttttaacttcatccgtttccttatgaagatgatgtttggcaccttcataaatttttatttctctattacaatttgcatgttgcatgaaataatatgcacctaaaacatcgctaatctcattgtttgttccctggagtatgagagtcgggggggtgttaatcttggaaattatttttctaaccttgttggtagccttcaagacctgactagcaaatccagccttaattttttcatgattgattaatgggtcgtattggtatttataaactttatccatatctctagatactgattctggacatagctttccgactggcgcatttggtgtgatggttcccataagtttggcagctagcagattcagttttgaaacagcatctgcattaactagaggagacattagaatcattgctgtaaacaagtttggattatcgtaagaggctagtatagaaattgttgctcccatggaatgacccaataagtagatttaatagttaccacgtgctgtaccaaagtcatcaatcatcattttttcaccattacttcttccatgtccaatatgatcatgtgagaatactaaaattcctaacgatgatatgttttcagctagttcgtcataacgtccagaatgtttaccagctccatgacttatgaatactaatgccttaggatatgtaataggtttccaatatttacaatatatgtaatcattgtccagattgaacatacagtttgcactcatgattcacgttatataactatcaatattaacagttcgtttgatgatcatattatttttatgttttattgataattgtaaaaacatacaattaaatcaatatagaggaaggagacggatactgtcttttgtgagatagtcatggcgactaaatcagattatgaggatgctgttttttactttgtggatgatgataaaatatgtagtcgcgactccatcatcgatctaatagatgaatatatcacgtggagaaatcatgttatagtgtttaacaaagatattaccagttgtggaagactgtacaaggaattgatgaagttcgatgatgccgctatacagtactatggtattgataaaattaatgagattgtcgaagctatgagcgaaggagaccactacatcaattttacaaaagtccatgatcaggaaagtttattcgctaccataggaatatgtgctaaaatcactgaacattggggatacaaaaagatttcagaatctagattccaatcattgggaaacattacagatctgatgaccgacgataatataaacatcttgatactttttctagaaaaaaaattgaattgatgatataggggtcttcataacgcataattattacgttagcattctatatccgtgttaaaaaaaattatcctatcatgtatttgagagttttatatgtagcaaacatgatagctgtgatgccaataagctttagatattcacgcgtgctagtgttagggatggtattatctggtggtgaaatgtccgttatataatctacaaaacaatcatcgcatatagtatgcgatagtagagtaaacatttttatcgtttctactgggttcatacatcgtctacccaattcggttatgaatgaaattgtcgccaatcttacacccaaacccttgttatccattagcatagtattaacttcgttatttatgtcataaactgtaaatgattctgtagatgccatatcatacatgatattcatgtccctattataatcattactaactttatcacaatatatgttgataatatctatatatgatctagtctttgtgggcaactgtctatacaagtcgtctaaacgttgtttactcatatagtatcgaacagccatcattacatggtcccgttccgttgatagataatcgagtatgttagtggacttgtcaaatctatataccatattttctggaagtggatatacatagtcgtgatcaacattattgctagcctcatcttctatatcctgtactataccattatctatatcatctacataatctacgatattattatacataaacatcgacaacatactattgtcaattatctaagtcctgttgatccaaacccttgatctcctctatctgtactatctagagattgtacttcttccagttctggataatatatacgttgatagattagctgggctattctatcccccgtatttacattaaacgtacattttccattattaataagaataactcctatgtttcccctataatcttcgtctattacaccgcctcctatatcaatgccttttagggacagaccagacctaggagctattctaccatagcagaacttaggcatggacatactaatatctgtcttaattaactgtcgttctccaggagggatagtataatcgtaagcgctatataaatcatatccggcggcgtaaggtgattgcctagtaggagatttagctctgttagtttccttaacaaatctaactggtgagttaatattcatgttgaacataaaactaatattttatttcaaaattatttaccatcccatatattccatgaataagtgtgatgattgtacacttctatagtatctatatacgattcacgataaaatcctcctatcaatagcagtttattatccactatgatcaattctggattatccctcggataaataggatcatctatcagagtccatgtattgctggattcacaataaaattccgcatttctaccaaccaagaataaccttctaccgaacactaacgcgcatgatttataatgaggataataagtggatggtccaaactgccactgatcatgattgggtagcaaatattctgtagttgtatcagtttcagaatgtcctcccattacgtatataacattgtttatagatgccactgctggattacatctaggtttcagaagactcggcatattaacccaagcagcatccccgtggaaccaacgctcaacagatgtgggatttggtagacctcctactacgtataatttattgttagcgggtatcccgctagcatacagtctggggctattcatcggaggaattggaatccaattgtttgatatataatttacagctatagcattgttatgtatttcattgttcatccatccaccgatgagatatactacttctccaacatgagtacttgtacacatatggaatatatctataatttgatccatgttcataggatactctatgaatggatacttgtatgatttgcgtggttgtttatcacaatgaaatattttggtacagtctagtatccattttacattatttatacctctgggagaaagataatttgacctgattacatttttgataaggagtagcagatttcctaatttatttcttcgctttatataccacttaatgacaaaatcaactacataatcctcatctggaacatttagttcatcgctttctagaataagtttcatagatagataatcaaaattgtctatgatgtcatcttccagttccaaaaagtgtttggcaataaagtttttagtatgacataagagattggatagtccgtattctatacccatcatgtaacactcgacacaatattcctttctaaaatctcgtaagataaagtttatacaagtgtagatgataaattctacagaggttaatatagaagcacgtaataaattgacgacgttatgactatctatatatacctttccagtatatgagtaaataactatagaagttaaactgtgaatgtcaaggtctagacaaacccttgtaactggatctttatttttcgtgtatttttgacgtaaatgtgtgcgaaagtaaggagataactttttcaatatcgtagaattgactattatattgccacctatagcatcaataattgttttgaatttcttagtcatagacaatgctaatatattcttacagtacacagtattaacaaatatcggcatttatgtttctttaaaagtcaacatctagagaaaaatgattatctttttgagacataactcccattttttggtattcacccacacgtttttcgaaaaaattagtttttccttccaatgatatattttccatgaaatcaaacggattggtaacattataaatttttttaaatcccaattcagaaatcaatctatccgcgacgaattctatatatgttttcatcatttcacaattcattcctataagtttaactggaagagccgcagtaagaaattcttgttcaatggatactgcatctgttataatagatctaacggtttcttcactcggtggatacaataaatgtttaaacatcaaacatgcgaagtcgcagtgtagaccctcgtctctactaattagttcgttggaaaacgtgagtccgggcattaggccacgctttttaagccaaaatatggaagcgaatgatccggaaaagaagattccttctactgcagcaaaggcaataagtctctctccataaccggcgctgtcatgtatccacttttgagcccaatcggccttcttttttacacaaggcattgtttctatggcattaaagagatagtttttttcattactatctttaacataagtatcgatcaaaagactatacatttccgaatgaatgttttcaatggccatctgaaatccgtagaaacatctagcctcggtaatctgtacttctgtacaaaatcgttccgccaaattttcattcactattccgtcactggctgcaaaaaacgccaatacatgttttataaaatatttttcgtctggtgttagtttattccaatcattgatatctttagatatatctacttcttccactgtccaaaatgatgcctctgcctttttatacatgttccagatgtcatgatattggattgggaaaataacaaatctatttggatttggtgcaaggatgggttccataactaaattaacaatatcaataaattttttttcagttatctatatgcctgtacttggattttttgtacatcgatatcgccgcaatcactacaataattacaagtattattgatagcattgttattagtactatcataattaaattatcgacattcatgggtgctgaataatcgttattatcatcattatcattttgtaattgtgacatcatactaaataaatcgtttgcgagattgttgtgggaagcgggcatggaggatgcattatcattattatttaacgccttccatttggattcacaaatatggcgcgcgttcaacattttatggaaactataattttgtgaaaacagataacaagaaaactcgtcatcgttcaaatttttaacgatagtaaaccgattaaacgtcgagctaatttctaacgctagcgactctgttggatatgggtttccagatatatatcttttcagttcccctacgtatctataatcatctgtaggaaatggaagatatttccatttatctactgttcctaatatcatatgtggtggtgtagtagaaccattaagcgcgaaagatgttatttcgcatcgtattttaacttcgcaataatttctggttagataacgcactctaccagtcaagtcaatgatattagcctttacagatatattcatagtagtcgtaacgatgactccatcttttagatgcgatactcctttgtatgtaccagaatcttcgtacctcaaactcgatatatttaaacaagttaatgagatattaacgcgttttatgaatgatgatatataaccagaagttttatcctcggtggctagcgctataaccttatcattataataccaactagtgtgattaatatgtgacacgtcagtgtgggtacaaatatgtacattatcgtctacgtcgtattcgatacatccgcatacagccaacaaatataaaatgacaaatactctaacgccgttcgtacccatcttgatgcggtttaataaatgttttgatttcaatttattgtaaaaaaagattcggttttatactgttcgatattctcattgcttatattctcatctatcatctccacacagtcaaatccgtggttagcatgcacctcatcaaccggtaaaagactatcggactcttctatcattataactctagaatatttaatttggtcattattaatcaagtcaattatcttatttttaacaaacgtgagtattttactcattttttataaaaacttttagaaatatacagactctatcgtgtgtctatatcttctttttatatccaatgtatttatgtctgatttttcttcatttatcatatataatggtccaaattctacacgtgcttcggattcatccagatcattaaggttcttataattgtaacatccttctcttccctcttctacatcttccttcttattcttattcttagcgtcacagaatctaccacagcaggatcccatgacgagcgtcatattaaactaatccattttcaattataatatatgattagtaatgaccattaaaataaaaaatattcttcataaccggcaagaaagtgaaaagttcacattgaaactatgtcagtagtatacatcatgaaatgatgatatatatatactctattttggtggaggattatatgatataattcgtggataatcattcttaagacacatttcttcattcgtaaatcttttcacgttaaatgagtgtccatattttgcaatttcttcatatgatggcggtgtacgtggacgaggctgctcctgttcttgttgtggtcgccgactgtcgtgtttgcgtttatccctccattatcgcgattgcgtagatggagtactattatataccttgtaattaaatttttttattaattaaacgtataaaaacgttccgtatctgtatttaagagccagatttcgtctaatagaacaaatagctacagtaaaaataactagaataattgctacacccactagaaaccacggatcgtaatacggcaatcggttttcgataataggtggaacgtatattttatttaaggacttaacaattgtctgtaaaccacaatttgcttccgcggatcctgtattaactatctgtaaaagcatatgttggccgggcggagccgaacattctccgatatccaatttctgtatatctataatattattaacctccgcatacgcattacagttcttttctagcttggataccgcactaggtacatcgtctagatctattcctatttcctcagcgatagctcttctatccttttccggaagcaatgaaatcacttcaataaatgattcaaccatgagtgtgaaactaagtcgagaattactcatgcatttgttagttattcggagcgcgcaatttttaaactgtcctataacctctcctatatgaatagcacaagtgacattagtagggatagaatgttgagctaatttttgtaaataactatctataaaaagattatacaaagttttaaactctttagtttccgccatttatccagtctgagaaaatgtctctcataataaatttttccaagaaactaattgggtgaagaatggaaacctttaatctatatttatcacagtctgttttggtacacatgatgaattcttctaatgccgtactaaattcgatatctttttcgatttctggatatgtttttaataaagtatgaacaaagaaatggaaatcgtaataccagttatgtttaactttgaaattgttttttattttcttgttaatgattccagccacttgggaaaagtcaaagtcgtttaatgccgatttaatacgttcattaaaaacaaactttttatcctttagatgaattattattggttcattggaatcaaaaagtaagatattatcgggtttaagatctgcgtgtaaaaagttgtcgcagcatggtagttcgtagattttaatgtataacagagccatctgtaaaaagataaactttatgtattgtaccaaagatttaaatcctaatttgatagctaactcggtatctactttatctgccgaatacagtgctaggggaaaaattataatgtttcctctttcgtattcgtagttagttctcttttcatgttcgaaaaagtgaaacatgcggttaaaatagtttataacattaatattactgttaataactgccgggtaaaagtgggatagtaatttcacgaatttgatactgtcctttctctcgttaaacgcctttagaaaaactttagaagaatatctcaatgatagttcctgaccatccatagtttgtatcaataatagcaacatatgaagaacacgtttatacagagtatgtaaaaatgttaatttatagtttaatcccatggcccacgcacacacgattaattttttttcatctccctttagattgttgtatagaaatttgggtactgtgaactccgccgtagtttccatgggactatataattttgtggcctcgaatacaaattttactacatagttatctatcttaaaaactataccatatcctcctgtagatatgtgataaaaatcgtcgtttataggataaaatcgtttatccttttgttggaaaaaggatgaattaatgtaatcattctcttctatctttagtagtgtttccttattaaaattcttaaaataatttaacaatctaactgacggagcccaattttggtgtaaatctaattgggacattatattgttaaaatacaaacagtctcctaatataacagtatctgataatctatggggagacatccattgatattcaggggatgaatcattggcaacacccatttattgtacaaaaagccccaatttacaaacgaaagtccaggtttgatagagacaaactattaactattttgtctctgtttttaacacctccacagtttttaatttctttagtaatgaaattattcacaatatcagtatcttctttatctaccagagattttactaacttgataaccttggctgtctcattcaatagggtagtaatatttgtatgtgtgatattgatatctttttgaattgtttcttttagaagtgattctttgatggtgccagcatacgaattacaataatgcagaaactcggttaacatgcaggaattatagtaagccaattccaattgttgcctgtgttgtattagagtgtcaatatgagcaatggtgtccttgcgtttctctgatagaatgcgagcagcgattttggcgttatcatttgacgatatttctggaatgacgaatcctgtttctactaactttttggtaggacaaagtgaaacaatcaagaagatagcttctcctcctatttgtggaagaaattgaactcctctagatgatctactgacgatagtatctccttgacagatattggaccgaattacagaagtacctggaatgtaaagccctgaaaccccctcattttttaagcagattgttgccgtaaatcctgcactgtgaccaagatagagagctcctttggtgaatccatctctatgtttcagtttaaccaagaaacagtcagctggtctaaaatttccatctctatctaatacagcatctaacttgatgtcaggaactatgaccggtttaatgttatatgtaacattgagtaaatccttaagttcataatcatcactgtcatcagttatgtacgatccaaacaatgtttctactggcatagtggatacgaagatgctatccatcagaatgtttccctgattagtattttctatatagctattcttctttaaacgattttccaaatcagtaactatgttcatttttttaggagtaggacgcctagccagtatggaagaggattttctagatcctctcttcaacatctttgatctcaatggaatgcaaaaccccatagtgaaacaaccaacgataaaaataatattgtttttcactttttataattttaccatctgactcatggattcattaatatctttataagagctactaacgtataattctttataactgaactgagatatatacaccggatctatggtttccataattgagtaaatgaatgctcggcaataactaatggcaaatgtataaaacaacgaaattatactagagttgttaaagttaatattttctatgagctgttccaataaattatttgttgtgactgcgttcaagtcataaatcatcttgatactatccagtaaacagtctttaagttctggaatattatcatcccattgtaaagcccctaattcgactatcgaatatcctgctctgatagcagtttcaatatcgacggacgtcaatactgtaataaaggtggtagtattgtcatcatcgtgataaactacgggaatatggtcgttagtaggtacggtgactttacacaacgcgatatataactttccttttgtaccatttttaacgtagttgggacgtcctgcagggtattgttttgaagaaatgatatcgagaacagatttgatacgatatttgttggattcctgattattcactataatataatctagacagatagatgattcgataaatagagaaggtatatcgttggtaggataatacatccccattccagtattctcggatactctattgatgacactagttaagaacatgtcttctattctagaaaacgaaaacatcctacatggactcattaaaacttctaacgctcctgattgtgtctcgaatgcctcgtacaaggatttcaaggatgccatagattctttgaccaacgatttagaattgcgtttagcatctgatttttttattaaatcgaatggtcggctctctggtttgctaccccaatgataacaatagtcttgtaaagataaaccgcaagaaaatttatacgcatccatccaaataaccctagcaccatcggatgatattaatgtattattatagattttccatccacaattattgggccagtatactgttagcaacggtatatcgaatagattactcatgtaacctactagaatgatagttcgtgtactagtcataatatctttaatccaatctaagaaatttaaaattagattttttacactgttaaagttaacaaaggtattacccggatacgtggatatcatatatggcattggtccattatcagtaatagctccataaactgatacggcgatggtttttatatgtgtttgatctaacgaggaagaaattcgcgcccacaattcatctctagatatgtatttaatatcaaacggtaacacatcaatttcgggacgcgtatatgtttctaaatttttaatccaaatataatgatgacctatatgccctattatcatactgtcaactatagtacacctagagaacttacgatacatctgtttcctataatcgttaaattttacaaatctataacatgctaaaccttttgacgacaaccattcattaatttctgatatggaatctgtattctcgataccgtattgttctaaagccagtgctatatctccctgttcgtgggaacgctttcgtataatatcgatcaacggataatctgaagtttttggagaataatatgactcatgatctatttcgtccataaacaatctagacataggaattggaggcgatgatcttaattttgtgcaatgagtcgtcaatcctataacttctaatattgtaatattcatcatcgacataacactatctatgttatcatcgtatattagtataccacggccttcttcatttcgtgccaaaataatatacagtcttaaataattacgcaatatctcaatagtttcataattgttagctgttttcatcaaggtttgtatcctgtttaacatgatggcgttctataacgtctctattttctatttttaattttttaaatttttaacgatttactgtggctagatacccaatctctctcaaatatttttttagcctcgcttacaagctgtttatctatactattaaaactgacgaatccgtgattttggtaatgggttccgtcgaaatttgccgaagtgatatgaacatattcgtcgtcgactatcaacaattttgtattattctgaatagtgaaaaccttcacagatagatcattttgaacacacaacgcgtctagacttctggcggttgccatagaatatacgtcgttcttatcccaattaccaactagaagtctgatcttaactcctctattaatggctgcttctataatggagttgtaaatgtcaggccaatagtagctattaccgtcgacacgtgtagtgggaactatggccaaatgttcaatatctatactagtcttagccgacttgagtttatcaataactacatcagtgtctagatctctagaatatcccaataggtgttctggagaatcagtaaagaacactccacctataggattcttaatatgatacgcagtgctaactggcagacaacaagccgcagagcataaattcaaccatgaattttttgcgctattaaaggctttaaaagtatcaaatcttctacgaagatctgtggccagcgggggataatcagaatatacacctaacgttttaatcgtatgtatagatcctccagtaaatgacgcgtttcctacataacatctttcatcatctgacacccaaaaacaaccgagtagtagtcccacattattttttttatctatattaacggttataaaatttatatccgggcagtgactttgtagctctcccagatttcttttccctcgttcatctagcaaaactattattttaatccctttttcagatgcctcttttagtttatcaaaaataagcgcgcccctagtcgtactcagaggattacaacaaaaagatgctatgtatatatatttcttagctagagtgataatttcgttaaaacattcaaatgttgttaaatgatcggatctaaaatccatattttctggtagtgtttctaccagcctacattttgctcccgcaggtaccggtgcaaatggccacatttagttaacataaaaacttatacatcctgttctatcaacgattctagaatatcatcggctatatcgctaaaattttcatcaaagtcgacatcacaacctaactcagtcaatatattaagaagttccatgatgtcatcttcgtttatttctatatccgtatccattgtagattgttgaccgattatcgagtttaaatcattactaatactcaatccttcagaatacaatctgtgtttcattgtaaatttataggcggtgtatttaagttggtagattttcaattatgtatcaaagaagtgtctgctttatggccttataagctccctcaagctcaacagctgctcccaagaaatcggcttcctttttatagaagttattgtacctggatcgagagttaatttccctgtcgttaaccatatccccgatagtcttgactatgcatttcaaggcaatgagatcgttttcttcgacgaattccttcgctttatttacaaattttttagaagcctcaacaaactttgaatctacaaacttactactgattacgtcaaatgactctatgtacgcaagagccacggacttgcggagcttctcgtaggaatcggcaacatgtcgagcattagacacatcgttatcgacggcctggtccagttctatagcaaagtcatcgatcagtttgctcaggaacattggtttgtactcttcgatgatcttttccaattctttgaacttattgactatcttgttatcctttttaagaatggatatggcttggtttactttagatttatcggagctggtgccctcgctgtatgtcattatataggtcattatatcgttgtacgccccggtatattcactgtagatagcgtccaatttaatagagtaatatttggctttttccacgaaaattttaagttcatcaatatttctttgattaagtctagacacatcgcaagaaccacctccccctgatcctccgccaccggaccctcctccaccatatagcaacagtagttcttgctcctccttgattctagcatcctcttcattattttcttctacgtacataagcatgtccaatacgttagacaacacaccgacgatggcggccgccacagacacgaatatgactagaccgatgaccatttaaaaacccctctctagctttcacttaaactgtatcgattattcttttagaacatgtataatataaaaacattattctatttcgaatttaggcttccaaaaatttttcatccgtaaaccgataataatatatatagacttgttaatagtcggaataaatagattaatgcttaaactatcatcatctccacgattagagatacaatatttacattctttttgctgtttcgaaactttatcaatacacgttaatacaaacccaggaaggagatattgaaactgaggctgttgaaaatgaaacggtgaatacaataattcagataatgtaaaatcatgattccgtattctgatgatattagaactgctaatggatgtcgatggtatgtatctaggagtatctattttaacaaagcatcgatttgctaatatacaattatcattttgattaattgttattttattcatattcttaaaaggtttcatatttatcaattcttctacattaaaaatttccatttttaatttatgtagccccgcaatactcctcattacgtttcattttttgtctataatatccattttgttcatctcggtacatagattatccaattgagaagcgcatttagtagttttgtacattttaagtttattgacgaatcgtcgaaaactagttatagttaacattttattatttgataccctgatattaatacccctgccgttactattatttataactgatgtaacccacgtaacattagaattaattatcgatagtaatgcatcgacgcttccaaaattgtctattataaactcaccgataatttttttattgcatgttttcatattcattaggattatcaaatctttaatcttattacgattgtatgcgttgatattacaagacgtcattctaaaagacggaggatctccatcaaatgccagacaatcacgtacaaagtacatggaaataggttttgttctattgcgcatcatagattcatatagaacacccatagaaatactaatttgttttactctataaaatactaatgcatctatttcatcgttttgtataacgtctttccaagtgccaaattccaaatttttttcattgatagtaccaaattcttctatctctttaactacttgcatagataggtaattacagtgatgcctacatgccgttttttgaaactgaatagatgcgtctagaagcgatgctacactagtcacaatcaccactttcatatttagaatatatgtatgtaaaaatatagtagaatttcattttgtttttttctatgctataaatgaattctcattttgcatctgctcatactccgttttatatcaataccaaagaaggaagatatctggttctaaaagccgttaaagtatgcgatgttagaactgtagaatgcgaaggaagtaaagcttcctgcgtactcaaagtagataaaccctcatcgcccgcgtgtgagagaagaccttcgtccccgtccagatgcgagagaatgaataaccctggaaaacaagtcccgtttatgaggacggacatgctacaaaatatgttcgcggctaatcgcgataatgtagcttctagacttttgtcctaaaatactattatatccttttcgatattaataaatccgtgtcgtccaggttttttatctctttcagtatgtgaatagataggtattttatctctattcatcatcgaatttaagagatccgataaacattgtttgtattctccagatgtcagcatctgatacaacaatatatgtgcacataaacctctggcacttatttcatgtaccttccccttatcactaaggagaatagtatttgagaaatatgtatacatgatattatcatgaattagatatacagaatttgtaacactctcgaaatcacacgatgtgtcggcgttaagatctaatatatcactcgataacacattttcatctagatacactagacattttttaaagctaaaatagtctttagtagtgacagtaactatgcgattattttcatcgatgatacatttcatcggcatattattacgcttaccatcaaagactataccatgtgtatatctaacgtattctagcatggttgccatacgtgcattaaacttttcaggatctttggatagatcttccaatctatctatttgagaaaacatttttatcatgttcaatagttgaaacgtcggatccactatatagatattatctataaagattttaggaactacgttcatggtatcctggcgaatattaaaactatcaatgatatgattatcgttttcatcttttatcaccatatagtttctaagatatgggattttacttaatataatattatttcccgtgataaattttattagaaaggccaaatctataagaaaagtcctagaattagtctgaagaatatctatatcgccgtaccgtatatttggattaattagatatagagaatatgatccgtaacatatacaacttttattatggcgtctaagatattcttccatcaacttattaacatttttgactagggaagatacattatgacgtcccattacttttgccttgtctattactgcgacgttcatagaatttagcatatctcttgccaattcttccattgatgttacattataagaaattttagatgaaattacatttggagctttaatagtaagaactcctaatatgtccgtgtatgtggtcactaatacagattgtagttctataatcgtaaataatttacctatattatatgtttgagtctgtttagaaaagtagctaagtatacgatcttttatttctgatgcagatgtatcaacatcggaaaaaaatctttttttattcttttttactaaagatacaaatatgtctttgttaaaaacagttattttctgaatatttctagcttgtaattttaacatatgatattcgttcacactaggtactctgcctaaataggtttctataatctttaatgtaatattaggaagagtattctgatcaggattcctattcattttgaggatttaaaactctgattattgtctaatatggtctcaacacaaactttttcacagagcgatagagtttttgataactcgtttttcttaagaaatataaaactactgtttccagagctcgctctatcttttattttatctaattcgatacaaactcctgatactggttcagaaagtaattcattaattttcagtcctttatagaagatatttaatatagataatacaaaattttcagttcttgatatcgatctgattgatcctagaactagatatattaataacgtgctcattaggcagtttatggcagcttgataattagatatagtatattccagttcatatttattagataccgcattgcccagattttgatattctatgaattcctctgaaaataaatccaaaataactagacattctattttttgtggattagtgtactctcttccctctatcatgttcactactggtgtccacgatgataaatatctagagggaatataatatagtccataggatgccaatctagcaatgtcgaataactgtaatttgattcttcgttcttcattatgaattgattcttgaggtataaacctaacacaaattatattattagacttttcgtatgtaatgtctttcatgttataagtttttaatcctggaatagaatctattttaatgaggcttttaaacgcagagttctccaacgagtcaaagcataatactctgttgtttttcttatatacgatgttacgattttcttctttgaatggaataggtttttgaattagtttataattacaacataatagataaggaagtgtgcaaatagtacgcggaaaaaacataatagctcccctgttttcatccatggttttaagtaaatgatcactggcttctttagtcaatggatattcgaacattaaccgtttcatcatcattggacagaatccatatttcttaatgtaaagagtgatcaaatcattgtgtttattgtaccatcttgttgtaaatgtgtattcggttatcggatctgctcctttttctattaaagtatcgatgtcgatctcgtctaagaattcaactatatcgacatatttcatttgtatacacataaccattactaacgtagaatgtataggaagagatgtaacgggaacagggtttgttgattcgcaaactattctaatacataattcttctgttaatacgtcttgcacgtaatctattatagatgccaagatatctatataattattttgtaagatgatgttaactatgtgatctatataagtagtgtaataattcatgtatttcgatatatgttccaactctgtctttgtgatgtctagtttcgtaatatctatagcatcctcaaaaaatatattcgcatatattcccaagtcttcagttctatcttctaaaaaatcttcaacgtatggaatataataatctattttacctcttctgatatcattaatgatatagtttttgacactatcttctgtcaattgattcttattcactatatctaagaaacggatagcgtccctaggacgaactactgccattaatatctctattatagcttctggacataattcatctattataccagaattaatgggaactattccgtatctatctaacatagttttaagaaagtcagaatctaagacctgatgttcatatattggttcatacatgaaatgatctctattgatgatagtgactatttcattctctgaaaattggtaactcattctatatatgctttccttgttgatgaaggatagaatatactcaatagaatttgtaccaacaaactgttctcttatgaatcgtatatcatcatctgaaataatcatgtaaggcatacatttaacaattagagacttgtctcctgttatcaatatactattcttgtgataatttatgtgtgaggcaaatttgtccacgttctttaattttgttatagtagatatcaaatccaatggagctacagttcttggcttaaacagatatagtttttctggaacgaattctacaacattattataaaggactttgggtagataagtgggatgaaatcctattttaattaatgcgatagccttgtcctcgtgcagatatccaaacgcttttgtgatagtatggcattcattgtctagaaacgctctacgaatatctgtgacagatatcatctttagagaatatactagtcgcgttaatagtactacaatttgtattttttaatctatctcaataaaaaaattaatatgtatgattcaatgtataactaaactactaactgttattgataactagaatcagaatctaatgatgacgtaaccaagaagtttatctactgccaatttagctgcattatttttagcatctcgtttagattttccatctgccttatcgaatactcttccgtcgatgtctacacaggcataaaatgtaggagagttactaggccccactgattcaatacgaaaagaccaatctctcctagtaatttggcagtactcattaataacggtgacagggttagcacctttccaatcaataatttttttagccggaataacatcatcaaaagacttatgatcctctctcattgatttttcgcgggatacatcatctattatggcgtcagccataacatcagcatccggcttatccgcctccgttgtcataaaccaacgaggaggaatatcgtcggagctgtacaccatagcactacgttgaagatcgtacagagctttattaacttctcgcttctccatattaagttgtctagttagttgtgcagcagtagctccttcgattccaatggttttaatagcctcacacacaatctctgcgttagaacgttcgtcgatatagattttagacatttttagagagaactaacacaaccagcaataaaactgaacctactttatcatttttttattcatcatcctctggtggttcgtcgttcctatcgaatgtggatctgattaacccgtcatctataggtgatgctggttctggagattctggaggagatggattattatctggaagaatctctgttatttccttgttttcatgtatcgattgcgttgtaacattaagattgcgaaatgctctaaatttgggaggcttaaagtgttgtttgcaatctctacacgcatgtctaactagtggaggttcgtcagcggctctagtttgaatcatcatcggcgtagtattcctacttttacagttaggacacggtgtattgtatttctcgtcgagaacgttaaaataatcgttgtaactcacatcctttattttatctatattgtattctactcctttcttaatgcattttataccgaataagagatagcgaaggaattctttttcggtgccgctagtacccttaatcatatcacatagtgttttatattccaaatttgtggcaatagacggtttatttctatacgatagtttgtttctggaatcctttgagtattctataccaatattattctttgattcgaatttagtttcttcgatattagattttgtattacctatattcttgatgtagtactttgatgatttttccatggcccattctattaagtcttccaagttggcatcatccacatattgtgatagtaattctcggatatcagtagcggctaccgccattgatgtttgttcattggatgagtaactactaatgtatacattttccatttataacacttatgtattaactttgttcatttatattttttcattattatgttgatattaacaaaagtgaatatatatgttaataattgtattgtggttatacggctacaatttcataatgagtggaagtcagtgtccgatgatcaatgacgatagctttactctgaaaagaaagtatcaaatcgatagtgcggagtcaacaataaaaatggataagaagaggataaagtttcagaatagagccaaaatggtaaaagaaataaatcagacaataagagcagcacaaactcattacgagacattgaaactaggatacataaaatttaagagaatgattaggactactactctagaagatatagcaccatctattccaaataatcagaaaacttataaactattctcggacatttcagccatcggcaaagcatcacagaatccgagtaagatggtatatgctctgctgctttacatgtttcccaatttgtttggagatgaccatagattcattcgttatagaatgcatccaatgagtaaaatcaaacacaagatcttctctcctttcaaacttaatcttattagaatattagtggaagaaagattctataataatgaatgcagatctaataaatggagaataattggaacacaagttgataaaatgttgatagctgaatctgataaatatacaatagatgcaaggtataacctaaaacccatgtatagaatcaagggaaaatctgaagaagataccctcttcatcaaacagatggtagaacaatgtgtgacatcccaggaattggtggaaaaagtgttgaagatactgtttagagatttgttcaagagtggagaatacaaagcatacagatacgatgatgatgtagaaaatggatttattggattggatacactaaaattaaacattgttcatgatatagttgaaccatgtatgcctgttcgtaggccagtggctaagatactgtgtaaagaaatggtaaataaatactttgagaatccgctacatattattggtaaaaatcttcaagagtgcattgactttgttagtgaataggcatttcatctttctccaatactaattcaaattgttaaattaataatggatagtataaatagttattagtgataaaatagtaaaaataattattagaataagagtgtagtatcatagataactctcttctataaaaatggattttattcgtagaaagtatcttatatacacagtagaaaataatatagattttttaaaggatgatacattaagtaaagtaaacaattttaccctcaatcatgtactagctctcaagtatctagttagcaattttcctcaacacgttattactaaggatgtattagctaataccaatttttttgttttcatacatatggtacgatgttgtaaagtgtacgaagcggttttacgacacgcatttgatgcacccacgttgtacgttaaagcattgactaagaattatttatcgtttagtaacgcaatacaatcgtacaaggaaaccgtgcataaactaacacaagatgaaaaatttttagaggttgccgaatacatggacgaattaggagaacttataggcgtaaattatgacttagttcttaatccattatttcacggaggggaacccatcaaagatatggaaatcatttttttaaaactgtttaagaaaacagacttcaaagttgttaaaaaattaagtgttataagattacttatttgggcatacctaagcaagaaagatacaggcatagagtttgcggataatgatagacaagatatatatactctatttcaacaaactggtagaatcgtccatagcaatctaacagaaacgtttagagattatatctttcccggagataagactagctattgggtgtggttaaacgaaagtatagctaatgatgcggatatcgttcttaatagacacgccattaccatgtatgataaaattcttagttatatatactctgagataaaacaaggacgcgttaataaaaacatgcttaagttagtttatatctttgagcctgaaaaagatatcagagaacttctgctagaaatcatatatgatattcctggagatatcctatctattattgatgcaaaaaacgacgattggaaaaaatattttattagtttttataaagctaattttattaacggtaatacatttattagtgatagaacgtttaacgaggacttattcagagttgttgttcaaatagatcccgaatatttcgataatgaacgaattatgtctttattctctacgagtgctgcggacattaaacgatttgatgagttagatattaataacagttatatatctaatataatttatgaggtgaacgatatcacattagatacaatggatgatatgaagaagtgtcaaatctttaacgaggatacgtcgtattatgttaaggaatacaatacatacctgtttttgcacgagtcggatcccatggtcatagagaacggaatactaaagaaactgtcatctataaaatccaagagtagacggctgaacttgtttagcaaaaacattttaaaatattatttagacggacaattggctcgtctaggtcttgtgttagatgattataaaggagacttgttagttaaaatgataaaccatcttaagtctgtggaggatgtatccgcattcgttcgattttctacagataaaaaccctagtattcttccatcgctaatcaaaactattttagctagttataatatttccatcatcgtcttatttcaaaggtttttgagagataatctatatcatgtagaagaattcttggataaaagcatccatctaaccaagacggataagaaatatatacttcaattgataagacacggtagatcatagaacagaccaaatatattattaataatttgtatatacatagatataattatcacatattaaaaattcacacatttttgataaatgggaactgctgcaacaattcagactcccaccaaattaatgaataaagaaaatgcagaaatgattttggaaaaaattgttgatcatatagttatgtatattagtgacgaatcaagtgattcagaaaataatcctgaatatattgattttcgtaacagatacgaagactatagatctctcattataaaaagtgatcacgagtttgtaaagctatgtaaaaatcatgcagagaaaagttctccagaaacgcaacaaatgattatcaaacacatatacgaacaatatcttattccagtatctgaagtactattaaaacctataatgtccatgggtgacataattacatataacggatgtaaagacaatgaatggatgctagaacaactctctaccctaaactttaacaatctccgcacatggaactcatgtagcataggcaatgtaacgcgtctgttttatacattttttagttatctgatgaaagataaactaaatatataagtataatcccattctaatactttaacctgatgtattacctgcatcttattagaatattaacctaactaaaagacataacataaaaactcattacatagttgataaaaagcggtaggatataaatattatggctgccaccgttccgcgttttgacgacgtgtacaaaaatgcacaaagaagaattctagatcaagaaacattttttagtagaggtctaagtagaccgttaatgaaaaacacatatctatttgataattacgcgtatggatggataccagaaactgcaatttggagtagtagatacgcaaacttagatgcaagtgactattatcccatttcgttgggattacttaaaaagttcgagtttctcatgtctctatataaaggtcctattccagtatacgaagaaaaagtaaatactgaattcatagccaatggatcgttctctggtagatacgtatcatatcttcgaaagttttctgctcttccaacaaacgagtttattagttttttgttactgacttccattccaatctataatatcttgttctggtttaaaaatactcagtttgatattactaaacacacattattcagatacgtctatacagataatgccaaacacctggcgttggctaggtatatgcatcaaacaggagactataagcctttgtttagtcgtctcaaagagaattatatatttaccggtcccgttccaataggtatcaaagatatagatcaccctaatcttagtagagcaagaagtccatccgattatgagacattagctaatattagtactatattgtactttaccaagtatgatccggtattaatgtttttattgttttacgtacctgggtattcaattactacaaaaattactccagccgtagaatatctaatggataaactgaatctaacaaagagcgacgtacaactgttgtaaattattttatgcttcgtaaaatgtaggttttgaaccaaacattctttcaaagaatgagatgcataaaactttattatccaatagattgactatttcggacgtcaatcgtttaaagtaaacttcgtaaaatattctttgatcactgccgagtttaaaacttctatcgataattgtctcatatgttttaatatttacaagttttttggtccatggtacattagccggacaaatatatgcaaaataatatcgttctccaagttctatagtttctggattatttttattatattcagtaaccaaatacatattagggttatctgcggatttataatttgagtgatgcattcgactcaacataaataattctagaggagacgatctactatcaaattcggatcgtaaatctgtttctaaagaacggagaatatctatacatacctgattagaattcatccgtccttcagacaacatctcagacagtctggttttgtacatcttaatcatattcttatgaaacttggaaacatctcttctagtttcactagtacctttattaattctctcaggtacagattttgaattcgacgatgccgagtatttcatcgttgtatatttcttcttcgattgcataatcagattcttatataccgcctcaaactctattttaaaattattaaacaatactctactattaatcagtcgttctaactctttcgctatttctatagacttatctacatcttgactgtctatctctgtaaacacggagtcggtatctccatacacgctacgaaaacgaaatctgtaatctataggcaacgatgttttcacaatcggattaatatctctatcgtccatataaaatggattacttaatggattggcaaaccgtaacataccgttagataactctgctccatttagtaccgattctagatacaagatcattctacgtcctatggatgtgcaactcttagccgaagcgtatgagtatagagcactatttctaaatcccatcagaccatatactgagttggctactatcttgtacgtatattgcatggaatcataaatggccttttcagttgaactggtagcctgttttaacatctttttatatctggctctctctgccaaaaatgttcttaatagtctaggaatggttccttctatcgatctatcgaaaattgctatttcagagatgaggttcggtagtctaggttcacaatgaaccgtaatatatctaggaggtggatatttctgaagcaatagctgattatttatttcttcttccaatctattggtactaacaacgacaccgactaatgtttccggagatagatttccaaagatacacacattaggatacagactgttataatcaaagattaatacattattactaaacattttttgttttggagcaaataccttaccgccttcataaggaaacttttgttttgtttctgatctaactaagatagttttagtttccaacaatagctttaacagtggacccttgatgactgtactcgctctatattcgaataccatggattgaggaagcacatatgttgacgcacccgcgtctgtttttgtttctactccataatactcccacaaatactgacacaaacaagcatcatgaatacagtatctagccatatctaaagctatgtttagattataatccttatacatctgagctaaatcaacgtcatcctttccgaaagataatttatatgtatcattaggtaaagtaggacataatagtacgactttaaatccattttcccaaatatctttacgaattactttacatataatatcctcatcaacagtcacataattacctgtggttaaaacctttgcaaatgcagcggctttgcctttcgcgtccgtagtatcgtcaccgatgaacgtcatttctctaactcctctatttaatactttacccatgcaactgaacgcgttcttggatatagaatccaatttgtacgaatccaatttttcagatttttgaatgaatgaatatagatcgaaaaatatagttccattattgttattaacgtgaaacgtagtattggccatgccgcctactcccttatgactagactgatttctctcataaatacagagatgtacagcttcctttttgtccggagatctaaagataatcttctctcctgttaataactctagacgattagtaatatatctcagatcaaagttatgtccgttaaaggtaacgacgtagtcgaacgttagttccaacaattgtttagctattcgtaacaaaactatttcagaacatagaactagttctcgttcgtaatccatttccattagtgactgtatcctcaaacatcctctatcgacggcttcttgtatttcctgttccgttaacatctcttcattaatgagcgtaaacaataatcgtttaccacttaaatcgatataacagtaacttgtatgcgagattgggttaataaatacagaaggaaacttcttatcgaagtgacactctatatctagaaataagtacgatcttgggatatcgaatctaggtatttttttagcgaaacagttacgtggatcgtcacaatgataacatccattgttaatctttgtcaaatattgctcgtccaacgagtaacatccgtctggagatatcccgttagaaatataaaaccaactaatattgagaaattcatccatggtggcattttgtatgctgcgtttctttggctcttctatcaaccacatatctgcgacggagcattttctatctttaatatctagattataacttattgtctcgtcaatgtctatagttctcatctttcccaacggcctcgcattaaatggaggaggagacaatgactgatatatttcgtccgtcactacgtaataaaagtaatgaggaaatcgtataaatacggtctcaccatttcgacatctggatttcagatataaaaatctgttttcaccgtgactttcaaaccaattaatgcaccgaacatccatttatagaatttagaaatatattttcatttaaatgaatcccaaacattggggaagagccgtatggaccattatttttatagtactttcgcaagcgggtttagacggcaacatagaagcgtgtaaacgaaaactatatactatagtcagcactcttccatgtcctgcatgtagacggcacgcgactatcgctatagaggacaataatgtcatgtctagcgatgatctgaattatatttattattttttcatcagattatttaacaatttggcatctgatcccaaatacgcgatcgatgtgacaaaggttaaccctttataaacttaacccattataaaacttatgattagtcacaactgaaataaccgcgtgattattttttggtataattctacacggcatggtttctgtaactatgaattcaacccccgttacattagtgaaatctttaacaaacagcaagggttcgtcaaagacataaaactcattgtttacaatcgaaatagaccccctatcacacttaaaataaaaaatatccttatcctttaccaccaaataaaattctgattggtcaatgtgaatgtattcacttaacagttccacaaatttatttattaactccgaggcacatacatcgtcggtattttttatggcaaactttactcttccagcatccgtttctaaaaaaatattaacgagttccatttatatcatccaatattattgaaatgacgttgatggacagatgatacaaataagaaggtacggtacctttgtccaccatctcctccaattcatgctctattttgtcattaactttaatgtatgaaaacagtacgccacatgcttccatgacagtgtgtaacactttggatacaaaatgtttgacattagtataattgttcaagactgtcaatctataatagatagtagctataatatattctatgatggtattgaagaagatgacaaccttggcatattgatcatttaacacagacatggtatcaacagatagcttgaatgaaagagaatcagtaattggaataagcgtcttctcgatagagtgtccgtataccaacatgtctgatattttgatgtattccattaaattatttagttttttctttttattttcgttaaacagcatttctgtcaacggaccccaacatcgttgaccgattaagttttgattgatttttccgtgtaatgcgtatctagtcagatcgtatagcctatccaataatccatcatctgtgcgtagatcacatcgtacactttttaattctctatagaagagcgacagacatctggagcaattacagacagcaatttctttattctctacagatgtaagatacttgaagacattcctatgatgatgcagaattttggataacacggtattgatggtatctgttaccataattcctttgatggctgatagtgtcagagcacaagatttccaatctttgacaatttttagcaccattatctttgttttgatatctatatcagacagcatggtgcgtctgacaacacagggattaagacggaaagatgaaatgattctctcaacatcttcaatggataccttgctattttttctggcattatctatatgtgcgagaatatcctctagagaatcagtatcctttttgatgatagtggatctcaatgacatgggacgtctaaaccttcttattttatcaccagattgcatggtgatttgtcttctttcttttatcataatgtaatctctaaattcatcggcaaattgtctatatctaaaatcataatatgagatgtttacctctacaaatatctgttcgtccaatgttagagtatctacatcagttttgtattccaaattaaacatggcaacggatttaattttatattcctctattaagtcctcgtcgataataacagaatgtagataatcatttaatccatcgtacatggttggaagatgcttgttgacaaaatctttaattgtcttgatgaaggtgggactatatctaacatcttgattaataaaatttataacattgtccataggatactttgtaactagttttatacacatctcttcatcggtaagtttagacagaatatcgtgaacaggtggtatattatattcatcagatatacgaagaacaatgtccaaatctatattgtttaatatattatatagatgtagcgtagctcctacaggaatatctttaactaagtcaatgatttcatcaaccgttagatctattttaaagttaatcatataggcattgatttttaaaaggtatgtagccttgactacattctcattaattaaccattccaagtcactgtgtgtaagaagattatattctatcataagcttgactacatttggtcccgataccattaaagaattcttatgatataaggaaacagcttttaggtactcatctactctacaagaattttggagagccttaacgatatcagtgacgtttattatttcaggaggaaaaaacctaacattgagaatgtcggagttaatagcttccagatacagtgattttggcaatagtccgtgtaatccataatccagtaacacgagctggtgcttgctagacaccttttcaatgtttaatttttttgaaataagctttgataaagccttcctcgcaaattccggatacatgaacatgtcggcgacatgattaagtattgttttttcattatttttatattttctcaacaagttctcaataccccaatagatgatagaatatcacccaatgcgtccatgttgtctatttccaacaggtcgctatatccaccaatagaagtttttccaaaaaagattctaggaacagttctaccaccagtaatttgttcaaaatagtcacgcaattcattttcgggtttaaattctttaatatcgacaatttcatacgctcctcttttgaaactaaacttatttagaatatccagtgcatttctacaaaaaggacatgtatacttgacaaaaattgtcactttgttattggccaacctttgttgtacaaattcctcggccattttaatatttaagtgatataaaactatctcgacttatttaactctttagtcgagatatatggacgcagatagctatatgatagccaactacagaaggcaaacgctataaaaaacataattacgacgagcatatttataaatatttttattcagcattacttgatatagtaatattaggcacagtcaaacattcaaccactctcgatacattaactctctcattttctttaacaaattctgcaatatcttcgtaaaaagattcttgaaactttttagaatatctatcgactctagatgaaatagcgttcgtcaacatactatgttttgtatacataaaggcgcccattttaacagtttctagtgacaaaatgctagcgatcctaggatcctttagaatcacatagattgacgattcgtctctcttagtaactctagtaaaataatcatacaatctagtacgcgaaataatattatccttgacttgaggagatctaaacaatctagttttgagaacatcgataagttcatcgggaatgacatacatactatctttaatagaactcttttcatccagttgaatggattcgtccttaaccaactgattaatgagatcttctattttatcattttccagatgatatgtatgtccattaaagttaaattgtgtagcgcttctttttagtctagcagccaatactttaacatcactaatatcgatatacaaaggagatgatttatctatggtattaagaattcgtttttcgacatctgtcaaaaccaattcctttttgcctgtatcatccagttttccatcctttgtaaagaaattattttctactagactattaataagactgataaggattcctccataattgcacaatccaaactttttaacaaaactagactttacaagatctacaggaatgcgtacttcaggtttcttagcttgtgattttttcttttgtggacattttcttgtgaccaactcatctaccatttcattgattttagcagtgaaataagctttcaatgcacgggcactgatactattgaaaacgagttgatcttcaaattccgccatttaagttcaccaaacaacttttaaatacaaatatatcaatagtagtagaataagaactataaaaaaaataataattaaccaataccaaccccaacaaccggtattattagttgatgtgactgttttctcatcacttagaacagatttaacaatttctataaagtctgtcaaatcatcttccggagaccccataaatacaccaaatatagcggcgtacaacttatccatttatacattgaatattggcttttctttatcgctatcttcatcatattcatcatcaatatcaacaagtcccagattacgagccagatcttcttctacattttcagtcattgatacacgttcactatctccagagagtccgataacgttagccaccacttctctatcaatgattagtttcttgagtgcgaatgtaatttttgtttccgttccggatctatagaaaactacaggtgtgataattgccttggccaattgtctttctcttttactgagtgattctagttcaccttctatagatctgagaatggatgattctccagtcgaaacatattctaccatggatccgtttaatttgttgatgaagatggattcatccttaaatgttttctctgtaatagtttccaccgaaagactatgcaaagaatttggaatgcgttccttgtgcttaatgtttccatagacggcttctagaagttgatacaacataggactagccgcggtaacttttatttttagaaagtatccatcgcttctatcttgtttagatttatttttataaagtttagtctctccttccaacataataaaagtggaagtcatttgactagataaactatcagtaagttttatagagatagacgaacaattagcgtattgagaagcatttagtgtaacgtattcgatacattttgcattagatttactaatcgattttgcatactctataacacccgcacaagtctgtagagaatcgctagatgcagtaggtcttggtgaagtttcaactctcttcttgattaccttactcatgattaaacctaaataattgtactttgtaatataatgatatatattttcactttatctcatttgagaataaaaatgtttttgtttaaccactgcatgatgtacagatttcggaatcgcaaaccaccagtggttttattttatccttgtccaatgtgaattgaatgggagcggatgcgggtttcgtacgtagatagtacattcccgtttttagaccgagactccatccgtaaaaatgcatactcgttagtttggaataactcggatctgctatatggatattcatagattgactttgatcgatgaaggctcccctgtctgcagccatttttatgatcgtcttttgtggaatttcccaaatagttttataaactcgcttaatatcttctggaaggtttgtattctgaatggatccaccatctgccataatcctattcttgatctcatcattccataattttctctcggttaaaactctaaggagatgcggattaactacttgaaattctccagacaatactctccgagtgtaaatattactggtatacggttccaccgactcattatttcccaaaatttgagcagttgatgcagtcggcataggtgccaccaataaactatttctaagaccgtatgttctgattttatcttttagaggttcccaattccaaagatccgacggtacaacattccaaagatcatattgtagaataccgttactggcgtacgatcctacatatgtatcgtatggtccttccttctcagctagttcacaactcgcctctaatgcaccgtaataaatggtttcgaagatcttcttatttagatcttgtgcttccaggctatcaaatggataatttaagagaataaacgcgtccgctaatccttgaacaccaataccgataggtctatgtctcttattagagatttcagcttctggaataggataataattaatatctataattttattgagatttctgacaattactttgaccacatccttcagtttgagaaaatcaaatcgcccatctattacaaacatgttcaaggcaacagatgccagattacaaacggctacctcattagcatccgcatattgtattatctcagtgcaaagattactacacttgatagttcctaaattttgttgattactctttttgttacacgcatccttataaagaatgaatggagtaccagtttcaatctgagattctataatcgctttccagacgactcgagcctttattatagatttgtatctcctttctctttcgtatagtgtatacaatcgttcgaactcgtctccccaaacattgtccaatccaggacattcatccggacacatcaacgaccactctccgtcatccttcactcgtttcataaagagatcaggaatccaaagagctataaatagatctctggttctatgttcctcgtttcctgtattctttttaagatcgaggaacgccataatatcagaatgccacggttccaagtatatggccataactccaggccgtttgtttcctccctgatctatgtatctagcggtgttattataaactctcaacattggaataataccgtttgatataccattggtaccggagatatagcttccactggcacgaatattactaattgatagacctattccccctgccattttagagattaatgcgcatcgttttaacgtgtcatagataccctctatgctatcatcgatcatgttaagtagaaaacagctagacatttggtgacgactagttcccgcattaaataaggtaggagaagcgtgcgtaaaccatttttcagaaagtagattgtacgtctcaatagctgagtctatatcccattgatgaattcctactgcgacacgcattaacatgtgctgaggtctttcaacgatcttgttgtttattttcaacaagtaggatttttccaaagttttaaaaccaaaatagttgtatgaaaagtctcgttcgtaaataataaccgagttgagtttatccttatatttgttaactatatccatggtgatacttgaaataatcggagaatgtttcccatttttaggattaacatagttgaataaatcctccatcacttcactaaatagtttttttgtttccttgtgtagatttgatacggctattctggcggctagaatggcataatccggatgttgtgtagtacaagtggctgctatttcggctgccagagtgtccaattctaccgttgttactccattatatattccttgaataaccttcatagctattttaataggatctatatgatccgtgtttaagccataacataattttctaatacgagacgtgattttatcaaacatgacattttccttgtatccatttcgtttaatgacaaacatttttgttggtgtaataaaaaaattatttaacttttcattaatagggatttgacgtatgtagcgtacaaaattatcgttcctggtatatagataaagagtcctatatatttgaaaatcgttacggctcgattaaactttaatgattgcatagtgaatatatcattaggatttaactccttgactatcagggcggcaccagaaattaccatcaaaagcattaatacagttatgccgatcgcagttagaacggttatagcatccaccatttatatctaaaaattagatcaaagaatatgtgacaaagtcctagttgtatactgagaattgacgaaacaatgtttcttacatatttttttcttattagtaactgacttaatagtaggaactggaaagctagacttgattattctataagtatagatacccttccaaataatattctctttgataaaagttccagaaaatgtagaattttttaaaaagttatcttttgctattaccaagattgtgtttagacgcttattattaatatgagtgatgaaatccacaccgcctctagatatcgcttttatttccacattagatggtaaatccaatagtgaaactatctttttaggaatgtatggactcgcgtttagaggagtgaacgtcttaggcgtcggaaaggatgattcatcaaacgaataaacaatttcacaaatggatgttaatgtattagtaggaaattttttgacgctagtggaattgaagattctaatggatgatgttctacctatttcatccgataacatgttaatttccgacaccaacggttttaatatttcgatgatatacggtagtctctctttcggacttatatagcttattccacaatacgagtcattatatactccaaaaaacaaaataactagtataaaatctgtatcgaatgggaaaaacgaaattatcgacataggtatagaatctggaacattgaacgtattaatacttaattctttttctgtggtaagtaccgataggttattgacattgtatggttttaaatattctataacttgagacttgatagatattagtgatgaattgaaaattatttttatcaccacgtgtgtttcaggatcatcgtcgacgcccgtcaaccaaccgaatggagtaaaataaatatcattaatatatgctctagatattagtatttttatcaatcctttgattatcatcttctcgtaggcgaatgattccatgatcaagagtgatttaagaacatcctccggagtattaatgggcttagtaaacagtccatcgttgcaataataaaagttatccaagttaaaggatattatgcattcgtttaaagatatcacctcatctgacggagacaattttttggtaggttttagagactttgaagctacttgtttaacaaagttattcatcgtcgtttactattctatttaattttgtagttaatttatcacatatcacattaattgactttttggtccatttttccatacgtttatattcttttaatcctgcgttatccgtttccgttatatccagggatagatcttgcaagttaaatagaatgctcttaaataatgtcatttttttatccgctaaaaatttaaagaatgtataaacttttttcaaagatttaaaacttttaggtggagttctagtacacaatatcataaacaaactaataaacatcccgcattcagattccaacagctgattaacttccacattaatacagcctattttcgctccaaatgtacattcgaaaaatctgaataaaacatcgatgtcacaatttgtattatccaatacagaatgtctgtgattcgtgttaaaaccatcggagaaggaatagaaataaaaattattatagtggtggaattcagttggaatattgcctccggagtcataaaaggatactaaacattgttttttatcataaattacacatttccaatgagacaaataacaaaatccaaacattacaaatctagaggtagaacttttaattttgtctttaagtatatacgataagatatgtttattcataaacgcgtcaaatttttcatgaatcgctaaggagtttaagaatctcatgtcaaattgtcctatataatccacttcggatccataagcaaactgagagactaagttcttaatacttcgattgctcatccaggctcctctctcaggctctattttcatcttgacgacctttggattttcaccagtatgtattcctttacgtgataaatcatcgattttcaaatccatttgtgagaagtctatcgccttagatactttttcccgtagtcgaggtttaaagaaatacgctaacggtatactagtaggtaactcaaagacatcatatatagaatggtaacgcgtctttaactcgtcggttaactctttcttttgatcgagttcgtcgctactattgggtctgctcaggtgccccgactctactagttccaacatcataccgataggaatacaagacactttgccagcggttgtagatttatcatatttctccactacatatccgttacaatttgttaaaaatttagatacatctatattgctacataatccagctagtgaatatatatgacataataaattggtaaatcctagttctggtattttactaattactaaatctgtatatctttccatttatcatggaaaagaatttaccagatatcttcttttttccaaactgcgttaatgtattctcttacaaatattcacaagatgaattcagtaatatgagtaaaacggaacgtgatagtttctcattggcggtgtttccagttataaaacatagatggcataacgcacacgttgtaaaacataaaggaatatacaaagttagtacagaagcacgtggaaaaaaagtatctcctccatcactaggaaaacccgcacacataaacctaaccgcgaagcaatatatatacagtgaacacacaataagctttgaatgttatagttttctaaaatgtataacaaatacagaaatcaattcgttcgatgagtatatattaagaggactattagaagctggtaatagtttacagatattttccaattccgtaggtaaacgaacagatactataggtgtactagggaataagtatccatttagcaaaattccattggcctcattaactcctaaagcacaacgagagatattttcagcgtggatttctcatagacctgtagttttaactggaggaactggagtgggtaagacgtcacaggtacccaagttattgctttggtttaattatttatttggtggattctctactctagataaaatcactgactttcacgaaagaccagtcattctatctcttcctaggatagctttagttagattgcatagcaataccattttaaaatcattgggatttaaggtactagatggatctcctatttctttacggtacggatctataccggaagaattaataaacaaacaaccaaaaaaatatggaattgtattttctacccataagttatctctaacaaaactatttagttatggcactcttattatagacgaagttcatgagcatgatcaaataggagatattattatagcagtagcgagaaagcatcatacgaaaatagattctatgtttttaatgactgccacgttagaggatgacagggaacggctaaaagtatttttacctaatcccgcatttatacatattcctggagatacactgtttaaaattagcgaggtatttattcataataagataaatccatcttccagaatggcatacatagaagaagaaaagagaaatttagttactgctatacagatgtatactcctcctgatggatcatccggtatagtctttgtggcatccgttgcacagtgtcacgaatataaatcatatttagaaaaaagattaccgtatgatatgtatattattcatggtaaggtcttagatatagacgaaatattagaaaaagtgtattcatcacctaatgtatcgataattatttctactccttatttggaatccagcgttactatacacaatgttacacacatttatgatatgggtagagtttttgtccccgctccttttggaggatcgcaacaatttatttctaaatctatgagagatcaacgaaaaggaagagtaggaagagttaatcctggtacatacgtctatttctatgatctgtcttatatgaagtctatacagcgaatagattcagaatttctacataattatatattgtacgctaataagtttaatctaacactccccgaagatttgtttataatccctacaaatttggatattctatggcgtacaaaggaatatatagactcgttcgatattagtacagaaacatggaataaattattatccaattattatatgaagatgatagagtatgctaaactttatgtactaagtcctattctcgctgaggagttggataactttgagaggacgggagaattaactagtattgtacgagaagccattttatctctaaatttacgaattaagattttaaattttaaacataaagatgatgatacgtatatacacttttgtaaaatattattcggtgtctataacggaacaaacgctactatatattatcatagacctctaacgggatatatgaatatgatttcagatactatatttgttcctgtagataataactaaaaatcaaactctaatgaccacatctttttttagagatgaaaaattttctacatctccttttgtagacacgactaaacattttgcagaaaaaagtttattagtgtttagataatcgtatacttcatcagtgtagatagtaaatgtgaacagataaaaggtattcttgctcaatagattggtaaattccatagaatatattaatcctttcttcttgagatcccacatcatttcaaccagagacgttttatccaatgatttacctcgtactataccacatacaaaactagattttgcagtgacgtcgtacctggtattcctaccaaacaaaattttacttttagttcttttagaaaattctaaggtagaatctctatttgccaatatgtcatctatggaattaccactagcaaaaaatgatagaaatatatattgatacatcgcagctggttttgatctactatactttaaaaacgaatcagattccataattgcctgtatatcatcagctgaaaaactatgttttacacgtattccttcggcatttctttttaatgatatatcttgtttagacaatgataaagttatcatgtccatgagagacgcgtctccgtatcgtataaatatttcattagatgttagacgcttcattaggggtatacttctataaggtttcttaatcagtccatcattggttgcgtcaagaactactatcggatgttgttgggtatctctagtgttacacatggccttactaaagtttgggtaaataactatgatatctctattaattatagatgcatatatttcattcgtcaaggatattagtatcgacttgctatcgtcattaatacgtgtaatgtaatcatataaatcatgcgatagccaaggaaaatttaaatagatgttcatcatataatcgtcgctataattcatattaatacgttgacattgactaatttgtaatatagcctcgccacgaagaaagctctcgtattcagtttcatcgataaaggataccgttaaatataactggttgccgatagtctcatagtctattaagtggtaagtttcgtacaaatacagaatccctaaaatattatctaatgttggattaatctttaccataactgtataaaatggagacggagtcataactattttaccgtttgtacttactggaatagatgaaggaataatctccggacatgctggtaaagacccaaatgtctgtttgaagaaatccaatgttccaggtcctaatctcttaacaaaaattacgatattcgatcccgatatcctttgcattctatttaccagcatatcacgaactatattaagattatctatcatgtctattctcccaccgttatataaatcgcctccgctaagaaacgttagtatatccatacaatggaatacttcatttctaaaatagtattcgttttctaattctttaatgtgaaatcgtatactagaaagggaaaaattatctttgagttttccgttagaaaagaaccacgaaactaatgttctgattgcgtccgattccgttgctgaattaatggatttacaccaaaaactcatataacttctagatgtagaagcattcgctaaaaaattagtagaatcaaaggatataagtagatgttccaacaagtgagcaattcccaagatttcatctatatcattctcgaatccgaaattagaaattcccaagtagatatcctttttcatccgatcgttgatgaaaatacgaactttattcggtaagacaatcatttactaaggagtaaaataggaagtaatgttcgtatgtcgttatcatcgtataaattaaaggtgtgttttttaccattaagtgacattataattttaccaatattggaattataatataggtgtatttgcgcactcgcgacggttgatgcatcggtaaatatagctgtatctaatgttctagtcggtatttcatcatttcgctgtctaataatagcgttttctctatctgtttccattacagctgcctgaagtttattggtcggataatatgtaaaataataagaaatacatacgaataacaaaaataaaataagatataataaagatgccatttagagatctaattttgttcaacttgtccaaattcctacttacagaagatgaggaatcgttggagatagtgtcttccttatgtagaggatttgaaatatcttatgatgacttgataacttactttccagataggaaataccataaatatatttataaagtatttgaacatgtagatttatcggaggaattaagtatggaattccatgatacaactttgcgagatttagtttatcttagattgtacaagtattccaagtgtatacggccgtgttataaattaggagataatctaaaaggcatagttgttataaaggacaggaatatttatattagggaagcaaatgatgacttgatagaatatctcctcaaggaatacactcctcagatttatacatattctaatgagcgcgtccccataactggttcaaaattaattctttgtggattttctcaagttacatttatggcgtatacaacgtcgcatataacaacaaataaaaaggtagatgttctcgtttccaaaaaatgtatagatgaactagtcgatccaataaattatcaaatacttcaaaatttatttgataaaggaagcggaacaataaacaaaatactcaggaagatattttattcggtaaccggtggccaaactccataggtagctttttctatttcggattttagaatttccaaattcaccagcgatttatcggttttggtgaaatccaaggatttattaatgtccacaaatgccatttgttttgtctgtggattgtatttgaaaatggaaacgatgtagttagatagatgcgctgcgaagtttcctattagggttccgcgcttcacgtcacccagcatacttgaatcaccatcctttaaaaaaaatgataagatatcaacatggagtatatcatactcggattttaattcttctactgcatcactgacattttcacaaatactacaatacggtttaccgaaaataatcagtacgttcttcatttatgggtatcaaaaacttaaaatcgttactgctggaaaataaatcactgacgatattagatgataatttatacaaagtatacaatggaatatttgtggatacaatgagtatttatatagccgtcgccaattgtgtcagaaacttagaagagttaactacggtattcataaaatacgtaaacggatgggtaaaaaagggagggcatgtaaccctttttatcgatagaggaagtataaaaattaaacaagacgttagagacaagagacgtaaatattctaaattaaccaaggacagaaaaatgctagaattagaaaagtgtacatccgaaatacaaaatgttaccggatttatggaagaagaaataaaggcaaaaatgcaattaaaaatcgataaacttacatttcaaatatatttatctgattctgataacataaaaatatcattgaatgagatactaacacatttcaacaataatgagaatgttacattattttattgtgatgaacgagacgcagaattcgttatgtgtctcgaggctaaaacacatttctctaccacaggagaatggccgttgataataagtaccgatcaggatactatgctatttgcatctactgataatcatcctaagatgataaaaaacttaactcaactgtttaaatttgttccctcggcagaggataactatttagcaaaattaacggcgttagtgaatggatgtgatttctttcctggactctatggggcatctataacacccaccaacttaaacaaaatacaattgtttagtgattttacaatcgataatatagtcactagtttggcaattaaaaattattatagaaagactaactctaccgtagacgtgcgtaatattgttacgtttataaacgattacgctaatttagacgatgtctactcgtatgttcctccttgtcaatgcactgttcaagaatttatattttccgcattagatgaaaaatggaatgaatttaaatcatcttatttagagaccgttccgttaccctgtcaattaatgtacgcgttagaaccacgtaaggagattgatgtttcagaagttaaaactttatcatcttatatagatttcgaaaatactaaatcagatatcgatgttataaaatctatatcctcgatttttggatattctaacgaaaactgtaacacgatagtattcggcatctataaggataatttactactgagtataaataattcattttactttaacgatagtctgttaataaccaatactaaaagtgataatataataaatataggttactagattaaaaatggtgttccaactcgtgtgctctacatgcggtaaagatatttctcacgaacgatataaattgattatacgaaaaaaatcattaaaggatgtactcgtcagtgtaaagaacgaatgttgtaggttaaaattatctacacaaatagaacctcaacgtaacttaacagtgcaacctctattggatataaactaatatggatccggttaattttatcaagacatatgcgcctagaggttctattatttttattaattataccatgtcattaacaagtcatttgaatccatcgatagaaaaacatgtgggtatttattatggtacgttattatcggaacacttggtagttgaatctacctatagaaaaggagttcgaatagtcccattggatagtttttttgaaggatatcttagtgcaaaagtatacatgttagagaatattcaagttatgaaaatagcagctgatacgtcattaactttattgggtattccgtatggatttggtcatgatagaatgtattgttttaaattggtagctgactgttataaaaatgccggtgttgaaacatcgtctaaacgaatattaggtaaagatatttttctgagccaaaacttcacagacgataatagatggataaagatatatgattctaataatttaacattttggcaaattgattaccttaaagggtgagttaatatgcataactactcctccgttgttttttccctcgttctttttcttaacgttgtttgccatcactctcataatgtaaagatattctaaaatggtaaacttttgcatatcggacgcagaaattggtataaatgttgtaattgtattatttcccgtcaatggactagtcacagctccatcagttttatatcctttagagtatttctcactcgtgtctaacattctagagcattccatgatctgtttatcgttgatattggccggaaagatagattttttattttttattatattactattggcaattgtagatataacttctggtaaatatttttctaccttttcaatctcttctattttcaagccggctatatattctgctatattgttgctagtatcaataccttttcttgctaagaagtcatatgtggtattcactatatcagttttaactggtagttccattagcctttccacttctgcagaataatcagaaattggttctttaccagaaaatccagctactataataggctcaccgatgatcattggcaaaatcctatattgtaccagattaatgagagcatatttcatttccaataattctgctagttcttgagacattgatttatttgatgaatctagttggttctctagatactctaccatttctgccgcatacaataacttgttagataaaatcagggttatcaaagtgtttagcgtggctagaatagtgggcttgcatgtattaaagaatgcggtagtatgagtaaaccgttttaacgaattatatagtctccagaaatctgtggcgttacatacatgagccgaatgacatcgaagattgtccaatatttttaatagctgctctttgtccattatttctatatttgactcgcaacaattgtagataccattaatcactgattcctttttcgatgccggacaatagcacaattgtttagctttggactctatgtattcagaattaatagatatatctcttaatacagattgcactatacattttgaaactatgtcaaaaattgtagaacgacgctgttctgcagccatttaactttaaataatttacaaaaatttaaaatgagcatccgtataaaaatcgataaactgcgccaaattgtggcatatttttcagagttcagtgaagaagtgtctataaatgtagactcgacggatgagttaatgtatatttttgccgccttgggcggatctgtaaacatttgggccattatacctctcagtgcatcagtgttctaccgcggagccgaaaatattgtgtttaatcttccggtgtccaaggtaaaatcgtgtttgtgtagttttcacaatgatgccatcatagatatagaacctgatctggaaaataatctagtaaaactttctagttatcatgtagtaagtgtcgattgtaacaaggaactgatgcctattaggacagatactactatttgtctaagtatagatcaaaagaaatcttacgtgtttaattttcacaagtatgaagaaaaatgttgtggtagaaccgtcattcatttagaatggttgttgggctttatcaagtgtattagtcagcatcagcatttggctattatgtttaaagatgacaatattattatgaagactcctggtaatactgatgcgttttccagggaatattctatgactgaatgttctcaagaactacaaaagttttctttcaaaatagctatctcgtctctcaacaaactacgaggattcaaaaagagagtcaatgtttttgaaactagaatcgtaatggataatgacgataacattctaggaatgttgttttcggatagagttcaatcctttaagatcaacatctttatggcgtttttagattaatactttcaatgagataaatatgggtggcggagtaagtgttgagctccctaaacgggatccgcctccgggagtacccactgatgagatgttattaaacgtggataaaatgcatgacgtgatagctcccgctaagcttttagaatatgtgcatataggaccactagcaaaagataaagaggataaagtaaagaaaagatatccagagtttagattagtcaacacaggacccggtggtctttcggcattgttaagacaatcgtataatggaaccgcacccaattgctgtcgcacttttaatcgtactcattattggaagaaggatggaaagatatcagataagtatgaagagggtgcagtattagaatcgtgttggccagacgttcacgacactggaaaatgcgatgttgatttattcgactggtgtcagggggatacgttcgatagaaacatatgccatcagtggatcggttcagcctttaataggagtgatagaactgtagagggtcaacaatcgttaataaatctgtataataagatgcaaacattatgtagtaaagatgctagtgtaccaatatgtgaatcatttttgcatcatttacgcgcacacaatacagaagatagcaaagagatgatcgattatattctaagacaacagtctgcggactttaaacagaaatatatgagatgtagttatcccactagagataagttagaagagtcattaaaatatgcggaacctcgagaatgttgggatccagagtgttcgaatgccaatgttaatttcttactaacacgtaattataataatttaggactttgcaatattgtacgatgtaatactagcgtgaacaacttacagatggataaaacttcctcattaagattgtcatgtggattaagcaatagtgatagattttctactgttcccgtcaatagagcaaaagtagttcaacataatattaaacattcgttcgacctaaaattgcatttgatcagtttattatctctcttggtaatatggatactaattgtagctatttaaatgggtgccgcggcaagcatacagacgacggtgaatacactcagcgaacgtatctcgtctaaattagaacaagaagcgaacgctagtgctcaaacaaaatgtgatatagaaatcggaaatttttatatccgacaaaaccatggatgtaacctcactgttaaaaatatgtgctctgcggacgcggatgctcagttggatgctgtgttatcagccgctacagaaacatatagtggattaacaccggaacaaaaagcatacgtgccagctatgtttactgctgcgttaaacattcagacaagtgtaaacactgttgttagagattttgaaaattatgtgaaacagacttgtaattctagcgcggtcgtcgataacaaattaaagatacaaaacgtaatcatagatgaatgttacggagccccaggatctccaacaaatttggaatttattaatacaggatctagcaaaggaaattgtgccattaaagcgttgatgcaattgacgactaaggccactactcaaatagcacctagacaagttgctggtacaggagttcagttttatatgattgttatcggtgttataatattggcagcgttgtttatgtactatgccaagcgtatgctgttcacatccaccaatgataaaatcaaacttattttagccaataaggaaaacgtccattggactacttacatggacacattctttagaacttctccgatggttattgctaccacggatatacaaaactgaaaatatattgataatattttaatagattaacatggaagttatcgctgatcgtctagacgatatagtgaaacaaaatatagcggatgaaaaatttgtagattttgttatacacggtctagagcatcaatgtcctgctatacttcgaccattaattaggttgtttattgatatactattatttgttatagtaatttatatttttacggtacgtctagtaagtagaaattatcaaatgttgttggtggcgctagtcatcacattaactattttttattactttatactataatagtactagactgacttctaacaaacatctcacctgccataaataaatgcttgatattaaagtcttctatttctaacactattccatctgtggaaaataatactctgacattatcgctaattgacacatcggtgagtgatatgcctataaagtaataatcttctttgggcacatataccagtgtaccaggttctaacaacctatttactggtgctcctgtagcatactttttctttaccttgagaatatccatcgtttgcttggtcaatagcgatatgtgattttttatcaaccactcgaaaaagtaattggagtgttcatatcctctacgggctattgtctcatggccgtgtatgaaatttaagtaacacgactgtggtagatttgttctatagagccggttgccgcaaatagatagaactaccaatatgtctgtacaaatgttaaacattaattgattaacagaaaaaacaatgttcgttctgggaatagaaaccagatcaaaacaaaattcgttagaatatatgccacgtttatacattgaatataaaataactacagtttgaaaaataacagtatcatttaaacatttaacttgcggggttaatctcacaactttactgtttttaaactgttcaaaatatagcatcgatccatgagaaatacgtttagccgcctttaatagaggaaatcccaccgcctttctggatctcaccaacgacgatagttctgaccagcaactcatttcttcatcatccacctgttttaacatataataggcaggagatagatatccgtcattgcaatattccttctcgtaggcacacaatctaatattgataaaatctccattctcttctctgcatttattatcttgtttcggtggctgattaggctgtagtcttggtttaggctttggtatatcgttgttgaatctattttggtcattaaatctttcatttcttcctggtatatttttatcacctcgtttggttggatttttgtctatattatcgtttgtaacatcggtacgggtattcatttatcacaaaaaaaacttctctaaatgagtctactgctagaaaacctcatcgaagaagataccatattttttgcaggaagtatatctgagtatgatgatttacaaatggttattgccggcgcaaaatccaaatttccaagatctatgctttctatttttaatatagtacctagaacgatgtcaaaatatgagttggagttgattcataacgaaaatatcacaggagcaatgtttaccacaatgtataatataagaaacaatttgggtctaggagatgataaactaactattgaagccattgaaaactatttcttggatcctaacaatgaagttatgcctcttattattaataatacggatatgactgccgtcattcctaaaaaaagtggtaggagaaagaataagaacatggttattttccgtcaaggatcatcacctatcttgtgtattttcgaaactcgtaaaaagattaatatttataaagaaaatatggaatccgcatcgactgagtatacacctatcggagacaacaaggctttgatatctaaatatgcgggaattaatatcctaaatgtgtattctccttccacatccataagattgaatgccatttacggattcaccaataaaaataaactagagaaacttagtactaataaggaactagaatcgtatagttctagccctcttcaagaacccattaggttaaatgattttctgggactattggaatgtgttaaaaagaatattcctctaacagatattccgacaaaggattgattactataaatggagaatgttcctaatgtatactttaatcctgtgtttatagagcccacgtttaaacattctttattaagtgtttataaacacagattaatagttttatttgaagtattcgttgtattcattctaatatatgtattttttagatctgaattaaatatgttcttcatgcctaaacgaaaaatacccgatcctattgatagattacgacgtgctaatctagcgtgtgaagacgataaattaatgatctatggattaccatggatgacaactcaaacatctgcgttatcaataaatagtaaaccgatagtgtataaagattgtgcaaagcttttgcgatcaataaatggatcacaaccagtatctcttaacgatgttcttcgcagatgatgattcattttttaagtatttggctagtcaagatgatgaatcttcattatctgatatattgcaaatcactcaatatctagactttctgttattattattgatccaatcaaaaaataaattagaagccgtgggtcattgttatgaatctctttcagaggaatacagacaattgacaaaattcacagactttcaagattttaaaaaactgtttaacaaggtccctattgttacagatggaagggtcaaacttaataaaggatatttgttcgactttgtgattagtttgatgcgattcaaaaaagaatcctctctagctaccaccgcaatagatcctattagatacatagatcctcgtcgcgatatcgcattttctaacgtgatggatatattaaagtcgaataaagtgaacaataattaattctttattgtcatcatgaacggcggacatattcagttgataatcggccccatgttttcaggtaaaagtacagaattaattagacgagttggtaccatttttattaggcgtcacgttaccaataaaaaacaaaaaaataaattaactaattagcgatgatataatataatcatgttcatcatgagggaatctatctatcgcgtgatgattgtaatcctgtacttgagtcttatttcaagttttttggtaatatgcagcatggaacacggatatttccaggagggcattagtagatttaagatttgcccgtatcactggtacaaacaacacatgagcttgctcttcagaaggtactaccataaactggatagcattatatgagcttgactaatttttatcaataatacaaaaaaatgaaataaaaccgtctattatacgctggttaccgctattagctctaaccattttcaggatgcggtccctcgttatcgttcttctctttcctagtatcatctatagcatggtcataaggcggtgtgaaaagatggaagaagagacgtggaagcttaaaataggtatgtgtatccaggctaaggacttctacagtaagagaacagattgttcagtgcataggcccgacgtaggcggcgggttgattaccgagggaaacggttacagggtagtcgtacacgatcaatgcgaagagcctaatccgttcatcatagccacaaccaagcaaactcacttcggcgttacgcattcctatatcgaattctcaaacagcaacacgggtgctccagaaaacattccagactgttccaagcacatccttatctctgtttattgtgaccaagaagcgtcaggtctggactttcacaccctgaagtatgtggaatcaaattatctccatataactgtaaagtatgacacaagctgcataaaccatttgggagtcaactatagttttatgaacgaatgcgagaggaagctcacctccatttatgaaaccgacacccttacttgcggtgcgaaagacattcaaaccagggataagtatctcaagacgtgtaccaacaccaaattcgaccgatcagtctataaaacccacatgcagaagtccaagatccttcacgtcaagaccgaactctaaccactatcactaatcatcaagcaatttttataacttcagcgatattgccgacattaaatcatctgaattaatttcttgtattcttcagtagtatacgtatttatttattgtcggatatataaatcatacaacaatgcacctccagtattatgcgatttcattggtctcactggtaagtcttatcgactgtcataaactggcgtttaattttaatctcgaaatcaacggatccgacacccactcaaccgtcgacgtatatcttgatgattcacagattattacgtttgatggcaaagacattagaccgactattccgtttatgattggcgatgagatatttttgcctttctacaagaatgtgttcagcgaattcttctctttgtttaggcgcgtccctacgagtaccccgtatgaggatctgacgtacttttatgagtgcgattacacagataataaaagcacattcgaccaattttacctctacaatggagaggaatacaccgtaaagactcaggaagcgactaacaagaacatgtggttgactacttccgaattccggctgaaaaaatggtttgatggtgaggactgcataatgcacctgcggagtttggtaaggaaaatggaagacagcaaacgcaatacagggtagttataaatattttcataatcagagctcggaggtaatgatatgtatcaatcggtgtgtagaaagtgttacatcgactcataatattatattttttatctaaaaaactaaaaataaacattgattaaattttaatataatacttaaaaatggatgttgtgtcgttagataaaccgtttatgtattttgaggaaattgataatgagttagattacgaaccagaaagtgcaaatgaggtcgcaaaaaaactaccgtatcaaggacagttaaaactattactaggagaattattttttcttagtaagttacagcgacacggtatattagatggtgccaccgtagtgtatataggatcggctcctggtacacatatacgttatttgagagatcatttctataatttaggagtgatcatcaaatggatgctaattgacggccgccatcatgatcctattttaaatggattgcgtgatgtgactctagtgactcggttcgttgatgaggaatatctacgatccatcaaaaaacaactgcatccttctaagattattttaatttctgatgtaagatccaaacgaggaggaaatgaacctagtacggcggatttactaagtaattacgctctacaaaatgtcatgattagtattttaaaccccgtggcatctagtcttaaatggagatgcccgtttccagatcaatggatcaaggacttttatatcccacacggtaataaaatgttacaaccttttgctccttcatattcagctgaaatgagattattaagtatttataccggtgagaacatgagactgactcgagttaccaaattagacgctgtaaattatgaaaaaaagatgtactaccttaataagatcgtccgtaacaaagtagttgttaactttgattatcctaatcaggaatatgactattttcacatgtactttatgctgaggaccgtgtactgcaataaaacatttcctactactaaagcaaaggtactatttctacaacaatctatatttcgtttcttaaatattccaacaacatcaactgaaaaagttagtcatgaaccaatacaacgtaaaatatctagcaaaaattctatgtctaaaaacagaaatagcaagagatccgtacgcggtaataaatagaaacgtgctactgagatatactaccgatatagagtataatgatttagttactttaataaccgttagacataaaattgattctatgaaaactgtgtttcaggtatttaacgaatcatccataaattatactccggttgatgatgattatggagaaccaatcattataacatcgtatcttcaaaaaggtcataacaagtttcctgtaaattttctatacatagatgtggtaatatctgacttatttcctagctttgttagactagatactacagaaactaatatagttaatagtgtactacaaacaggcgatggtaaaaagactcttcgtcttcccaaaatgttagagacggaaatagttgtcaagattctctatcgccctaatataccattaaaaattgttagatttttccgcaataacatggtaactggagtagagatagccgatagatctgttatttcagtcgctgattaatcaattagtagagatgagataagaacattataataatcaataatattatcttatatctcgtttagaaaaatgctaatattaaaatagctaacgctagtaatccaatcggaagccatttgatatctataatagggtatctaatttcctgattcagatagcggacagctatattctcggtagctactcgtttggaatcacaaacattatttacatctaatttactatctgtaatggaaacgtttcccaatgaaatggtacaatccgatacattgcattttgttatatttttttttaaagaggctggtaacaacgcatcgcttcgtttacatggctcgtaccaacaataatagggtaatcttgtatctattcctatccgtactatgcttttatcaggataaatacatttacatcgtatatcgtctttgttagcatcacagaatgcataaatttgttcgtccgtcatgataaaaatttaaagtgtaaatataactattatttttatagttgtaataaaaagggaaatttgattgtatactttcggttctttaaaagaaactgacttgataaaaatggctgtaatctctaaggttacgtatagtctatatgatcaaaaagagattaatgctacagatattatcattagtcatgttaaaaatgacgacgatatcggtaccgttaaagatggtagactaggtgctatggatggggcattatgtaaaacttgtgggaaaacggaattggaatgtttcggtcactggggtaaagtaagtatttataaaactcatatagttaagcctgaatttatttcagaaattattcgtttactgaatcatatatgtattcactgcggattattgcgttcacgagaaccgtattccgacgatattaacctaaaagagttatcgggacacgctcttaggagattaaaggataaaatattatccaagaaaaagtcatgttggaacagcgaatgtatgcaaccgtatcaaaaaattactttttcaaagaaaaaggtttgtttcgtcaacaagttggatgatattaacgttcctaattctctcatctatcaaaagttaatttctattcatgaaaagttttggccattattagaaattcatcaatatccagctaacttattttatacagactactttcccatccctccgctgattattagaccggctattagtttttggatagatagtatacccaaagagaccaatgaattaacttacttattaggtatgatcgttaagaattgtaacttgaatgctgatgaacaggttatccagaaggcggtaatagaatacgatgatattaaaattatttctaataacactaccagtatcaatttatcatatattacatccggcaaaaataatatgattagaagttatatcgtcgcccgacgaaaagatcagaccgctagatctgtaattggtcccagtacatctatcaccgttaatgaggtaggaatgcccgcatatattagaaatacacttacagaaaagatatttgttaatgcctttacagtggataaagttaaacaactattagcgtcaaaccaagttaaattttactttaataaacgattaaaccaattaacaagaatacgccaaggaaagtttatcaaaaataaaatacatttattgcctggtgattgggtagaagtagctgttcaagaatatacaagtattatttttggaagacagccgtctctacatagatacaacgtcatcgcttcatctatcagagctaccgaaggagatactatcaaaatatctcccggaattgccaactctcaaaatgctgatttcgacggagatgaagaatggatgatattggagcaaaatcctaaagccgtaattgaacaaagtattcttatgtatccgacgacgttactcaaacacgatattcatggagcccccgtttatggatctattcaagatgaaatcgtagcagcgtattcattgtttaggatacaagatctttgtttagatgaagtattgaacatcttggggaaatatggaagagagttcgatcctaaaggtaaatgtaaattcagcggtaaagatatctatacttacttgataggtgaaaagattaattatccgggtctcttaaaggatggtgaaattattgcaaacgacgtagatagtaattttgttgtggctatgaggcatctgtcattggctggactcttatccgatcataagtcgaacgtggaaggtatcaactttattatcaagtcatcttatgtttttaagagatatctatctatttacggttttggggtgacattcaaagatctgagaccaaattcgacgttcactaataaattggaggccatcaacgtagaaaaaatagaacttatcaaagaagcatacgccaaatatctcaacgatgtaagagacgggaaaatagttccattatctaaagctttagaggcggactatgtggaatccatgttatccaacttgacaaatcttaatatccgagagatagaagaacatatgagacaaacgctgatagatgatccagataataacctcctgaaaatggccaaagcgggttataaagtaaatcctacagaactaatgtatattctaggtacgtatggacaacaaaggattgatggtgaaccagcagagactcgagtattgggtagagtcttaccttactatcttccagactctaaggatccagaaggaagaggttacattcttaattctttaacaaaaggattaacgggttctcaatattacttttcgatgctggttgccagatctcaatctactgatatcgtctgtgaaacatcacgtaccggaacactggctagaaaaatcattaaaaagatggaggatatggtggtcgacggatacggacaagtagttataggtaatacgctcatcaagtacgccgccaattataccaaaattctaggctcagtatgtaaacctgtagatcttatctatccagatgagtccatgacttggtatttggaaattagtgctctgtggaataaaataaaacagggattcgtttactctcagaaacagaaacttgcaaagaagacattggcgccgtttaatttcctagtattcgtcaaacccaccactgaggataatgctattaaggttaaggatctgtacgatatgattcataacgtcattgatgatgtgagagagaaatacttctttacggtatctaatatagattttatggagtatatattcttgacgcatcttaatccttctagaattagaattacaaaagaaacggctatcactatctttgaaaagttctatgaaaaactcaattatactctaggtggtggaactcctattggaattatttctgcacaggtattgtctgagaagtttacacaacaagccctgtccagttttcacactactgaaaaaagtggtgccgtcaaacaaaaacttggtttcaacgagtttaataacttgactaatttgagtaagaataagaccgaaattatcactctggtatccgatgatatctctaaacttcaatctgttaagattaatttcgaatttgtatgtttgggagaattaaatccagacatcactcttcgaaaagaaacagataaatatgtagtagatataatagttaatagattatacatcaagagagcagaaataaccgaattagttgtcgaatatatgattgaacgatttatctcctttagcgtcattgtaaaggaatggggtatggagacattcattgaggacgaggataatattagatttactgtctacctaaatttcgttgaaccggaagaattgaatcttagtaagtttatgatggttcttccgggtgccgccaacaagggcaagattagtaaattcaagattcctatctctgattatacgggttatgacgacttcaatcaaacaaaaaagctcaataagatgactgtagaactcatgaatctaaaagaattgggttctttcgatttggaaaacgtcaacgtgtatcctggagtatggaatacatacgatatcttcggtatcgaggccgctcgtgaatacttgtgcgaagccatgttaaacacctatggagaagggttcgattatctgtatcagccttgtgatcttctcgctagtttactatgtgctagttacgaaccagaatcagttaataaattcaagttcggtgcagctagtactcttaagagagctacgttcggagacaataaagcattgttaaacgcggctcttcataaaaagtcagaacctattaacgataatagtagctgccacttttttagcaaggtccctaatataggaactggatattacaaatactttatcgacttgggtcttctcatgagaatggaaaggaaactatctgataagatatcttctcaaaagatcaaggaaatggaagaaacagaagacttttaattcttatcaataacatatttttctatgatctgtcttttaaacgatggattttccacaaatgcgcctctcaagtccctcatagaatgatacacgtataaaaaatatagcataggcaatgactccttatttttagacattagatatgccaaaatcatagccccgcttctatttactcccgcagcacaatgaaccaacacgggctcgtttcgttgatcacatttagataaaaaggcggttacgtcgtcaaaatatttactaatatcggtagttgtatcatctaccaacggtatatgaataatattaatattagagttaggtaatgtatatttatccatcgtcaaatttaaaacatatttgaacttaacttcagatgatggtgcatccatagcatttttataatttcccaaatacacattattggttacccttgtcattatagtgggagatttggctttgtgcatatctccagttgaacgtagtagtaagtatttatacaaacttttcttatccatttataacgtacaaatggataaaactactttatcggtaaacgcgtgtaatttagaatacgttagagaaaaggctatagtaggcgtacaagcagccaaaacatcaacacttatattctttgttattatattggcaattagtgcgctattactctggtttcagacgtctgataatccagtctttaatgaattaacgagatatatgcgaattaaaaatacggttaacgattggaaatcattaacggatagcaaaacaaaattagaaagtgatagaggtagacttctagccgctggtaaggatgatatattcgacttcaaatgtgtggatttcggcgcctattttatagctatgcgattggataagaaaacatatctgccgcaagctattaggcgaggtactggagacgcgtggatggttaaaaaggcggcaaaggtcgatccatctgctcaacaattttgtcagtatttgataaaacacaagtctaataatgttattacttgtggtaatgagatgttaaatgaattaggttatagcggttattttatgtcaccgcattggtgttccgattttagtaatatggaatagtgttagataaatgcggtaacgaatgttcctgtaaggaaccataacagtttagatttaacgttaaagatgagcataaacataataaacaaaattacaatcaaacctataacattaatatcaaacaatccaaaaaatgaaatcagtggagtagtaaacgcgtacataactcctggataacgtttagcagctgccgttcctattctagaccaaaaattcggtttcatgttttcgaagcggtgttctgcaacaagtcggggatcgtgttctacatatttggcggcgttatccagtatctgcctattgatcttcatttcgttttcgattctggctatttcaaaataaaatcccgatgatagacctccagactttataatttcatctacgatgttcagcgccgtagtaactctaataatataggctgataagctaacatcataccctcctgtatatgtgaatatggcatgatttttgtccattacaagctcggttttaactttattgcctgtaataatttctctcatctgtaggatatctatttttttgtcatgcattgccttcaagacgggacgaagaaacgtaatatcctcaataacgttatcgttttctacaataactacatattctacctttttattttctaactcggtaaaaaaattagaatcccatagggctaaatgtctagcgatatttcttttcgtttcctctgtacacatagtgttacaaaaccctgaaaagaagtgagtatacttgtcatcatttctaatgtttcctccagtccactgtataaacgcataatccttgtaatgatctggatcatccttgactaccacaacatttcttttttctggcataacttcgttgtcctttacatcatcgaacttctgatcattaatatgctcatgaacattaggaaatgtttctgatggaggtctatcaataactggcacaacaataacaggagttttcaccgccgccatttagttattgaaattaatcatatacaactctttaatacgagttatattttcgtctatccattgtttcacatttacatatttcgacaaaaagatataaaatgcgtattccaatgcttctctgtttaatgaattactaaaatatacaaacacgtcactgtctggcaataaatgatatcttagaatattgtaacaatttattttgtattgcacatgttcgtgatctatgagttcttcttcgaatggcataggatctccgaatctgaaaacgtataaataggagttagaataataatatttgagagtattggtaatatataaactctttagcggtataattagtttttttctctcaatttctatttttagatgtgatggaaaaatgactaattttgtagcattagtatcatgaactctaatcaaaatcttaatatcttcgtcacacgttagctctttgaagtttttaagagatgcatcagttggttctacagatggagtaggtgcaacaattttttgttctacacatgtatgtactggagccattgttttaactataatggtgcttgtatcgaaaaactttaatgcagatagcggaagctcttcgccgcgactttctacatcgtaattgggttctaacgccgatctctgaatggatactagttttctaagttctaatgtgattctctgaaaatgtaaatccaattcctccggcattatagatgtgtatacatcggtaaataaaactatagtatccaacgatcccttctcgcaaattctagtcttaaccaaaaaatcgtatataaccacggagatggcgtatttaagagtggattcttctaccgttttgttcttggatgtcatataggaaactataaagtccgcactactgttaagaatgattactaacgcaactatatagttcaaattaagcattttggaaacataaaataactctgtagacgatacttgactttcgaataagtttgcagacaaacgaagaaagaacagacctctcttaatttcagaagaaaactttttttcgtattcctgacgtctagagtttatatcaataagaaagttaagaattagtcggttaatgttgtatttcattacccaagtttgagatttcataatattatcaaaagacatgataatattaaagataaagcgctgactatgaacgaaatagctatatggttcgctcaagaatatagtcttgttaaacgtggaaacgataactgtatttttaatcacgtcagcggcatctaaattaaatataggtatatttattccacacactctacaatatgccacaccatcttcataataaataaattcgttagcaaaattattaattttagtgaaatagttagcgtcaactttcatagcttccttcaatctaatttgatgctcacacggtgcgaattccactctaacatcccttttccatgcctcaggttcatcgatctctataatatctagtttcttgcgtttcacaaacacgggctcgtctctcgcgatgagatctgtatagtaactatgtaaatgataactagatagaaagatgtagctatatagatgacgatcctttaagagaggtataataactttaccccaatcagataaactattgttatggtcttcggaaaaagaatttttataaatttttccagtattttccaaatatacgtacttgacatctaaaaaatccttaatgataataggaatggataatccgtctattttataaagaaatacatatcgcacattatacttttttttggaaatgggaataccgatgtgtctacataaatatgcaaagtctaaatattttttagagaatcttagttggtccaaattcttttccaagtacggtaatagatttttcatattgaacggtatcttcttaatctctggttctagttccgcattaaatgatgaaactaagtcactatttttataactaacgattacatcacctctaacatcatcatttaccagaatactgatcttcttttgtcgtaaatacatgtctaatgtgttaaaaaaaagatcatacaagttatacgtcatttcatctgtggtattcttgtcattgaaggataaactcgtactaatctcttctttaacagcctgttcaaatttatatcctatatacgaaaaaatagcaaccagtgtttgatcatccgcgtcaatattctgttctatcgtagtgtataacaatcgtatatcttcttctgtgatagtcgatacgttataaaggttgataacgaaaatatttttatttcgtgaaataaagtcatcgtaggattttggacttatattcgcgtctagtagatatgcttttatttttggaatgatctcaattagaatagtctctttagagtccatttaaagttacaaacaactaggaaattggtttatgatgtataatttttttagtttttatagattctttattctatacttaaaaaatgaaaataaatacaaaggttcttgagggttgtgttaaattgaaagcgagaaataatcataaattatttcattatcgcgatatccgttaagtttgtatcgtaatggcgtggtcaattacaaataaagcggatactagtagcttcacaaagatggctgaaatcagagctcatctaaaaaatagcgctgaaaataaagataaaaacgaggatattttcccggaagatgtaataattccatctactaagcccaaaaccaaacgagccactactcctcgtaaaccagcggctactaaaagatcaaccaaaaaggaggaagtggaagaagaagtagttatagaggaatatcatcaaacaactgaaaaaaattctccatctcctggagtcagcgacattgtagaaagcgtggccgctgtagagctcgatgatagcgacggggatgatgaacctatggtacaagttgaagctggtaaagtaaatcatagtgctagaagcgatctttctgacctaaaggtggctaccgacaatatcgttaaagatcttaagaaaattattactagaatctctgcagtatcgacggttctagaggatgttcaagcagctggtatctctagacaatttacttctatgactaaagctattacaacactatctgatctagtcaccgagggaaaatctaaagttgttcgtaaaaaagttaaaacttgtaagaagtaaatgcgtgcacttttttataaagatggtaaactctttaccgataataattttttaaatcctgtatcagacgataatccagcgtatgaggttttgcaacatgttaaaattcctactcatttaacagatgtagtagtatatgaacaaacgtgggaggaggcgttaactagattaatttttgtgggaagcgattcaaaaggacgtagacaatacttttacggaaaaatgcatgtacagaatcgcaacgctaaaagagatcgtatttttgttagagtatataacgttatgaaacgaattaattgttttataaacaaaaatataaagaaatcgtccacagattccaattatcagttggcggtttttatgttaatggaaactatgttttttattagatttggtaaaatgaaatatcttaaggagaatgaaacagtagggttattaacactaaaaaataaacacatagaaataagtcccgatgaaatagttatcaagtttgtaggaaaggacaaagtttcacatgaatttgttgttcataagtctaatagactatataagccgctattgaaactgacggatgattctagtcccgaagaatttctgttcaacaaactaagtgaacgaaaggtatacgaatgtatcaaacagtttggtattagaatcaaggatctccgaacgtatggagtcaattatacgtttttatataatttttggacaaatgtaaagtccatatctcctcttccatcaccaaaaaagttaatagcgttaactatcaaacaaactgctgaagtggtaggtcatactccatcaatttcaaaaagagcttacatggcaacgactattttagaaatggtaaaggataaaaattttttagatgtagtatctaaaactacgttcgatgaattcctatctatagtcgtagatcacgttaaatcatctacggatggatgatatagatctttacacaaataattacaagaccgataaatggaaatggataagcgtatgaaatctctcgcaatgacagctttcttcggagagctaaacacattagatattatggcattgataatgtctatatttaaacgccatccaaacaataccattttttcagtggataaggatggtcagtttatgattgatttcgaatacgataattataaggcttctcaatatttggatctgaccctcactccgatatctggagatgaatgcaagactcacgcatcgagtatagccgaacaattggcgtgtgtggatattattaaagaggatattagcgaatatatcaaaactactccccgtcttaaacgatttataaaaaaataccgcaatagatcagatactcgtatcagtcgagatacagaaaagcttaaaatagctctagctaaaggcatagattacgaatatataaaagacgcttgttaataagtaaatgaaaaaaaactagtcgtttataataaaacacaatatggatgccaacatagtatcatcttctactattgcaacgtatatagacgctttagcaaagaatgcttcagaattagaacagaggtctaccgcatacgaaataaataatgaattggaactagtatttattaagccgccattaattactttgacaaatgtagtgaatatctctacgattcaggaatcgtttattcgatttaccgttactaataaggaaggtgtcaaaattagaactaagattccattatctaaggtacatggtctagatgtaaaaaatgtacagttagtagatgctatagataacatagtttgggaaaagaaatcattagtgacggaaaatcgtcttcacaaagaatgcttgttgagactatcgacagaggaacgtcatatatttttggattacaagaaatatggatcctctatccgactagaattagtcaatcttattcaagcaaaaacaaaaaactttacgatagactttaagctaaaatattttctaggatccggtgcccaatctaaaagttctttgttgcacgctattaatcatccaaagtcaaggcctaatacatctctggaaatagaattcacacctagagacaatgaaaaagttccatatgatgaactaataaaggaattgacgactctatcacgtcatatatttatggcttctccagagaatgtaattctttctccgcctattaacgcacctataaagacttttatgttgcctaaacaagatatagtaggtctggatctggaaaatctatatgccgtaactaagactgacggcattcctataactatcagagttacatcaaacgggttgtattgttattttacacatcttgggtatattattagatatccagttaagagaataatagattccgaagtagtagtctttggtgaggcagttaaggataagaactggaccgtatatctcattaagctaatagagcctgtgaatgcaatcaatgatagactagaagaaagtaagtatgttgaatctaaactagtggatatttgtgatcggatagtattcaagtcaaagaaatatgaaggtccgtttactacaactagtgaagtcgtcgatatgttatctacatatttaccaaagcaaccagaaggtgttattctgttctattcaaagggacctaaatctaacattgattttaaaattaaaaaggaaaatactatagaccaaactgcaaatgtagtatttaggtacatgtccagtgaaccaattatctttggagaatcgtctatctttgtagagtataagaaatttagcaacgataaaggctttcctaaagaatatggttctggtaagattgtgttatataacggcgttaattatctaaataatatctattgtttggaatatattaatacacataatgaagtgggtattaagtccgtggttgtacctattaagtttatagcagaattcttagttaatggagaaatacttaaacctagaatcgataaaaccatgaaatatattaactcagaagattattatggaaatcaacataatatcatagtcgaacatttaagagatcaaagcatcaaaataggagatatctttaacgaggataaactatcggatgtgggacatcaatacgccaataatgataaatttagattaaatccagaagttagttattttacgaataaacgaactagaggaccgttgggaattttatcaaactacgtcaagactcttcttatttctatgtattgttccaaaacatttttagacgattccaacaaacgaaaggtattggcgattgattttggaaacggtgctgacctggaaaaatacttttatggagagattgcgttattggtagcgacggatccggatgctgatgctatagctagaggaaatgaaagatacaacaaattaaactctggaattaaaaccaagtactacaaatttgactacattcaggaaactattcgatccgatacatttgtctctagtgtcagagaagtattctattttggaaagtttaatatcatcgactggcagtttgctatccattattcttttcatccgagacattatgctaccgtcatgaataacttatccgaactaactgcttctggaggcaaggtattaatcactaccatggacggagacaaattatcaaaattaacagataaaaagacttttataattcataagaatttacctagtagcgaaaactatatgtctgtagaaaaaatagctgatgatagaatagtggtatataatccatcaacaatgtctactccaatgactgaatacattatcaaaaagaacgatatagtcagagtgtttaacgaatacggatttgttcttgtagataacgttgatttcgctacaattatagaacgaagtaaaaagtttattaatggcgcatctacaatggaagatagaccgtctacaaaaaactttttcgaactaaatagaggagccattaaatgtgaaggtttagatgtcgaagacttacttagttactatgttgtttatgtcttttctaagcggtaaataataatatggtatgggttctgatatccccgttctaaatgcattaaataattccaatagagcgatttttgttcctataggaccttccaactgtggatactctgtattgttaatagatatattaatacttttgtcgggtaacagaggttctacgtcttctaaaaataaaagtttgataacatctggcctgttcataaataaaaacttggcgattctatatatactcttattatcaaatctagccattgtcttatagatgtgagctactgtaggtgtaccatttgattttctttctaatactatatatttctctcgaagaagttcttgcacatcatctgggaataaaatactactgttgagtaaatcagttattttttttatatcgatattgatggacatttttatagttaaggataataagtatcccaaagtcgataacgacgataacgaagtatttatacttttaggaaatcacaatgactttatcagatcaaaattaacaaaattaaaggagcatgtatttttttctgaatatattgtgactccagatacatatggatctttatgcgtcgaattaaatgggtctagttttcagcacggtggtagatatatagaggtggaggaatttatagatgctggaagacaagttagatggtgttctacatccaatcatatatctgaagatatacccgaagatatacacactgataaatttgtcatttatgatatatacacttttgacgctttcaagaataaacgattggtattcgtacaggtacctccgtcgttaggagatgatagctatttgactaatccgttattgtctccgtattatcgtaattcagtagccagacaaatggtcaatgatatgatttttaatcaagattcatttttaaaatatttattagaacatctgattagaagccactatagagtttctaaacatataacaatagttagatacaaggataccgaagaattaaatctaacgagaatatgttataatagagataagtttaaggcgtttgtattcgcttggtttaacggcgtttcggaaaatgaaaaggtactagatacgtataaaaaggtatctaatttgatataatgaattcagtgactgtatcacacgcgccatatactattacttatcacgatgattgggaaccagtaatgagtcaattggtagagttttataacgaagtagccagttggctgctacgagacgagacgtcgcctattcctgataagttctttatacagttgaaacaaccgcttagaaataaacgagtatgtgtgtgcggtatagatccgtatccgaaagatggaactggtgtaccgttcgaatcaccaaattttacaaaaaaatcaattaaggagatagcttcatctatatctagattaaccggagtaattgattataaaggttataaccttaatataatagacggggttataccctggaattattacttaagttgtaaattaggagaaacaaaaagtcacgcgatctactgggataagatttccaagttactgctgcagcatataactaaacacgttagtgttctttattgtttgggtaaaacagatttctcgaatatacgggcaaagttagaatccccggtaactaccatagtgggatatcatccagcggctagagaccgtcaattcgagaaagatcgatcatttgaaattatcaacgttttactggaattagacaacaaggtacctataaattgggctcaagggtttatttattaatgctttagtgaaattttaacttgtgttctaaatggatgcggctattagaggtaatgatgttatctttgttcttaagactataggtgtcccgtcagcgtgcagacaaaatgaagatccaagatttgtagaagcatttaaatgcgacgagttagaaagatatattgagaataatccagaatgtacactattcgaaagtcttagggatgaggaagcatactctatagtcagaattttcatggatgtagatttagacgcgtgtctagacgaaatagattatttaacggctattcaagattttattatcgaggtgtcaaactgtgtagctagattcgcgtttacagaatgcggcgccattcatgaaaatgtaataaaatccatgagatctaatttttcattgactaagtctacaaatagagataaaacaagttttcatattatctttttagacacgtataccactatggatacattgatagctatgaaacgaacactattagaattaagtagatcatctgaaaatccactaacaagatcgatagacactgccgtatataggagaaaaacaactcttcgggttgtaggtactaggaaaaatccaaattgcgacactattcatgtaatgcaaccacctcatgataatatagaagattacctattcacttacgtggatatgaacaacaatagttattacttttctctacaacgacgattggaggatttagttcctgataagttatgggaaccagggtttatttcattcgaagacgctataaaaagagtttcaaaaatattcattaattctataataaactttaatgatctcgatgaaaataattttacaacggtaccactggtcatagattacgtaacaccttgtgcattatgtaaaaaacgatcgcataaacatccgcatcaactatcgttggaaaatggtgctattagaatttacaaaactggtaatccacatagttgtaaagttaaaattgttccgttggatggtaataaactgtttaatattgcacaaagaattttagacactaactctgttttattaaccgaacgaggagaccatatagtttggattaataattcatggaaatttaacagcgaagaacccttgataacaaaactaattttgtcaataagacatcaactacctaaggaatattcaagcgaattactctgtccaagaaaacgaaagactgtagaagctaacatacgagacatgttagtagattcagtggagaccgatacctatccggataaacttccgtttaaaaatggtgtattggacctggtagacggaatgttttactctggagatgatgctaaaaaatatatgtgtactgtatcaaccggatttaaatttgacgatacaaagttcgtcgaagacagtccagaaatggaagagttaatgaatatcattaacgatatccaaccattaacggatgaaaataagaaaaatagagagctatatgaaaaaacattatctagttgtttatgcggtgctaccaaaggatgtttaacattcttttttggagaaactgcaactggaaagtcgacaaccaaacgtttgttaaagtctgctatcggtgacctgtttgttgagacgggtcaaacaattttaacagatgtattggataaaggacctaatccatttatcgctaacatgcatttgaaaagatctgtattctgtagcgaactacctgattttgcatgtagtgggtcaaagaaaatcagatctgataatattaaaaagttgacagaaccttgtgtcattggaagaccgtgtttctccaataaaattaataatagaaaccatgcgacaatcattatcgatactaattacaaacctgtttttgataggatagataacgcattaatgagaagaattgccgtcgtgcgattcagaacacacttttctcaaccttctggtagagaggctgctgaaaataatgacgcgtacgataaagtcaaactattagacgaggggttagatggtaaaatacaaaataatagatatagattcgcatttctatacttgttggtgaaatggtacagaaaatatcatgttcctattatgaaactatatcctacacccgaagagattcctgactttgcattctatctcaaaataggtactctgttggtatctagctctgtaaagcatattccattaatgacggacctctccaaaaagggatatatattgtacgataatgtggtcactcttccgttgactactttccaacagaaaatatccaagtattttaattctagactatttggacacgatatagagagcttcatcaatagacataagaaatttgccaatgttagtgatgaatatctgcaatatatattcatagaggatatttcatctccgtaaatatatgctcatatatttatagaagatatcacatatctaaatgaataccggaattatagatttatttgataatcatgttgatagtataccaactatattacctcatcagttagctactctagattatctagttagaactatcatagatgagaacagaagcgtgttattgttccatattatgggatcaggtaaaacaataatcgctttgttgttcgccttggtagcttccagatttaaaaaggtttacattctagtgccgaacatcaacatcttaaaaattttcaattataatatgggtgtagctatgaacttgtttaatgacgaattcatagctgagaatatctttattcattccacaacaagtttttattctcttaattataacgataacgtcattaattataacggattatctcgctacaataactctatttttatcgttgatgaggcacataatatctttgggaataatactggagaacttatgaccgtgataaaaaataaaaacaagattccttttctactattgtctggatctcccattactaacacacctaatactctgggtcatattatagatttaatgtccgaagagacgatagattttggtgaaattattagtcgtggtaagaaagtaattcagacacttcttaacgaacgcggtgtgaatgtacttaaggatttgcttaaaggaagaatatcatattacgaaatgcctgataaagatctaccaacgataagatatcacggacgtaagtttctagatactagagtagtatattgtcacatgtctaaacttcaagagagagattatatgattactagacgacagctatgttatcatgaaatgtttgataaaaatatgtataacgtgtcaatggcagtattgggacaacttaatctgatgaataatttagatactttatttcaggaacaggataaggaattgtacccaaatctgaaaataaataatggcgtgttatacggagaagaattggtaacgttaaacattagttccaaatttaaatactttattaatcggatacagacactcaacggaaaacattttatatacttttctaattctacatatggcggattggtaattaaatatatcatgctcagtaatggatattctgaatataatggttctcagggaactaatccacatatgataaacggcaaaccaaaaacatttgctatcgttactagtaaaatgaaatcgtctttagaggatctattagatgtgtataattctcctgaaaacgatgatggtagtcaattgatgtttttgttttcatcaaacattatgtccgaatcctatactctaaaagaggtaaggcatatttggtttatgactatcccagatactttttctcaatacaaccaaattcttggacgatctattagaaaattctcttacgccgatatttctgaaccagttaatgtatatcttttagccgccgtatattccgatttcaatgacgaagtgacgtcattaaacgattacacacaggatgaattaattaatgttttaccatttgacatcaaaaagctgttatatctaaaatttaagacgaaagaaacgaatagaatatactctattcttcaagagatgtctgaaacgtattctcttccaccacatccatcaattgtaaaagttttattgggagaattggtcagacaatttttttataataattctcgtattaagtataacgataccaagttacttaaaatggttacatcagttataaaaaataaagaagacgctaggaattacatagatgatattgtaaacggtcacttctttgtatcgaataaagtatttgataaatctcttttatacaaatacgaaaacgatattattacagtaccgtttagactttcctacgaaccatttgtttggggagttaactttcgtaaagaatataacgtggtatcttctccataaaactgatgagatatataaagaaataaatgtcgagctttgttaccaatggataccttccagttacattggagccacacgagctgacgttagacataaaaactaatattaggaatgccgtatataagacgtatctccatagagaaattagtggtaaaatggccaagaaaatagaaattcgtgaagacgtggaattacctctcggcgaaatagttaataattctgtagttataaacgttccgtgtgtaataacctacgcgtattatcacgttggggatatagttagaggaacattaaacatcgaagatgaatcaaatgtaactattcaatgtggagatttaatctgtaaactaagtagagattcgggtactgtatcatttagcgattcaaagtactgcttttttcgaaatggtaatgcgtatgacaatggcagcgaagtcactgccgttctaatggaggctcaacaaggtatcgaatctagttttgtttttctcgcgaatatcgtcgactcataagaaagagaatagcggtaagtataaacacgaatactatggcaataattgcgaatgttttattcccttcgatatatttttgataatatgaaaaacatgtctctctcaaatcggacaaccatctcataaaatagttatctcgcgctggcgaggtggttgccgctcgtataatctccccagaataatatacttgcgtgtcgtcgttcaatttatacggatttctatagttctctgttatataatgcggttttccatcatgattagacgacgacaatagtgttctaaatttagatagttgatcagaatgaatgtttattggcgttggaaaaattatccatgctgcgtctgcagagtggttgatagttgttcctagatatgtaaaataatccaacgtactaggtagcaaattgtctagataaaatactgaatcaaacggcgcagacgtattagcggatctaatggaatccaattgattgactatcttttgaaaatatacatttttatgatccgatacttgtaagaatatagaaataatgataagtccatcatcgtgtttttttgcctcttcataagaactatattttttcttattccaatgaacaagattaatctctccagagtatttgtacacatctatcaagtgattggatccataatcgtcttcctttccccaatatatatgtagtgatgataacacatattcattggggagaaaccctccacttatatatcctcctttaaaattaatccttactagttttccagtgttctggatagtggttggtttcgactcattataatgtatgtctaacggcttcaatcgcgcgttagaaattgcttttttagtttctatattaataggagatagttgttgcggcatagtaaaaatgaaatgataactgtttaaaaatagctcttagtatgggaattacaatggatgaggaagtgatatttgaaactcctagagaattaatatctattaaacgaataaaagatattccaagatcaaaagacacgcatgtgtttgctgcgtgtataacaagtgacggatatccgttaataggagctagaagaacttcattcgcgttccaggcgatattatctcaacaaaattcagattctatctttagagtatccactaaactattacggtttatgtactacaatgaactaagagaaatctttagacggttgagaaaaggttctatcaacaatatcgatcctcactttgaagagttaatattattgggtggtaaactagataaaaaggaatctattaaagattgtttaagaagagaattaaaagaggaaagtgatgaacgtataacagtaaaagaatttggaaatgtaattctaaaacttacaacacgggataaattatttaataaagtatatataggttattgcatggcgtgttttattaatcaatcgttggaggatttatcgcatactagtatttacaatgtagaaattagaaagattaaatcattaaatgattgtattaacgacgataaatacgaatatctgtcttatatttataatatgctagttaatagtaaatgaacttttacagatctagtataattagtcagattattaagtataatagacgactagctaagtctattatttgcaaggatgactctcaaattattacactcacggcattcgttaaccaatgcctatggtgtcataaacgagtatccgtgtccgctattttattaactactgataacaaaatattagtatgtaacagacgagatagttttctctattctgaaataattagaactagaaacatgtttagaaagaaacgattatttctgaattattccaattatttgtccaaacaggaaagaagtatactatcgtcatttttttctctatatccagctactgctgataatgatagaatagacgctatttatccgggtggcatacccaaaaggggtgagaatgttccagagtgtctatccagggaaatcaaagaagaagttaatatagacaattcttttgtattcatagacactcggttttttattcatggtatcatagaagataccattatcaacaaattttttgaggtaattttctttgtcggaagaatatctctaacgagtgatcaaattattgatacctttaaaagtaatcatgaaatcaaggatctaatatttttagatccgaattcaggtaatggactccaatacgaaattgcaaaatatgctctagatactgcaaaacttaaatgttacggccatagaggatgttattatgaatcattaaaaaaattaactgaggatgattgattagaaaatataaattaatttaccatcgtgtatttttataacgggattgtccggcatatcatgtagatagttaccgtctacatcgtatactcgaccatctacgcctttaaatcctctatttattgacattaatctattagaattggaataccaaatattagtaccctcaattagtttattggtaatattttttttagacgatagatcgatggctcttgaaaccaaggttttccaaccggactcattgtcgatcggtgagaagtctttttcattagcatgaatccattctaatgatgtatgtttaaacactctaaacaattggacaaattcttttgatttgctttgaatgatttcaaataggtcttcgtctacagtaggcataccattagataatctagccattataaagtgcacgtttacatatctacgttctggaggagtaagaacgtgactattgagacgaatggctcttcctactatctgacgaagagacgcctcgttccatgtcatatctaaaatgaagatatcattaattgagaaaaaactaataccctcgcctccactagaagagaatacgcatgttttaatgcattctccgttagtgtttgattcttggttaaactcagccaccgccttgattctagtatcttttgttctagatgagaactctatattagagataccaaagactttgaaatatagtaataagatttctattcctgactgattaacaaatggttcaaagactagacatttaccatgggatgctaatattcccaaacatacatctataaatttgacgcttttctcttttaattcagtaaatagagagatatcagccgcactagcatcccctttcaatagttctccctttttaaaggtatttaatgcggatttagaaaactctctatctcttaatgaatttttaaaatcattatatagtgttgctatctcttgcgcgtattcgccgggatcacgattttgtctttcaggaaagctatcgaacgtaaacgtagtagccatacgtctcagaattctaaatgatgatataccagtttttatttctgcgagtttagccttttgataaatctcttcttgcttttttgacatattaacgtatcgcattaatactgttttcttagcgaatgatgcagacccttctacgttatcaaaaatagaaaactcgttattaactatgtacgaacataggcctcctagtttggagactaattctttttcatcgactagacgtttattctcaaatagtgattggtgttgtaaggatcctggtcgtagtaagttaaccaacatggtgaattcttgcacactattgacgataggtgtagccgataaacaaatcatcttatggttttttaatgcgatggtcttggataaaaaattatatactgaacgagtaggacggatcttaccatcttctttgattaatgatttagaaatgaagttatgacattcatcaataatgacgcatattctactcttggaattaatagttttgatattagtaaaaaatttatttctaaaattttgatcatcgtaattaataaaaatacaatccttcgttatctctggagcgtatctgagtatagtgttcatccaaggatcttctatcaaagcctttttcaccaataagataatagcccaattcgtataaatatccttaagatgtttgagaatatatacagtagtcattgttttaccgacacccgtttcatggaacaataaaagagaatgcatactgtctaatcctaagaaaactcttgctacaaaatgttgataatccttgaggcgtactacgtccgaccccatcatttcaacgggcatattagtagttctgcgtaaggcataatcgatataggccgcgtgtgatttactcatttatgagtgataagtaataactatgttttaaaaatcacagcagtagtttaactagtcttctctgatgtttgttttcgatactttttgaatcagaagtcatactagaataaagcaacgagtgaacgtaatagagagcttcgtatactctattcgaaaactctaagaacttattaatgaattccgtatccactggattgtttaaaatactaaattgaacactgttcacatccttccaagaagaagacttagtgacggacttaacatgagacataaataaatccaaattttttttacaaacatcactagccaccataatggcgctatctttcaaccagctatcgcttacgcattttagcagtctaacatttttaaagagactacaatatattctcatagtatcgattacacctctaccgaataaagttggaagtttaataatacaatatttttcgtttacaaaatcaaataatggtcgaaacacgtcgaaggttaacatcttataatcgctaatgtatagattgttttcagtgagatgattattagatttaatagcatctcgttcacgtttgaacagtttattgcgtgcgctgaggtcggcaactacggcgtccgctttagtactcctcccataatactttacgctattaatctttaaaatttcatagactttatctagatcgctttctggtaacatgatatcatgtgtaaaaagttttaacatgtcggtcggcattctatttagatcattaactctagaaatctgaagaaagtaattagctccgtattccagactaggtaatgggcttttacctagagacagattaagttctggcaatgtttcataaaatggaagaaggacatgcgttccctcccggatattttttacaatttcatccatttacaactctatagtttgttttcattattattagttattatctcccataatcttggtaatacttaccccttgatcgtaagataccttatacaggtcattacatacaactaccaattgtttttgtacataatagattggatggttgacatccatggtggaataaactactcgaacagatagtttatctttccccctagatacattggccgtaatagttgtcggcctaaagaatatctttggtgtaaagttaaaagttagggttcttgttccattattgctttttgtcagtagttcattataaattctcgagatgggtccgttctctgaatatagaacatcatttccaaatctaacttctagtctagaaataatatcggtcttattcttaaaatctattcccttgatgaagggatcgttaatgaacaaatccttggcctttgattcggctgatctattatctccgttatagacgttacgttgactagtccaaagacttacaggaatagatgtatcgatgatgttgatactatgtgatatgtgagcaaagattgttctcttagtggcatcactatatgttccagtaatggcggaaaactttttagaaatgttatatataaaagaattttttcgtgttccaaacattagcagattagtatgaagataaacactcatattatcaggaacattatcaatttttacatacacatcagcatcttgaatagaaacgataccatcttctggaacctcaacaatctcggcagactccggataaccagtcggtggaccatcgctaacaataactagatcatccaacaatctactcacatatgcatctatataatctttttcatcttgtgagtaccctggatacgaaataaatttattatccgtatttccataataaggtttagtataaacagagagcgatgttgccgcatgaacttcagttacagtcgccgttggttggtttatttgacctattactctcctaggtttctctataaacgatggtttaatttgtacattcttaaccatatatccaataaagctcaattcaggaacataaacaaattctttgttgaacgtttcaaagtcgaacgaagagtcacgaataacgatatcggatactggattgaaggttaccgttacggtaatttttgaatcggatagtttaagactgctgaatgtatcttccacatcaaacggagttttaatataaacgtatactgtagatggttctttaatagtgtcattaggagttaggccaatagaaatatcattaagttcactagaatatccagagtgtttcaaagcaattgtattattgatacaattattatataattcttcgccctcaatttcccaaataacaccgttacacgaagagatagatacgtgattaatacatttatatccaacatatggtacgtaaccgaatcttcccatacctttaacttctggaagttccaaactcagaaccaaatgattaagcgcagtaatatactgatccctaatttcgaagctagcgatagcctgattgtctggaccatcgtttgtcataactccggatagagaaatatattgcggcatatataaagttggaatttgactatcgactgcgaagacattagaccgtttaatagagtcatccccaccgatcaaagaattaatgatagtattattcattttctatttaaaatggaaaaagcttacaataaactccgtagagaaatatctataatttgtgagttttccttaaagtaacagcttccgtaaacgccgtctttatctcttagtaagtttattgtatttataaccttttccttatcttcatagaatactaaaggcaacaaagaaatttttggttcttctctaagagctacgtgagacttaaccatagaagccaacgaatccctacatattttagaacagaaataccctacttcaccacccttgtatgtctcaatactaataggtctaaaaaccaaatcttgattacaaaaccaacacttatcaattacactatttgtcttaatagacacatctgccatagatttataatactttggtagtatacaagcgagtgcttcttctttagcgggcttaaagactgctttaggtgctgaaataaccacatctggaaggcttactcgcttagccatttaattacggaactatttttttatacttctaatgagcaagtagaaaacctctcatctacaaaaacatactcgtgtccataatcctctaccatagttacacgttttttagatctcatatgtgctaaaaagttttcccatactaattggttactattatttttcgtataatttttaacagtttgaggttttagatttttagttacagaagtgatatcgaatattttatccaaaaagaatgaataattaattgtcttagaaggagtgttttcttggcaaaagaataccaagtgcttaaatatttctactacttcattaatcttttctgtactcagattcagtttctcatcttttacttgattgattatttcaaagactaacttataatcctttttatttattctctcgttagccttaagaaaactagatacaaaatttgcatctacatcatccgtggatatttgatttttttccatgatatccaagagttccgagataatttctccagaacattgatgagacaataatctccgcaatacatttctcaaatgaataagtttattagacacgtggaagtttgactttttttgtacctttgtacatttttgaaataccgactcgcaaaaaatacaatattcatatccttgttcagatactataccgttgtgtctacaaccgctacataatcgtagattcatgttaacactctacgtatctcgtcgtccaatattttatataaaaacattttatttctagacgttgccagaaaatcctgtaatacttttagttttttgggctgtgaataaagtatcgccctaatatggttaccgtcctccgccaatatagtagttaaattatccgcacatgcaaaagaacaccgcttaggcggattcagtacaatgttatatttttcgtaccaactcatttaaatatcataatctaaaatagttctgtaatatgtctagcgctaatatattgatcataatcctgtgcataaattaagatacaacaatgtctcgaaatcatcgacatggcttcttccatagttagaagatcgtcgtcaaagttagcaacgtgattcatcaacatttgctgttttgaggcagcaaatactgaaccgtcgccattcaaccattcataaaaaccatcgtctgaatccattgataatttcttgtactggtttttgagagctcgcatcaatctagcatttctagctcccggattgaaaacagaaagaggatcgtacatccagggtccattttctgtaaatagaatcgtataatgtcccttcaagaagatatcagacgatccacaatcaaagaattggtctccgagtttgtaacaaactgcggactttaacctatacatgataccgtttagcataatttctggtgatacgtcaatcggagtatcatctattagagatctaaagccggtgtaacattctccaccaaacatattcttattctgacgtcgttctacataaaacatcattgctccattaacgataacaggggaatgaacagcactacccatcacattagttcccaatggatcaatgtgtgtaactccagaacatcttccatagcctatgttaggaggagcgaacaccactcttccactattgccatcgaatgccatagaataaatatccttggaattgatagaaatcggactgtcggatgttgtgatcatcttcataggattaacaacgatgtatggtgccgcctgaagtttcatatcgtaactgatgccgttcataggtctagccacagaaaccaacgtaggtctaaatccaactatagacaaaatagaagccaatatctgttcctcatctgtcataacttgagagcatccagtatgaataatcttcattagatggggatctaccgcatcatcatcgttacaataaaaaattcccattctaatgttcataattgcttttctaatcatggtatgcatgtttgctctctgaatctctgtggaaattagatctgatacacctgtaatcactatcggattatcctccgtaagacgattaaccaacaacatataattataagactttacttttctaaattcataaagttgctggattaggctataggtgtctccatgtacatacgcgttctcgagcgcaggaagtttaataccgaatagtgccatcagaataggatgaatatagtaattagtttctggttttctataaataaaagacaaatcttgtgaactagacatatcggtaaaatgcatggattggaatcgtgtagtcgacagaagaatatgatgattagatggagagtatattttatctaactctttgagttggtcaccgattctaggactagctcgagaatgaataagtactaaaggatgagtacatttcacagaaacactagcattgttcaatgtgctctttacatgggtaaggagttgaaatagctcgtttctatttgttctgacaatatttagtttattcataatgttaagcatatcctgaatagtaaagttagatgtgtcatacttgttagtagttagatatttagcaattgcattcccatcatttctcaatctcgtactccaatcatgcgtggatgctacttcgtcgatggaaaccatacaatcctttttgataggctgttgagattgattatttcctgcacgtttaggtttggtacgttgatttctagcccctgcggatataaagtcatcgtctacaatttgggacaatgaattgcatacactacaagacaaagatttatcagaagtgtgaatatgatcttcatctaccaaagaaagagtttgattagtataactagattttagtcctgcgttagatgttaaaaaaacatcgctattgaccacggcttccattatttatattcgtagtttttactcgaaagcgtgattttaatatccaatcttattacttttggaatcgttcaaaacctttgactagttgtagaatttgatctattgccctacgcgtatactcccttgcatcatatacgttcgtcaccagatcgtttgtttcggcctgaagttggtgcatatctttttcaacactcgacatgagatccttaagggccatatcgtctagattttgttgagatgctgctcctggatttggattttgttgtgctgttgtacatactgtaccaccagtaggtgtaggagtacatacagtggccacaataggaggttgaggaggtgtaaccgttggagtagtacaagaaatatttccatccgattgttgtgtacatgtagttgttggtaacgtctgagaaggttgggtagatggcggtgtcgtcgtcttttgatctttattaaatttagagataatatcctgaacagcattgctcggcgtcaacgctggaaggagtgaactcgccggcgcatcagtatctgcagacagccaatcaaaaagattagacatatcagatgatgtattagtttgttgtcgtggttttggtgtaggagcagtactactaggtagaagaataggagccgatgtaggtgtcggaaccggctgtggagttatatgaatagttggttgtagcggttggataggctgtctgctggcggccatcatattatctctagctagttgttctcgcaactgtctttgataatacgactcttgagactttagtcctatttcaatcgcttcatcctttttcgtatccggatccttttcttcagaataatagattgacgactttggtgtagaggattctgccagcccctgtgagaacttgttaaagaagtccatttaaggctttaaaattgaattgcgattataagattaaatggcagacacagacgatattatcgactatgaatccgatgatctcactgaatacgaggatgatgaagaagaggaagaagatggagagtcactagaaactagtgatatagatcccaaatcttcttataagattgtagaatcagcatccactcatatagaagatgcgcattccaatcttaaacatatagggaatcatatatctgctcttaaacgacgctatactagacgtataagtctatttgaaatagcgggtataatagcagaaagctataacttgcttcaacgaggaagattacctctagtttcagaattttctgacgaaacgatgaagcaaaatatgctacatgtaattatacaagagatagaggagggttcttgtcctatagtcatcgaaaagaacggagaattgttgtcggtaaacgattttgacaaagatggtctaaaattccatctagactatattatcaaaatttggaaacttcaaaaacgatattagaatttatacgaatatcgttctctaaatgtcacaatcaagtctcgcatgttcagcaatttattgtcgtactttatatcgtgttcattaacgatatcttgcaaaatagtaatgattctatcttccttcgatagatattcttcagagattattgtcttatattctttcttgttatcagatatgaatttgataagactttgaacattattgatacccgtctgtttaattttttctacagatattttagttttggcagattctatcgtatctgtcaatagacatccaacatcgacattcgacgtcaattgtctataaatcaacgtataaattttagaaataacattagcgaattgttgtgcattgatgtcgttattctgaaacagtatgattttaggtagcattttcttaacaaagagaacgtatttattgttactcagttgaacagatgatatatccagattactaacgcatctgattccgtataccaaactttcagaagaaatggtatacaattgtttgtattcattcaatgtctctttttcagaaattagtttagagtcgaatactgcaataattttcaagagatagttttcatcagataagattttatttagtgtagatatgataaaactattgttttgttggagaacttgatacgccgcgttctctgtagtcgacgctctcaaatgggaaacgatctccattatttttttggaatcggatactatatcttcggtatcttgacgcagtctagtatacatagagttaagagagattagagtttgtacattaagcaacatgtctctaaatgtggctacaaacttttccttttccacatcatctagtttattatataccgatttcacaacggcaccagatttaaggaaccagaatgaaaaactctgataactacaatatttcatcatagttacgattttatcatcttctatagttggtgtaatagcgcatacctttttctccaagactggaaccaacgtcataaaaatgtttaaatcaaaatccatatcaacatctgatgcgctaagaccagtctcgcgttcaagattatctttactaatggtgacgaactcatcgtatagaactctaagtttgtccattatttatttacagatttagttgtttaatttatttgtgctcttccagagttgggatagtatttttctaacgtcggtattatattattaggatctacgttcatatgtatcataatattaatcatccacgttttgataaatctatctttagcttctgaaataacgtatttaaacaaaggagaaaaatatttagctacggcatcagacgcaataacattttttgtaaatgtaacgtatttagacgacagatcttcgttaaaaagttttccatctatgtagaatccatcagttgttaacaccattcccgcgtcagattgaataggagtttgaatagtttgttttggaaatagatccttcaataacttatagttgggtgggaaaaaatcgattttatcactagactctttcttttttactatcattacctcatgaactatttcttgaatgagtatatgtattttctttcctatatcggacgcgttcattggaaaatataccatgtcgttaactataagaatatttttatcctcgtttacaaactgaataatatcagatgtagttcgtaaacgaactatatcatcaccagcacaacatctaactatatgatatccactagtttcctttagtcgtttattatcttgttccatattagcagtcattccatcatttaagaaggcgtcaaagataatagggagaaatgacattttggattctgttacaactttaccaaaattaaggatatacggacttactatctttttctcaacgtcaatttgatgaacacacgatgaaaatgtacttcgatgagattgatcatgtagaaaacaacaagggatacaatatttccgcatatcatgaaatatattaagaaatcccaccttattatatttccccaaaggatccatgcacgtaaacattatgccgttatcattaataaagacttctttctcatcggatctgtaaaagttgttactgatttttttcattccaggatctagataattaataatgatgggttttctattcttattctttgtattttggcatatcctagaccagtaaacagtttccactttggtaaaatcagcagacttttgaacgctattaaacatggcattaatggcaataactaaaaatgtaaaatatttttctatgttaggaatatggtttttcactttaatagatatatggtttttggccaaaatgatagatatttttttatccgaggatagtaaaatattattagtcgccgtctctataaaaatgaagctagtctcgatatccaattttattctagaattgataggagtcgccaaatgtaccttatacgttatatctcccttgatgcgttccatttgtgtatctatatcggacacaagatctgtaaatagttttacgttattaatcatcacggtatcgccgtcgctagataatgctaatgtaccatccaagtcccaaatggagagatttaactgttcatcgtttagaataaaatgattaccggtcatattaataaagtgttcatcgtatctagataacaacgacttataattaatgtccaagtcttgaactcgctgaatgatcttttttaacccagttagttttagattggtacgaaatatattgttaaactttgattctacagtaatgtccaaatctagttgtggaaatacttccatcaacattgtttcaaacttgataatattattatctacatcttcatacgatccaaattccggaatagatgtatcacatgctcttgccacccagataaccaaaaagtcacacgctccaggatatacattgtataaaaagctatcgtttttaagtagggtttttttctgcgtgtatacgaagggattaaaaatagtattatcaacgtaactatattccaaattattcttatgagaatagataataatatcgtccttaatatctaacaaatttcctaaatatccctttaattgagtcattcgaagcgtcaatagaatatgtctcttaactatttccggctgttgtatatttaaatgacttcgtaaaaaataatatatgggcgacttctcatctatgtaatcatatggagtgagatatagggctcgttctacctcctgccccttacccacctgtaataccaattgcggacttactatatatcgcatatttatatcgtggggtaaagtgaaaatctactaccgatgatgtaagtcttacaatgttcgaaccagtaccagatcttaatttggaggcctccgtagaactaggggaggtaaatatagatcaaacaacacctatgataaaggaaaatagcggttttatatcccgtagtagacgtctattcgcccatagatctaaggatgatgagagaaaactagcactacgattctttttacaaagactttattttttagatcatagagagattcattatttgttcagatgcgttgacgctgtaaaagacgtcactattaccaaaaaaaataacattatcgtggcgccttatatagcacttttaactatcgcatcaaaaggatgcaaacttacagaaacaatgattgaagcattctttccagaactatataatgaacatagtaagaaatttaaattcaactctcaagtatccatcatccaagaaaaactcggataccagtttggaaactatcacgtttatgattttgaaccgtattactctacagtagctctggctattcgagatgaacattcatctggcatttttaatatccgtcaagagagttatctggtaagttcattatctgaaataacatatagattttatctaattaatctaaaatctgatcttgttcaatggagtgctagtacgggcgctgtaattaatcaaatggtaaatactgtattgattacagtgtatgaaaagttacaactggtcatagaaaatgattcacaatttacatgttcattggctgtggaatcagaacttccaataaaattacttaaagatagaaatgaattatttacaaaattcatcaacgagttaaaaaagaccagttcattcaagataagcaaacgcgataaggatacgctactaaaatattttacttaggactggagttagaatttatagacgactcatttcgtttatcattattactaccatcattattagtattcttcttgttatcttgttcagaaatatacagcaatgctatgcctaatactaaatacattatcatgcttgcaatggctctaacaacgacgaaccaaaatgaatttggtcgtagcttttgttcacaaaaatacataaagaaatgtctacataaatctatggcgccattggctacttgaaatagcgccagtcctcctacagattttaatatagctgtataacatgacatttattcatcatcaaaagagacagagtcaccatctgtcatatttagattttttttcatgtgttcaaagtatcctctactcatttcattataatagtttatcatacttagaattttaggacggatcaatgagtaagacttgactagatcgtcagtagtaatttgtgcatcgtctattctgcatccgcttcgtcgaataatgtatagcatcgctttgagattctccatagctatcaagtctttatacaatgacatggaaatatctgtgaatactttatacttctccaacatcgatgccttaacatcatcgcctactttagcattgaaaatacgttctattgtgtagatggatgtagcaagatttttaaacaacaatgccatcttacacgatgattgcctcaagtctccaatcgtttgtttagaacgattagctacagagttcaacgcttggctgactagcatattattatctttagaaattgtattcttcaatgaagcgtttatcatatctgtgatttcgttagtcatattacagtctgactgggttgtaatgttatccaacatatcacctatggatacggtacacgtaccagcatttgtaataatcctatctaagatgttgtatggcattgcgcagaaaatatcttctcctgtaatatctccactctcgataaatctactcagattattcttaaatgccttattctctggagaaaagatatcagtgtccatcatttcattaatagtatacgcagaaaagataccacgagtatcaattctatccaagatacttatcggttccgagtcacagataatggtttcctctccttcgggagatcctgcatagaaatatctaggacaatagtttctatactgtctgtaactctgataatctctaaagtcactaactgataccatgaaattgagaagatcaaacgctgaagtaatcaatttttctgcctcgtttttactacaactagttttcatcaatgtagtgacgatgtattgtttagttactcttggtctaatactgatgatagagatattattacttcccataatggatcttctagtagtcaccttaaagcccattgatgcaaatagcagatagataaagtcttggtatgactcctttctaatatagtacggactacctttgtcacccaactttatacccacataagccataacaacctctttaatagccgtttcatgaggtttatcagccatgagcctgagtagttggaagaatctcatgaatcccgtctcagaaagtcctatatgcatgatagatttatctttcctgggaaactctcgtatagtcatagatgaaatactcttcaaagtttctgaaataagattagtaacagtcttacctccgactactctgggtaacaaacatactctaataggtgttttctctgcggagataatatcagaaaggatagagcaataagtagtattattgtgattataaagaccgaatacataacaggtagaatttataaacatcatgtcctgaaggtttttagacttgtattcctcgtaatccataccgtcccaaaacatggatttggtaactttgatagccgtagatctttgttccttcgccaacaggttaaagaaattaataaagaatttgttgtttctatttatgtccacaaattgcacgtttggaagcgtaactgttacgttcactgcagcattttgaggatcgcgagtatgaagtacgatgttattgtttactggtatatctggaaagaaatctaccagtctaggaataagagattgatatcgcatagaaatagtaaagtttataatctcatcatcgaagagcattttgttaccattgtaataaatatccactctgtcatatgtataaatgaagtactgttcaaacatgatgagatgtttatatgttggcatagtagtgagatcgacgtttggtaatggcaatgtattaagattaactccataatgtctagcagcatctgcgatgttataagtgtcgtcaaagcggggtcgatcttgtgctgttatatattgtctaacacctataagattatcaaaatcttgtctgcttaatacaccgttaacaatttttgccttgaattcttttattggtgcattaataacatccttatagaggatgttaaacaaataagtgttatcaaagttaagatctggatatttcttttctgctagaacatccattgagtcggagccatctggtttaatataaccaccgataaatctagctctgtattctgtatccgtcaatctaatattaagaaggtgttgagtgaaaggtggaagatcgtaaaagctgtgagtattaatgataggattagtttccgaactaatgttaattggggtattaataatatctatatttccagcgttaagtgtaacattaaacagttttaattcacgtgacgtggtatcaattaaataattaatgcccaatttggatatagcagcctgaagctcatcttgtttagttacggatcctaatgagttattaagcaatatatcgaacggatgaacgaaggttgttttaagttggtcacatactttgtaatctagacatagatgcggaagaacggtagaaactatacgaaataaatattcagagtcctctaattgatcaagagtaactattgacttaataggcatcatttatttagtattaaatgacgaccgtaccagtgacggatatacaaaacgatttaattacagagttttcagaagataattatccatctaacaaaaattatgaaataactcttcgtcaaatgtctattctaactcacgttaacaacgtggtagatagagaacataatgccgccgtagtgtcatctccagaggaaatatcctcacaacttaatgaagatctatttccagatgatgattcaccggccactattatcgaacgagtacaacctcatactactattattgacgatactccacctcctacttttcgtagagagttattaatatcggaacaacgtcaacaacgagaaaaaagatttaatattacagtatcgaaaaatgctgaagcaataatggaatctagatctatgataacttctatgccaacacaaacaccatccttgggagtagtttatgataaagataaaagaattcagatgttagaggatgaagtggttaatcttagaaatcaacgatctaatacaaaatcatctgataatttagataattttaccaaaatactatttggtaagactccgtataaatcaacagaagttaataagcgtatagccatcgttaattatgcaaatttgaacgggtcccccttatcagttgaggacttggatgtttgttcggaggatgaaatagatagaatctataaaacgattaaacaatatcacgaaagtagaaaacgaaaaattatcgtcactaacgtgattattattgtcataaacattatcgagcaggcattgctaaaactcggatttgaagaaatcaaaggactgagtaccgatatcacttcagaaattatcgatgtggagatcggagatgactgcgatgctgtagcatctaaactaggaatcggtaacagtccggttcttaatattgtattgtttatactcaagatattcgttaaacgaattaaaattatttaatttaatacattcccatatccagacaacaatcgtctggattaatctgttcctgtcgtctcataccggacgacatattaatctttttattagtaggcatctttttagatggtttctttttcccagcattaactgagtcgatacctagaagatcgtgattgatctctccgaccattccacgaacttctaattggccgtctctgacggtaccataaactattttaccagcattagtaacagcttggacaatctgaccatccattgcgttgaatgatgtagttgctgttgttctacgtttaggagcaccagaagtatttttggagcccttggaggctgatgtagaagaagacgaggattttgatttacatgtaatacattttgtactctttgattttgtatcacatgcgccggcagtcacatttgtttgagaattaagattattgttgcctcctttgacggctgcatctccaccgatttgcgctagtagatttttaagctgtggtgtaatcttattaactgtttcgatataatcatcgtaactgcttctaacggctaaattttttttatccgccatttagaagctaaaaatatttttatttatgcagaagatttaactagattatacaatgaactaatatgatccttttccagattatttacaaacttggtattttttggttctggaggaggcgaatttaaattcggacttggattcggattttgtgagttcttgatcttattatacatcgagtataggatggcgacggtaactgctacgcaaataccgatcaacaaaagaataccaatcatttattgacaataacttcactattgatcaagtatgcaatatatcatcttttcactaaataagtagtaataatgattcaacaatgtcgagatatatggacgataataatttagttcatggaaatatcgctatgattggtatgaatgactccgctaactctgtggggtgcgcagtgctttccccacatagaataaattagcattccgactgtgataataataccaagtataaacgccataatactcaatactttccatgtacgagtgggactggtagacttactaaagtcaataaaggcgaagatacacgaaagaatcaaaagaatgattccagcgattagcacgccggaaaaataatttccaatcataagcatcatgtccatttaactaataaaaattttaaatcgccgaatgaacaaagtggaatataaaccatataaaaacaatagtttgtactgcaaaaataatatctatttttgttttcgaagatatggtaaaattaaatagtagtacacagcatgttataactaacagcagcaacggctcgtaattacttatcatttactagacgaaaaggtggtgggatattttcttgctcaaataatacgaatatatcacccatccattttatgcgatgtttatatactctaatctttaatagatctatagacgacgggtttaccaacaatatagattttatcgattcatctaatttaaacccttccttaaacgtgaatgatctattatctggcataacgatgactctacctgatgaatcggacaatgtactgggccatgtagaataaattatcaacgaattatcgtctacgaacatttatatcatttgttttaattttaggacgcgaataaatggatataaaatagaaaataacagatattacaaccaatgttatggccgcgcccaaccaggtaggcagttttattttatcttttactacaggttctcctggatgtacgtcaccaacggcggacgtagttctagtacaattagacgtaagttctgcttgggaattttttaacgctaaagagttaacgttaatcgtgcacccaacgtatttacatctagttctttgaacatcttgattataatataaccattttctatctctagattcgtcggtgcactcatgtaaccaacataccctaggtcctaaatatttatctccggaattagattttggataattcgcgcaccaacaatttctatttcctttatgatcgttacaaaagacgtataatgccgtatccccaaaagtaaaataatcaggacgaataattctaataaactcagaacaatatctcgcatccatatgtttggagcaaatatcggaataagtagacatagccggtttccgttttgcacgtaaccattctaaacaattggggtttccaggatcgtttctacaaaatccagtcatgaaatcatcacaatgttctgtcttgtaattattattaaatatttttggacagtgtttggtatttgtcttagaacaacattttgccacgctatcactatcgcccaggagataatccttttttataaaatgacatcgttgcccggatgctatataatcagtggcgtgttttaaatccttaatatattcaggagttacctcgttctgataatagattaatgatccaggacgaaatttgaaagaactacatggttctccatgaattaatacatattgtttagcaaattcaggaactataaaactactacaatgatctatcgacataccatctatcaaacaaaacttgggtttaatttctcccggagatgtttcataatagtacgtataactttcttctgcaaacttaacagctctattatattcaggataattaaaacctaattccatatatttgtctcgtatatctgctattcctggtgctattttaattctattaagagtaacggctgcccccattcttaataatcgtcagtatttaaactgttaaatgttggtatatcaacatctaccttatttcccgcagtataaggtttgttgcaggtatactgttcaggaatggttacatttatacttcttctatagtcctgtctttcgatgttcatcacatatgcaaagaacagaataaacaaaataatgtaagaaataatattaaatatctgtgaattcgtaaatacattgattgccataataattacagcagctacaatacatacaatagacattcccacagtgttgccattacctccacgatacatttgagttactaagcaataggtaataactaagctagtaagaggcaatagaaaagatgagataaatatcatcaatatagagattagaggagggctatatagagccaagacgaacaaaatcaaaccgagtaacgttctaacatcattatttttgaagattcccaaataatcattcattcctccataatcgttttgcattatacctccatctttaggcataaacgattgctgctgttcctctgtaaataaatctttatcaagcactccagcacccgcagagaagtcgtcaagcatattgtaatatcttaaataactcatttatatattaaaaaatgtcactattaaagatggagtataatctttatgccgaactaaaaaaaatgacttgtggtcaacccctaagtctttttaacgaagacggggatttcgtagaagttgaaccgggatcatcctttaagtttctgatacctaagggattttacgcctctccttccgtaaagacgagtctagtattcgagacattaacaacgaccgataataaaatcactagtatcaatccaacaaatgcgccaaagttatatcctcttcaacgcaaagtcgtatctgaagtagtttctaatatgaggaaaatgatcgaatcaaaacgtcctctatacattactcttcacttggcgtgtggatttggtaagactattaccacgtgttatcttatggctacacacggtagaaaaaccgtcatttgcgtacccaataaaatgttaatacatcaatggaagacacaggtagaggcagtcggattggaacataagatatctatagatggagtaagtagtctattaaaggaactaaagactcaaagtccggatgtattaatagtagtcagtagacatctgacaaacgatgccttttgtaaatatatcaataagcattatgatttgttcatcttggatgaatcacatacgtataatctgatgaacaatacagcagttacaagatttttagcgtattatcctccgatgatgtgttattttttaactgctacacctagaccagctaaccgaatttattgtaacagtattattaatattgccaagttatccgatctaaaaaaaactatctatgcggtagatagtttttttgagccatattccacagacaatattagacatatggtaaaacgactagatggaccatctaataaatatcatatatatactgagaagttattatctgtagacgagcctagaaatcaacttattcttgataccctggtagaagaattcaagtcaggaactattaatcgaattttagttattactaaactacgtgaacatatggtattcttctacaaacgattattagattttttcggatcagaggttgtatttataggagacgcccaaaatagacgtactccagatatggtcaaatcaatcaaggaactaaatagatttatattcgtatccaccttattttattccggtactggtttagatattcctagtttggattcgttgttcatttgctcggcagtaatcaacaatatgcaaatagagcaattactagggagggtatgtcgagaaacagaactattagataggacggtatatgtatttcctaacacatccatcaaagaaataaagtacatgataggaaatttcatgcaacgaattattagtctgtctgtagataaactaggatttaaacaaaaaagttatcggaaacatcaagaatccgatcccacttctgtatgtacaacatcctccagagaagaacgtgtattaaatagaatatttaactcgcaaaatcgttaagaagtttaagcgacgatccgcatgctgcgcaggccagtgtattacccctcatagtattaatataatccaatgatacttttgtgatgtcggaaatcttaaccaatttagactgacaggcagaacacgtcatgcaatcatcatcgtcatcgataactgtagtcttgggcttctttttgcggctcttcattccggaacgcacattggtgctatccatttaggtagtaaaaaataagtcagaatatgccctatagcacgatcgtgcaaaacctggtatatcgtctctatctttatcacaatatagtgtatcgacatttttattattattgacctcgtttatcttggaacatggaatgggaacatttttgttatcaacggccatctttgccttaattccagatgttgtaaaattataactaaacagtctatcatcgacacaaatgaaattcttgtttagacgtttgtagtttacgtatgcggctcgttcgcgtctcattttttcagatattgcaggtactataatattaaaaataagaatgaaataacataggattaaaaataaagttatcatgacttctagcgctgatttaactaacttaaaagaattacttagtctgtacaaaagtttgaaattttcagattctgcggctatagaaaagtataattctttggtagaatggggaacatctacttactggaaaataggcgtgcaaaaggtagctaatgtcgagacgtcaatatctgattattatgatgaggtaaaaaataaaccgtttaatattgatccgggatattacattttcttaccggtatattttggaagcgtctttatttattcgaagggtaaaaatatggtagaacttggatctggaaactcttttcaaataccagatgatatgcgaagtgcgtgtaacaaagtattagacagcgataacggaatagactttctgagatttgttttgttaaacaatagatggataatggaagatgctatatcaaaatatcagtctccagttaatatatttaaactagctagtgagtacggattaaacatacccaaatatttagaaattgaaatagaggaagacacattatttgacgacgagttatactctattatagaacgctctttcgatgataaatttccaaaaatatccatatcgtatattaagttgggagaacttagacggcaagttgtagactttttcaaattctcgttcatgtatattgagtccatcaaggtagatcgtataggagataatatttttattcctagcgttataacaaaatcaggaaaaaagatattagtaaaagatgtagaccatttaatacgatccaaggttagagaacatacatttgtaaaagtaaaaaagaaaaacacattttccattttatacgactatgatggaaacggaacagaaactagaggagaagtaataaaacgaattatagacactataggacgagactattatgttaacggaaagtatttctctaaggttggtagtgcaggcttaaagcaattgactaataaattagatattaatgagtgcgcaactgtcgatgagttagttgatgagattaataaatccggaactgtaaaacgaaaaataaaaaaccaatcagcatttgatttaagcagagaatgtttgggatatccagaagcggattttataacgttagttaataacatgcggttcaaaatagaaaattgtaaggttgtaaatttcaatattgaaaatactaattgtttaaataacccgagtattgaaactatatatggaaactttaaccagttcgtctcaatctttaatatcgtcaccgatgtcaaaaaaagattattcgagtgaaataatatgcgcctttgatataggtgcaaaaaatcctgccagaactgttttagaagtcaaggataactccgttagggtattggatatatcaaaattagactggagttctgattgggaaaggcgcatagctaaagatttgtcacaatatgaatacactacagttcttctagaacgtcagcctagaaggtcgccgtacgtcaaatttatctattttattaaaggctttttatatcatacatcggctgccaaagttatttgcgtctcgcctgtcatgtctggtaattcatatagagatcgaaaaaagagatcggtcgaagcatttcttgattggatggacacattcggattgcgagactccgttccggatagacgcaaattagacgatgtagcggatagtttcaatttggctatgagatacgtattagataaatggaatactaattatacaccttataataggtgtaaatctagaaattacataaaaaaaatgtaataacgttagtaacgccattatggataatctatttacctttctacatgaaatagaagatagatatgccagaactatttttaactttcatctaataagttgcgatgaaataggagatatatatggtcttatgaaagaacgcatttcctcagaggatatgtttgataatatagtgtataataaagatatacatcatgccattaagaaactagtgtattgcgacatccaacttactaaacacattattaatcagaatacgtatccggtatttaacgattcttcacaagtgaaatgttgtcattatttcgacataaactcagataatagcaatattagctctcgtacagtagagatatttgagagggaaaagtcatctcttgtatcatatattaaaactaccaataagaagagaaaggtcaattacggcgaaataaagaaaactgttcatggaggcactaatgcaaattacttttccggtaaaaagtctgacgagtatctgagtactacagttagatccaacattaatcaaccttggatcaaaaccatctctaagaggatgagagttgatatcattaatcactctatagtaacgcgtggaaaaagctctatattacaaactatagaaattatttttactaatagaacatgtgtgaaaatattcaaggattctactatgcacattattctatccaaggacaaggatgaaaaggggtgtatacacatgattgacaaattattctatgtctattataatttatttctgttgttcgaggatatcatccaaaacgagtactttaaagaagtagctaatgttgtaaaccacgtacttacggctacggcattagatgagaaattattcctaattaagaaaatggctgaacacgatgtttatggagttagcaatttcaaaatagggatgtttaacctgacatttattaagtcgttggatcataccgttttcccctctctgttagatgaggatagcaaaataaagttttttaaggggaaaaagctcaatattgtagcattacgatctctggaggattgtataaattacgtgactaaatccgagaatatgatagaaatgatgaaggaaagatcgactattttaaatagcatagatatagaaacggaatcggtagatcgtctaaaagaattgcttctaaaatgaaaaaaaacactgattcagaaatggatcaacgactcggatataagtttttggtgcctgatcctaaagccggagttttttatagaccgttacatttccaatatgtatcgtattctaattttatattgcatcgattgcatgaaatcttgaccgtcaagcggccactcttatcgtttaagaataatacagaacgaattatgatagaaattagcaatgttaaagtgactcctccagattactcacctataatcgcgagtattaaaggtaagagttatgacgcattagccacgttcactgtaaatatctttaaagaggtaatgaccaaagagggtatatccatcactaaaataagtagttatgagggaaaagattctcatttgataaaaattccgctactaataggatacgggaataaaaatccacttgatacagccaagtatcttgttcctaatgtcataggtggagtctttatcaataaacaatctgtcgaaaaagtaggaattaatctagtagaaaagattacaacatggccaaaatttagggttgttaagccaaactcattcactttctcgttttcctccgtatcccctcctaatgtattaccgacaagatatcgccattacaagatatctctggatatatcacaattggaagcgtcgaatatatcatcgacaaagacatttataacggtcaatattgttttgctgtctcaatatttatctagagtgagtctagaattcattagacgtagcttatcatacgatatgcctccagaagttgtctatctagtaaacgcgataatagatagtgctaaacgaattactgaatctattactgactttaatattgatacatacattaatgacctggtggaagctgaacacattaaacaaaaatctcagttaacgatcaacgagttcaaatatgaaatgctgcataactttttacctcatatgaactatacacccgatcaactaaagggattttatatgatatctttactaagaaagtttctctactgtatctaccacacttctagatatccagatagagattcgatggtttgtcatcgtatactaacatacggcaaatattttgagacgttggcacatgatgaattagagaattacataggcaacatccgaaacgatatcatgaacaatcacaagaacagaggcacttacgcggtaaacattcatgtactaacaactcctggacttaatcatgcattttctagtctattgagtggaaagttcaaaaagtcagacggtagttatcgaacacatcctcactattcatggatgcagaatatttctattcctaggagtgttggattttatccggatcaagtaaagatttcaaagatgttttctgtcagaaaataccatccaagtcaatatctttacttttgttcatcagacgttccggaaagaggtcctcaggtaggtttagtatctcaattgtctgtcttgagttccattacaaatatactaacgtctgagtatttggatttggaaaagaaaatttgtgagtatatcagatcatattataaagatgatataagttactttgaaacaggatttccaatcactatagaaaatgctctagtcgcatctcttaatccaaatatgatatgtgattttgtaactgactttagacgtagaaaacggatgggattcttcggtaacttggaggtaggtattactttagttagggatcacatgaatgaaattcgcattaatattggagcgggaagattagtcagaccattcttggttgtggataacggagagctcatgatggatgtgtgtccggagttagaaagcagattagacgacatgacattctctgacattcagaaagagtttccgcatgtcatcgaaatggtagatatagaacaatttacttttagtaacgtatgtgaatcggttcaaaaatttagaatgatgtcaaaggatgaaagaaagcaatacgatttatgtgactttcctgccgaatttagagatggatatgtggcatcttcattagtgggaatcaatcacaattctggacccagagctattcttggatgtgctcaagctaaacaagctatctcttgtctgagctcggatatacgaaataaaatagacaatggaattcatttgatgtatccagagaggccaatcgtgattagtaaggctttagaaacttcaaagattgcggctaattgcttcggccaacatgttactatagcattaatgtcgtacaaaggtatcaatcaagaggatggaattatcatcaaaaaacaatttattcagagaggcggtctcgatattgttacagccaagaaacatcaagtagaaattccattggaaaactttaataacaaagaaagagataggtctaacgcctattcaaaattagaaagtaatggattagttagactgaatgctttcttggaatccggagacgctatggcacgaaatatctcatcaagaactcttgaagatgattttgctagagataatcagattagcttcgatgtttccgagaaatataccgatatgtacaaatctcgcgttgaacgagtacaagtagaacttactgacaaagttaaggtacgagtattaaccatgaaagaaagaagacccattctaggagacaaatttaccactagaacgagtcaaaagggaacagtcgcgtatgtcgcggatgaaacggaacttccatacgacgaaaatggtatcacaccagatgtcattattaattctacatccatcttctctagaaaaactatatctatgttgatagaggttattttaacagccgcatattctgctaagccgtacaacaataagggagaaaaccgacctgtctgttttcctagtagtaacgaaacatccatcgatacatatatgcaattcgctaaacaatgttatgagcattcaaatccgaaattgtctgatgaagaattatcggataaaatcttttgtgaaaagattctctatgatcctgaaacggataagccttatgcatccaaagtattttttggaccaatttattacttgcgtctgagacatttaactcaggacaaggcaaccgttagatgtagaggtaaaaagacgaagctcattagacaggcgaatgagggacgaaaacgtggaggaggtatcaagttcggagaaatggagagagactgtttaatagcgcatggtgcagccaatactattacagaagttttgaaagattcggaagaagattatcaagatgtgtatgtttgtgaaaattgtggagacatagcagcacaaatcaagggtattaatacatgtcttagatgttcaaaacttaatctctctcctctcttaacaaaaattgataccacacacgtatctaaagtatttcttactcaaatgaacgccagaggcgtaaaagtcaaattagatttcgaacgaagacctccttcgttttataaaccattagataaagttgatctcaaaccgtcttttctggtctaatattgtttagtagatacttatcaacatcatcaagattatcaagattatcaagattatcaagataagctaattcactaaacacattatcgatttcggtatcgttactcgcagaataaagttcgttatgatcctgatattcggaaatctgtggagtttcaggttttggtggatgtgtaacagctacttgagataccgaagtctgatattcagaaagctgtggatgttctggttcggcatccaccgatggtgttacaccactactaattggttcagtaacgtctgtggacgatggaggcaccacttctacaggttctggttctttatcctcagtcatcaacggagctacttcaatgcgaggaaatgtataatttggtaatggtttctcatgtggatctgaagaagaggtaagatatctactagaaagataccgatcacgttctagttctcttttgtagaacttaactttttctttctcagcatctagttgatattccaacctcttcacgttactacgttcagatttcaattcacgttcgcatgggttacctccgcagtttttacgagcgatttcacgttcagccttcatgcgtctctccctctctctatcgagtttatcagagcagtctttctgaaggcgatcgaactccataaatttctccaacgctttgattgtttccatagatttccgaagttcagcttttaggactgtgattctttttctttcgaattcacagctggatgtacaaccgtttccattaccgccatctctaagtttcttttctagatcggcaacatttcatccccatgccttttacattcctcgagtctactgtcgtcgaaatatcgttccagctccttttcgacatcaataactttagcacgttgtctctcaagctctcttttgtagttatctgattccctggcacgtttaagatcttcatgcaattgagtcagctcttaacacaatctcttgcttcttcgtcatagtacgcgcaatcactgtgagatccattgttaccacgtctacactcggcgagctcgcgtttaagagattcaatttcccgtttgtattggtccatgtttccattgctaccaccattagatttacaggctgctagttgtcgttcgagatcagaaatacgggttttcttggaattgatttcgtcgatgtacttggcatcgaaacacttattaagttctttttccaattctacgattttatttctttcgcgagtcaattccctcctgtagtaactatctgttttgtcagattcacgctctctacgtagactttcttgcaagttactaatttgttccctagcacgtccgagtttagttttatatgctgaatagagttctgattcatcctttgagcagatctctagcgatcgtttaagattcctgattctagtctttagcctatttacctcctcagaagatgttccgttaccgttgcgtttacactcgttaagctgtctatcaagatccatgattctatctctaagacgttgcatctctctttccatatcagcattgctttcattattacgtctgcagtcactcaactgtctttcaatatctgagattctatctctaagacgtcgcatctctctctgtttcggcattggtttcattattacgtctacagtcgttcaactgtctttcaagatctgatattctagattggagtctgctaatctctgtagcattttcacggcattcactcagttgtctttcaagatctgaaattttagattggagtctgctaatctctgtaagatttcctcctccgctctcgatgcagtcggtcaacttattctctagttctctaatacgcgaacgcagtgcatcaacttcttgcgtgtcttcctggttgcgtgtacattcatcgagtctagattcgagatctctaacgcgtcgtcgttcttcctcaagttctctgcgtactacagaaagcgtgtccctatcttgttgatatttagcaatttctgattctagagtactgattttgcttacgtagttactaatatttgtcttggccttatcaagatcctccttgtatttgtcgcattccttgatatccctacgaagtctggacagttcccattcgacattacgacgtttatcgatttcagctcggagatcgtcatcgcgttgttttagccacatacgactgagttcaagttctcgttgacaagatccatctacttttccattcctaatagtatccagttccttttctagttctgaacgcatttctcgttccctatcaagcgattctctcaattctcggatagtcttcttatcaatttctaataaatctgaaccatcatctgtcccattttgaatatccctgtgttctttgatctcttttgtaagtcggtcgattctttcggttttataaacagaatccctttccaaagtcctaatcttactgagtttatcactaagttctgcattcaattcggtgagttttctcttggcttcttccaactctgttttaaactctccactatttccgcattcttcctcgcatttatctaaccattcaattagtttattaataactagttggtaatcagcgattcctatagccgttcttgtaattgtgggaacataattaggatcttctaatggattgtatggcttgatagcatcatctttatcattattagggggatggacaaccttaattggttggtcctcatctcctccagtagcgtgtggttcttcaatagccgtgttagtaataggcttaggcaaatgcttgtcgtacgcgggcacttcctcatccatcaagtatttataatcgggttctacgtctgaatattcttttctaagagacgcaacttctggagttagtagaagaactctgtttctatatctatcaacgctggaatcaatactcaagttaaggatagcgaatacctcatcgtcatcatccgtatcctctgaaacgccatcatatgacatttcatgaagtctaacgtattgataaacagaatcagatttagtattaaacagatccttaacctttttagtaaatgcatatgtatattttagatctccagatttcataatatggtcgcatgccttaaatgtcagtgcttccataatatagtctggaacactaattggtgatgaaaaagataccggaccatatgctacgttgataaataactctgagccactaactagataatgattaatgttaaggaagaggaaatattcagtgtataggtatgtcttggcgtcatatcttgtactaaacacgctaaacagtttgttaatgtgatcaatttccaatagattaattagagcagcaggaataccaacaaacatattaccacatccgtattttctatgaatatcacatatcatgttaaaaaatcttgatagaagagcgaatatctcgtctgacttaatgagtcgtagttcagcagcaacataagtcataactgtaaatagaacatactttcctgtagtgttgattctagactccacatcaacaccattattaaaaatagttttatatacatctttaatctgctctccgttaatcgtcgaacgttctagtatacggaaacactttgatttcttatctgtagttaatgacttagtgatatcacgaagaatattacgaattacatttcttgtttttcttgagagacctgattcagaactcaactcatcgttccatagtttttttacctcagtggcgaaatctttggagtgcttggtacatttttcaataaggttcgtgacctccatttattataaaaaaattttattcaaaacttaactacaatcgggtaattataaaatcgtagatctcccatgtggtggaatactaccatctatcgcatgtggatggacagtaggtaatggccatgggaacagtaatgtttgcatatttatctttcttgccagtattactgcatattgtcccaatgtttcgatgtgatgttctaacctatcaactgccgctgtatcacaacaatagtgtccgatgaaattaagattatgatccaatgtgtttaatatatgattatcaagtcttatacgatccgcgtcttttttgacaggatcaggttcttctacaggaagaagtttcggcctcttatgatattcatgtctgggaaacggtggtctagggtgaggctccggtatcggagtgggttttggattataatcatcatcgtctatgacatcatcttcgacttcgatatttattttgctatcttgatgatgtcctgtatcagttgcattttcagcactcgactgaatattagcgcattcattgtttattattaccatatttctaaacccaaaatgtatatgttgaacatcagtactatcgttgatgagtcttatagcatgaattcgcttatcgttatcgggtttagcttctgtcaccttagcaattccttttttattaaactctacataatcatatccatttctattgtttgttctaatataaacgagtatagcatcattgctaaatttttcaatagtatcgaaaacagaatatcctaaaccatataatatatattcaggaacactcaaactaaatgtccaggattctcctaaatacgtaaactttaatagtgcgaaatcattcaaaaatctaccacttatagatagatagtacataaatgcgtatagtagtctacctatctctttattatgaaaaccggcattacgatcatatatgtcgtgatatacctgtgatccgtttacgttaaaccataaatacatgggtgatcctataaacatgaatttatttctaattctcagagctatagttaattgaccgtgtaatatttgcttacatgcatacttgatacgctcattaataagatttttatcattgctcgttatctcagaatcgtatatataaggagtaccatcgtgattcttaccagatattatacaaaatactatatataaaatatattgaccaacgttagtaatcatataaatgtttaacgttttaaattttgtattcaatgatccattatcatacgctagcatggtcttatgatattcattctttaaaatataatattgtgttagccattgcattggggctcctaatggagattttttattctcatccattttaggataggctttcataaagtccctaataacttcgtgaataatgtttctatgttttctactgatgcatgtatttgcttcgatttttttatcccatgtttcatctatcatagatttaaacgcagtaatgctcgcaacattaacatcttgaaccgttggtacaattccgttccataaatttataatgttcgccatttatataactcattttttgaatatacttttaattaacaaaagagttaagttactcatatggacgccgtccagtctgaacatcaatctttttagccagagatatcatagccgctcttagagtttcagcgtgattttccaacctaaatagaacttcatcgttgcgtttacaacacttttctatttgttcaaactttgttgttacattagtaatctttttttccaaattagttagccgttgtttgagagtttcctcattgtcgtcttcatcggctttaacaattgcttcgcgtttagcctctggctttttagcagcctttgtagaaaaaaattcagttgctggaattgcaagatcgtcatctccggggaaaagagttccgtccatttaaagtacagattttagaaactgacactctgcgttatttatatttggtacaacacatggattataaatattgatgttaataacatcagaaaatgtaaagtctatacattgttgcatcgtgttaaattttctaatggatctagtattattgggtccaacttctgcctgaaatccaaatatggaagcggatacaaaaccgtttcctggataaaccacacatctccacttttgctttacatcagaaattgtgtcattgacatcttgaactctcctatctaatgccggtgttccacctatagattttgaatattcgaatgctgcatgagtagcattaaattccttaatattgccataattttcatatattgagtaaccctggataaaaagtaaacacaccgcagccgtcgctaccacaataaaaaaaattgatagagagttcatttataatctattagaagctgacaaaatttttttacacgcatcagacaatgctttaataaatagttcaacatctacttttgtcatatcgaaccgatggtatgattctaacctagaattacatccgaaaaagttgactatgttcatagtcattaagtcattaacaaacaacattccagactctggattataagacgatactgtttcgtcacaattacctaccttaatcatgtgattatgaatattggctattagagcaccttctaagaaatctataatatctttgaaacacgatttaaaatcaaaccacgaatatacttctacgaagaaagttagtttacccataggagaaataactataaatggagatctaaatacaaaatccggatctatgatagttttaacattattatattctctattaaatacctccacatctaaaaatgttaattttgaaactatgtcttcgtttattaccgtacctgaactaaacgctataagctctattgtttgagaactctttaaacgatattcttgaaatacatgtaacaaagtttcctttaactcggtcggtttatctaccatagttacagaatttgtatccttatctataatataataatcaaaatcgtataaagttatataattatcgcgttcagattgtgatcttttcaaatagactaaaaaccccatttctctagtaagtatcttatgtatatgtttgtaaaatatcttcatggtgggaatatgctctaccgcagttagccattcctcattgacagcggtagatgtattagacaaaactattccaatgtttaacaagggccattttacgagattattaaatccttgtttgataaatgtagccaatgagggttcgagttcaacgacgattgaattctcttcccgcggatgctgcatgatgaacgacgggatgttgttcgattgatttggaattctttttcgactttttgtttatattaaatattttaaaatttatagctgatagcaattcatgtactacggataatgtagacgcgtattgcgcatcgatatctttattattagataaatttatcaataaatgtgagaagtttgcctcgttaaggtcttccatttaaatattatataaacatttgtgtttgtatcttattcgtcttttatggaatagttttttactagtaaagctgcaattacacactttgtccgtaaaacataaatataaacaccagcttttatcaatcgttccaaaaagtcgacggcggacatttttaacatggcatctattttaaatacacttaggtttttggaaaaaacatcattttataattgtaacgattcaataactaaagaaaagattaagattaaacataagggaatgtcatttgtattttataagccaaagcattctaccgttgttaaatacttgtctggaggaggtatatatcatgatgatttggttgtattggggaaggtaacaattaatgatctaaagatgatgctattttacatggatttatcatatcatggagtgacaagtagtggagcaatttacaaattgggatcgtctatcgatagactttctctaaataggactattgttacaaaagttaataattatgatgatacattttttgacgacgatgattgatcgctattgcacaattttgtttttttactttctaatatagcgtttagattctttttcatgtgcgaatattgatttactaaaatatcgatgtttaacttttgttctatgacgtccttatcagcggtatcggtacatatacgtaattcaccttcacaaaatacggagtcttcgataataatagccaatcgattattggatctagcggtctgtatcatattcaacatgtttaatatatcctttcgtttcccctttacaggcatcgatcgtagcatattttccgcgtctgagatggaaatgttaaaactacaaaaatgcgtaatgttagcccgtcctaatattggtacgtgtctataagtttggcatagtagaataatagacgtgtttaaatgccttccaaagtttaagaattctattagagtattgcattttgatagtttatcgcctacatcatcaaaaataagtaaaaagtgtgctgattttttatgattttgtgcgacagcaatacatttttctatgttacttttagttcgtatcagattatattctagagattcctgactactaacgaaattaatatgatttggccaaatgtatccatcataatctggattataaacgggtgtaaacaagaatatatgtttatattttttaactagtgtagaaaacagagatagtaaatagatagtttttccagatccagatcctcccgttaaaaccattctaaacggcatttttaataaattttctcttgaaaattgtttttcttggaaacaattcataattatatttacagttactaaattaatttgataataaatcaaaatatggaaaactaaggtcgttagtagggaggagaacaaagaaggcatatcgtgatataaataacatttattatcatgatgacaccagaaaacgacgaagagcagacatctgtgttctccgctactgtttacggagacaaaattcagggaaagaataaacgcaaacgcgtgattggtctatgtattagaatatctatggttatttcactactatctatgattaccatgtccgcgtttctcatagtgcgcctaaatcaatgcatgtctgctaacgaggctgctattactgacgccgctgttgccgttgctgctgcatcatctactcatagaaaggttgcgtctagcactacgcaatatgatcacaaagaaagctgtaatggtttatattaccagggttcttgttatatattacattcagactaccagttattctcggatgctaaagcaaattgcactgcggaatcatcaacactacccaataaatccgatgtcttgattacctggctcattgattatgttgaggatacatggggatctgatggtaatccaattacaaaaactacatccgattatcaagattctgatatatcacaagaagttagaaagtatttttgtgttaaaacaatgaactaatatttatttttgtacattaataaatgaaatcgcttaatagacaaactgtaagtaggtttaagaagttgtcggtgccggccgctataatgatgatactctcaaccattattagtggcataggaacatttctgcattacaaagaagaactgatgcctagtgcttgcgccaatggatggatacaatacgataaacattgttatctagataccaacattaaaatgtctacagataatgcggtttatcagtgtcgtaaattacgagctagattgcctagacctgatactagacatctgagagtattgtttagtattttttataaagattattgggtaagtttaaaaaagaccaataataaatggttagatattaataatgataaagatatagatattagtaaattaacaaattttaaacaactaaacagtacgacggatgctgaagcgtgttatatatacaagtctggaaaactggttgaaacagtatgtaaaagtactcaatctgtactatgtgttaaaaaattctacaagtgacaacaaaaaatgaattaataataagtcgttaacgtacgccgccatggacgccgcgtttgttattactccaatgggtgttgactataacagatacattgtatgatgatctcgatatctcaatcatggactttataggaccatacattataggtaacataaaaactgtccaaatagatgtacgggatataaaatattccgacatgcaaaaatgctactttagctataagggtaaaatagttcctcaggattctaatgatttggctagattcaacatttatagcatttgtgccgcatacagatcaaaaaataccatcatcatagcatgcgactatgatatcatgttagatatagaagataaacatcagccattttatctattcccatctattgatgtttttaacgctacaatcatagaagcgtataacctgtatacagctggagattatcatctaatcatcaatccttcagataatctgaaaatgaaattgtcgtttaattcttcattctgcatatcagacggcaatggatggatcataattgatgggaaatgcaatagtaattttttatcataaaagttgtaaagtaaataataaaacaataaatattgaactagtagtacgtatattgagcaatcagaaatgatgctggtacctcttatcacggtgaccgtagttgcgggaacaatattagtatgttatatattatatatttgtaggaaaaagatacgtactgtctataatgacaataaaattatcatgacaaaattaaaaaagataaagagttctaattccagcaaatctagtaaatcaactgatagcgaatcagactgggaggatcactgtagtgctatggaacaaaacaatgacgtagataatatttctaggaatgagatattggacgatgatagcttcgctggtagtttaatatgggataacgaatccaatgttatggcgcctagcacagaacacatttacgatagtgttgctggaagcacgctgctaataaataatgatcgtaatgaacagactatttatcagaacactacagtagtaattaatgaaacggagactgttaaagtacttaatgaagataccaaacagaatcctaactattcatccaatcctttcgtaaattataataaaaccagtatttgtagcaagtcaaatccgtttattacagaacttaacaataaatttagtgagaataatccgtttagacgagcacatagcgatgattatcttaataagcaagaacaagatcatgaacacgatgatatagaatcatcggtcgtatcattggtgtgattagtttcctttttataaaattgaagtaatatttagtattattgctgccgtcacgttgtacaaatggagatattccctgtattcggcatttctaaaattagcaattttattgctaataatgactgtagatattatatagatacagaacatcaaaaaattatatctgatgagatcaatagacagatggatgaaacggtacttcttaccaacatcttaagcgtagaagttgtaaatgacaatgagatgtaccatcttattcctcatagattatcgacgattatactctgtattagttctgtcggaggatgtgttatctctatagataatgacgtcaatggcaaaaatattctaacctttcccattgatcatgctgtaatcatatccccactgagtaaatgtgtcgtagttagcaagggccctacaaccatactggttgctaaagcggatatacccagcaaacgattggtaacatcgtttacaaacgacatactgtatgtaaacaatctatcactgattaattatttgccgttgtctgtattcattattagacgagtcaccgactatttggatagacacatatgcgatcagatatttgctaataataagtggtattcccttataaccatcgacgataagcaatatcctattccatcaaattgtataggtatgtcttctgccaagtacataaattctagcatcgagcaagatactttaatacatgtttgtaacctcgagcatccattcgacttagtatacaaaaaaatgcagtcgtacaattctgtacctatcaaggaacaaatattgtacggtagaattgataatataaatatgagcattagtatttctgtggattaatagatttctagtatggggatcattaatcatctctaatctctaaatacctcataaaacgaaaaaaaagctattatcaaatactgtacggaatagattcattctcttctctttttatgaaactctgttgtatatctactgataaaactggaagcaaaaaatctgataaaaagaataagatcaagatcaaggattatatggaacacgattattataaaataacaatagttcctggttcctcttccacgtctactagctcgtggtattatacacatgcctagtaatagtctctttgcgttgatggaaagcagactagaaataacaggctaaaatgttcagacaccataatagttcccaacccagataataacagagtaccatcaacacattcctttaaactcaatcccaaacccaaaaccgttaaaatgtatccggccaattgatagtagataatgaggtgtacagcgcatgataatttacacagtaaccaaaatgaaaatactttagtaattataagaaatatagatggtaacgtcatcatcaacaatccaataatatgccggagagtaaacattgacggataaaacaaaaatgctccgcataactctatcatggcaataacacaaccaaatacttgtaagattcctaaattagtagaaaatacaacggatatcgatgtataagtgatctcgagaaataataagaataaagtaatgcccgtaaagataaacatcaacattgtttggtaatcattaaaccaattagtatgacgttgaactaatttcacagtaaattttattccagtattatccccgcatgtataagtacctggtaagatatctttatattccataatcaatgagacatcactatctgataacgaatgaagtctagcactagtatgccatttacttaatattgtcgtcttggaagttttattataagttaaaatatcatggttatccaatttccatctaatatactttgtcggattatctatagtacacggaataatgatggtatcattacatgctgtatactctatggtctttgtagttgttataacaaccaacgtatagaggtatatcaacgatattctaactcttgacattttttatttatttaaaatgatacctttgttatttattttattctattttgctaacggtattgaatggcataagtttgaaacgagtgaagaaataatttctacttacttattagacgacgtattatacacgggtgttaatggggcggtatacacattttcaaataataaactaaacaaaactggtttaactaataataattatataacaacatctataaaagtagaggatgcggataaggatacattagtatgcggaaccaataacggaaatcccaaatgttggaaaatagacggttcagacgacccaaaacatagaggtagaggatacgctccttatcaaaatagcaaagtaacgataatcagtcacaacggatgtgtactatctgacataaacatatcaaaagaaggaattaaacgatggagaagatttgacggaccatgtggttatgatttattcacggcggataacgtaattccaaaagatggtttacgaggagcattcgtcgataaagacggtacttatgacaaagtttacattcttttcactgatactatcggctcaaagagaattgttaaaattccgtatatagcacaaatgtgcctaaacgacgaaggtggtccatcatcgttgtctagtcatagatggtcgacgtttctcaaagtcgaattagaatgtgatatcgacggaagaagttatagataaattattcattctaaaactataaaaacagataatgatacgatactatatgtattcttcgatagtccgcattatgtacctattctatgaataccattaaacaatctttttctacgtcaaaattggaaggatatacaaagcaattgccgtctccagctcctggtatatgtctaccagctggaaaagttgttccacataccacgtttgaagtcatagaaaaatataatgtactagatgatattataaagcctttatctaaccaacctatcttcgaaggaccgtctggtgttaaatggttcgatataaaggagaaggaaaatgaacatcgggaatatagaatatacttcataaaagaaaattctatatattcgttcgatacaaaatctaaacaaactcgtagctcgcaagtcgatgcgcgactattttcagtaatggtaacttcgaaaccgttatttatagcagatatagggataggagtaggaatgccacaaatgaaaaaaatacttaaaatgtaatcttaatcgagtacaccacacgacaatgaacaaacataagacagattatgctggttatgcttgctgcgtaatatgcggtctaattgttggaattatttttacagcgacactattaaaagttgtagaacgtaaattagttcatacaccatcaatagataaaacgataaaagatgcatatattagagaagattgtcctactgactggataagctataataataaatgtatccatttatctactgatcgaaaaaacctgggaggaaggacgtaatgcatgcaaagctctaaatccaaattcggatctaattaagatagagactccaaacgagttaagttttttaagaagccttagacgaggctattgggtaggagaatccgaaatattaaaccagacaaccccatataattttatagctaaaaatgccacgaagaatggaactaaaaaacggaaatatatttgtagtacaacgaatactcccaaactgcattcgtgttacactatataacaattacactacatttttatcataacactacttcggttagatgttttagaaaaaaataaatatcgccgtaccgttcttgtttttataaaaataacaattaacaattatcaaattttttctttaatattttacgtggttgaccattcttggtggtaaaataatctcttagtgttggaatggaatgctgtttaatgtttccgcactcatcgtatattttgacgtatgcagtcacatcgtttacgcaatagtcagactgtagttctatcatgcttcctacatcagaaggaggaacagttttaaagtctcttggttttaatctattgccattagttttcatgaaatcctttgttttatccacttcacattttaaataaatgtccactatacattcttctgttaattttactagatcgtcatgggtcatagaatttataggttccgtagtccatggatccaaactagcaaacttcgcgtatacggtatcgcgattagtgtatacaccaactgtatgaaaattaagaaaacagtttaataaatcaacagaaatatttaatcctccgtttgatacagatgcgccatatttatggatttcggattcacacgttgtttgtctgaggtgttcgtctagtgttgcttctacgtaaacttcgattcccatatattctttattgtcagaatcgcataccgatttatcatcatacactgtttgaaaactaaatggtatacacatcaaaataataaataataacgagtacattctgcaatattgttatcgtaattggaaaattagtgttcgagtgagtcggattatgtgagtactggattgtatattttattttatattttgtaataagaataaaatgctaatgtcaagtttattccaatagatgtcttattaaaaaacatatataataaataacaatggctgaatggcataaaattatcgaggatatctcaaaaaataataagttcgaggatgccgccatcgttgattacaagactacaaagaatgttctagctgctattcctaacagaacatttgccaagattaatccgggtgaaattattcctctcatcactaatcgtaatattctaaaacctcttattggtcagaaatattgtattgtatatactaactctctaatggatgagaacacgtatgctatggagttgcttactgggtacgcccctgtatctccgatcgttatagcgagaactcataccgcacttatatttttgatgggtaagccaacaacatccagacgtgatgtgtatagaacgtgtagagatcacgctacccgtgtacgcgcaactggtaattaaaataaaaagtaatattcatatgtagtgtcaattttaaatgatgatgatgaaatggataatatccatattgacgatgtcaataatgccggtattggcatacagctcatcgatttttagatttcattcagaggatgtggaattatgttatgggcatttgtattttgataggatctataatgtagtaaatataaaatataatccgcatattccatatagatataattttattaatcgcacgttaaccgtagatgaactagacgataatgtcttttttacacatggttattttttaaaacacaaatatggttcacttaatcctagtttgattgtctcattatcaggaaacttaaaatataatgatatacaatgctcagtaaatgtatcgtgtctcattaaaaatttggcaacgagtacatctactatattaacatctaaacataagacttattctctacatcggtccacgtgtattactataataggatacgattctattatatggtataaagatataaatgacaagtataatgacatctatgattttactgcaatatgtatgctaatagcgtctacattgatagtgaccatatacgtgtttaaaaaaataaaaatgaactcttaattatgctatgctattagaaatggataaaatcaaaattacggttgattcaaaaattggtaatgttgttaccatatcgtataacttggaaaagataactattgatgttacacctaaaaagaaaaaagaaaaggatgtattattagcgcaatcagttgctgtcgaagaggcaaaagatgtcaaggtagaagaaaaaaatattatcgatattgaagatgacgatgatatggatgtagaaagcgcataatacgatctataaaaataagtatataataaatactttttatttacggtactcttgtagtggtgataccctactcaattatttttttaaaaaaatacttattctgattcttctagccatttccgtgttcgttcgaatgccacatcgacgttaaagataggggagtagttgaaatctagttctgcattgttggtacgcacctcaaatgtagtgttggatatcttcaacgtatagttgttgagtagtgatggttttctaaatagaattctcttcatatcattcttgcacgcgtacatttttagcatccatcttggaattctagatccttgttctattcccaatggtttcatcaatagaagattaaacatatcgtacgaacacgatggagagtaatcgtagcaaaagtaagcatttcctttaatcttagatcccggatactggatatattttgcagccaacacgtgcatccatgcagcatttcctacatatacccggctatgcaccgcgtcatcatcgactgtacgatacataatgttaccgtgttgcttacattgctcgtaaaagactttcgtcaatttgtctccttctccgtaaattccagtgggtcttaggcaacaagtatacaattttgctccattcatgattacggaattattggctttcataaccagttgctcggccatacgtttactttttgcgtatacatgtcctggtgatatatcataaagggtatgctcatggccgatgaatggatcaccgtgtttattgggtcctattgcttccatgctactagtatagatcaaatacttgattcctaggtccacacaagctgccaatatagtctgtgttccataatagtttactttcatgatttcattatcggtgtattttccaaatacatccactagagcagccgtatgaataatcagatttaccccatctagcgcttctctcaccttatcaaagtcgtttatatcacattgtatatagtttataaccttaactttcgaggttattggttgtggatcttctacaatatctatgactctgatttcttgaacatcatctgcactaattaacagttttactatatacctgcctagaaatccggcaccaccagtaaccgcgtacacggccattgctgccactcataatatcagactacttattctattttactaaataatggctgtttgtataatagaccacgataatatcagaggagttatttactttgaaccagtccatggaaaagataaagttttaggatcagttattggattaaaatccggaacgtatagtttgataattcatcgttacggagatattagtcaaggatgtgattccataggcagtccagaaatatttatcggtaacatctttgtaaacagatatggtgtagcatatgtttatttagatacagatgtaaatatatttacaattattggaaaggcgttatctatttcaaaaaatgatcagagattagcgtgtggagttattggtatttcttacataaatgaaaagataatacattttcttacaattaacgagaatggcgtttgatatatcagttaatgcgtctaaaacaataaatgcattagtttacttttctactcagcaaaataaattagtcatacgtaatgaagttaatgatacacactacactgtcgaatttgatagggacaaagtagttgacacgtttatttcatataatagacataatgacaccatagagataagaggggtgcttccagaggaaactaatattggttgcgcggttaatacgccggttagtatgacttacttgtataataagtatagttttaaactgattttagcagaatatataagacacagaaatactatatccggcaatatttattcggcattgatgacactagatgatttggctattaaacagtatggagacattgatctattatttaatgagaaacttaaagtagactccgattcgggactatttgactttgtcaactttgtaaaggatatgatatgttgtgattctagaatagtagtagctctatctagtctagtatctaaacattgggaattgacaaataaaaagtataggtgtatggcattagccgaacatatatctgatagtattccaatatctgagctatctagactacgatacaatctatgtaagtatctacgcggacacactgagagcatagaggatgaatttgattattttgaagacgatgattcgtctacatgttctgccgtaaccgacagggaaacggatgtataattttttttatagcgtgaaggatatgataaaaaatataattgttgtatttatcccattccaatcaccttatatgattctgtaaaaaaattatactgtaacacaataaaggagtcttatagatgtatagaggtcagatactggtttgataaactgtttattccacataagtatgtttgactttatggttagacccgcatactttaacaaatcactgaaaattggagttaggtattgacctctcagaatcagttgccgttctggaacattaaatgtattttttatgatatactccaacgcatttatgtgggcatacaacaagtcattactaatggagtattccaagagttttagttgtctagtatttaacaagagaagagatttcaacagactgtttatgaactcgaacgccgcctcattgtcgcttatattgatgatgtcgaattctcccaatatcatcactgatgagtagctcatcttgttatcgggatccaagttttctaaagatgtcattaaaccctcgatcatgaatggatttatcatcatcgtttttatgttggacatgagcttagtccgtttgtccacatctatagacgacgatttctgaattatttcatatatccctctctttaactccaggaacttgtcaggatggtctactttaatatgttctcgtctaagagatgaaaatctttggatggttgcacgcgacttttctttaaaggatgacgttgcccaagatcctctcttaaatgaatccatcttatccttggacaagatggacagtctattttccttagatggtttaatatttttgttacccatgatctataaaggtagacctaatcgtctcggatgaccatatatttattttcagttttattatacgcataaattgtaaaaaatatgttaggtttacaaaaatgtctcgtggggcattaatcgtttttgaaggattggacaaatctggaaaaacaacacaatgtatgaacatcatggaatctataccggcaaacacgataaaatatcttaactttcctcagagatccactgtcactggaaagatgatagatgactatctaactcgtaaaaaaacctataatgatcatatagttaatctattattttgtgcaaatagatgggagtttgcatcttttatacaagaacaactagaacagggaattactttaatagttgatagatacgcattttctggagtagcgtatgccgccgctaaaggcgcgtcaatgactctcagtaagagttatgaatctggattgcctaaacccgacttagttatattcttggaatctggtagcaaagaaattaatagaaacgtcggcgaggaaatttatgaagatgttacattccaacaaaaggtattacaagaatataaaaaaatgattgaagaaggagatattcattggcaaattatttcttctgaattcgaggaagatgtaaagaaggagttgattaagaatatagttatagaggctatacacacggttactggaccagtggggcaactgtggatgtaatagtgaaattacattttttataaatagatgttagtacagtgttataaatggatgaagcatattactctggcaacttggaatcagtactcggatacgtgtccgatatgcataccgaactcgcatcaatatctcaattagttattgccaagatagaaactatagataatgatatattaaacaaggacattgtaaattttatcatgtgtagatcaaacttggataatccatttatctctttcctagatactgtatatactattatagatcaagagatctatcagaccgaattgattaattcattagacgacaatgaaattatcgattgtatagttaacaagtttatgagcttttataaggataacctagaaaatatagtagatgctatcattactctaaaatatataatgaataatccagattttaaaactacgtatgccgaagtactcggttccagaatagccgatatagatattaaacaagtgatacgtaagaatatactacaattgtctaatgatatccgcgaacgatatttgtgaaaaatattaaaaaaaaatactttttttattaaatgacgtcgcttcgcgaatttagaaaattatgctgtgatatatatcacgcatcaggatataaagaaaaatctaaattaattagagactttataacagatagggatgataaatatttgatcattaagctattgcttcccggattagacgatagaatttataacatgaacgataaacaaattataaaattatatagtataatatttaaacaatctcaggaagatatgctacaagatttaggatacggatatataggagacactattaggactttcttcaaagagaacacagaaatccgtccacgagataaaagcattttaactttagaagaagtggatagttttttaactacgttatcatccgtaactaaagaatcgcatcaaataaaattattgactgatgtagcatctgtttgtacatgtaatgatttaaaatgtgtagtcatgcttattgataaagatctaaaaattaaagcgggccctcggtacgtacttaacgctattagtcctcatgcctatgatgtgtttagaaaatctaataacttgaaagagataatagaaaatgcatctaaacaaaatctagactctatatctatttctgttatgactccaattaatcccatgttagcggaatcgtgtgattctgtcaataaggcgtttaaaaaatttccatcaggaatgtttgcggaagtcaaatacgatggtgaaagagtacaagttcataaaaataataacgagtttgccttctttagtagaaacatgaaaccagtactctctcataaagtggattatctcaaagaatacataccgaaagcatttaaaaaagctacgtctatcgtattggattctgaaattgttcttgtagacgaacataatgtaccgctaccgtttggaagtttaggaatacacaaaaagaaagaatataaaaactctaacatgtgtttgttcgtgtttgactgtttgtactttgatggattcgatatgacggacattccattgtacgaacgaagatcttttctcaaagatgttatggttgaaatacccaatagaatagtattctcagagttgacgaatattagtaacgagtctcagttaactgacgtattggatgatgcactaacgagaaaattagaaggattggtcttaaaagatattaatggagtatacgaaccgggaaagagaagatggttaaaaataaagcgagactatttgaacgagggttccatggcagattctgccgatttagtagtactaggtgcctactatggtaaaggagcaaagggtggtatcatggcagtctttctaatgggttgttacgacgatgaatccggtaaatggaagacggttaccaagtgttcaggacacgatgataatacgttaagggagttgcaagaccaattaaagatgattaaaattaacaaggatcccaaaaaaattccagagtggttagtagttaataaaatctatattcccgattttgtagtagaggatccgaaacaatctcagatatgggaaatttcaggagcagagtttacatcttccaagtcccataccgcaaatggaatatccattagatttcctagatttactaggataagagaggataaaacgtggaaagaatctactcatctaaacgatttagtaaacttgactaaatcttaatagttacatacaaactgaaaattaaaataacaccatttagttggtggtcgccatggatggtgttattgtatactgtctaaacgcgttagtaaaacatggcgaggaaataaatcatataaaaaatgatttcatgattaaaccatgttgtgaaagagtttgtgaaaaagtcaagaacgttcacattggcggacaatctaaaaacaatacagtgattgcagatttgccatatatggataatgcggtatccgatgtatgcaattcactgtataaaaagaatgtatcaagaatatccagatttgctaatttgataaagatagatgacgatgacaagactcctactggtgtatataattattttaaacctaaagatgttattcctgttatcatatctataggaaaggataaagatgtctgtgaactattaatctcatcagacatatcgtgtgcatgcgtggagttaaattcatatcacgtagccattcttcccatgaatgtttccttttttaccaaaggaaatgcctcgttgattattctcctgtttgatttctctatcgatgcagcacctctcttaagaagtgtaaccgataataatgttattatatctagacaccagcgtctacatgacgagcttccgagttccaattggttcaagttttacataagtataaagtccgactattgttctatattatatatggttgttgatggatctgtgatgcatgcgatagctgataatagaactcacgcaattattagcaaaaatatattagacaatactacaattaacgatgagtgtagatgctgttattttgaaccacagattaggattcttgatagagatgagatgctcaatggatcatcgtgtgatatgaacagacattgtattatgatgaatttacctgatgtaggcgaatttggatctagtatgttggggaaatatgaacctgacatgattaagattgctctttcggtggctggtaatttaataagaaatcgagactacattcccgggagacgaggctatagctactacgtttacggtatagcctctagataatttttttaagcacgaaataaaaaacataattttaaaccaatctatttcatactattttgtgtgatcaccatggacataaagatagatattagtatttctggtgataaatttacggtgactactaggagggaaaatgaagaaagaaaaaaatatctacctctccaaaaagaaaaaactactgatgttatcaaacctgattatcttgagtacgatgacttgttagatagagatgagatgtttactattctagaggaatattttatgtacagaggtctattaggcctcagaataaaatatggacgactctttaacgaaattaaaaaattcgacaatgatgcggaagaacaattcggtactatagaagaactcaagcagaaacttagattaaattctgaagagggagcagataactttatagattatataaaggtacaaaaacaggatatcgtcaaacttactgtatacgattgcatatctatgataggattgtgtgcatgcgtggtagatgtttggagaaatgagaaactgttttctagatggaaatattgtttacgagcgattaaactgtttattaatgatcacatgcttgataagataaaatctatactgcagaatagactagtatatgtggaaatgtcatagaaagttaatgagagcaaaaatatataaggttgtattccatatttgttattttttctgtaatagttaaaaaaatacattcgatggtctatctatcagattattatgtgttataaggtactttttctcataataaactagagtatgagtaagatagtgtttttcaaaacatataaatctaaaattgatggatgagatatacagctattaatttcgaaaatatataaatctaaaattgatggataagatatacagctattaatttcgaaaatatattttaatctgataactttaaacatggatttttgatggtggtttaacgttttaaaaaaagattttgttattgtagtatatgataatattaaaagatggatataaagaatttgctgactgcatgtactattttttacattactacattggctacggcagatatacctactccgccaccaacgggtcatgtgacaagggagaatatcttgataagaggcataatcaatgttgtaatcggtgtccacctggagaatttgccaaggttagatgtaatggtaacgataacacaaaatgtgaacgctgcccacctcatacatataccacaatccccaattattctaatggatgtcatcaatgtagaaaatgcccaaccggatcatttgataaggtaaagtgtaccggaacacagaacagtaaatgttcgtgtcttcctggttggtattgcgctactgattcttcacagactgaagattgttgaaattgtgtaccaaaaaggagatgtccatgcggatactttggtggaatagatgaacaaggaaatcctatttgtaaatcgtgctgtattggtgaatattgcaactacctacgtaattatagacttgatccattttctccatgcaaactatctaaatgtaattaattatgattttgatgataatgttaccatacattatatcgctacttggttagtgtattattcagtatgaagacctattaataattacttatcttttgacgatcttgttataattataatataaaaacttatggcatagtaactcataattgctgacgcgataaattcgtaataatctgttttgttcaaatttttataaggaatctacaggcataaaaataaaaatataatttataatatactcttacagcgcgccatcatgaatagcagcagtaaattaattgctgttattaatggatttagaaatagtggacgattttgtgatattaatatagttattaatgatgaaaggataaacgctcacagactcatcctatctggagcctccgaatatttttccattctgttttccaataattttatcgattctaatgaatacgaagttaatctaagtcatttagattatcaaagtgttaacgatttgatcgattacatttatgggatacctttgagcctaactaacgataacgtgaaatatattctttcaaccgctgattttttacaaattggatctgccattactgagtgcgaaaaatacatacttaaaaatctttgttctagaaactgtatcgatttctacatatacgctgataaatataataacaagaaaatagaatcagcgtcgtttaacacaatattacgaaatattttgagactcatcaacgatgaaaactttaaatacttaacagaggaatcaatgataaaaattttaagcgatgatatgttaaatataaaaaatgaggattttgcaccactaattctcattaaatggttagagagtactcaacaatcatgcaccgtcgagttacttagatgcctcagaatatcattgctttccccacaagttataaaatcactttatagtcatcaactggttagttcaatctacgaatgtataacattcttaaacaatatagcattcttggatgaatcatttcctagataccatagcatcgagttgatatctatcggtataagtaattcgcatgataagatttccataaactgctacaatcataaaaaaaatacatgggaaatgatatcttcacgtagatataggtgtagtttcgcagtggccgtcctggataatattatctatatgatgggtggatatgatcagtccccgtatagaagttcaaaggttatagcgtacaatacatgtacaaattcttggatatatgatataccagagctaaaatatcctcgttctaattgtgggggactggctgatgacgaatacatttattgtataggcggcatacgcgatcaggattcatcgttgacatctagtattgatagatggaagccatcaaaaccatattggcagaagtatgctaaaatgcgcgaaccaaaatgtgatatgggggttgcgatgttaaacggattaatatatgtcatgggtggaatcgttaaaggtgacacgtgtaccgacgcactagagagtttatcagaagatggatggatgaagcatcaacgtcttccaataaaaatgtccaatatgtcgacgattgttcatgatggcaagatttatatatctggaggttacaacaatagtagtgtagttaatgtaatatcgaatctagtccttagctataatccgatatatgatgaatggaccaaattatcatcattaaacattcctagaattaatcccgctctatggtcagcgcataataaattatatgtaggaggaggaatatctgatgatgttcgaactaatacatctgaaacatacgataaagaaaaagattgttggacattggataatggtcacgtgttaccacgcaattatataatgtataaatgcgaaccgattaaacataaatatccattggaaaaaacacagtacacgaatgattttctaaagtatttggaaagttttataggtagttgatagaacaaaatacataattttgtaaaaataaatcactttttatactaatatgacacgattaccaatacttttgttactaatatcattagtatacgctacaccttttcctcagacatctaaaaaaataggtgatgatgcaactctatcatgtaatcgaaataatacaaatgactacgttgttatgagtgcttggtataaggagcccaattccattattcttttagctgctaaaagcgacgtcttgtattttgataattataccaaggataaaatatcttacgactctccatacgatgatctagttacaactatcacaattaaatcattgactgctagagatgccggtacttatgtatgtgcattctttatgacatcaactacaaatgacactgataaagtagattatgaagaatactccacagagttgattgtaaatacagatagtgaatcgactatagacataatactatctggatctacacattcaccagaaactagttctgagaaaccagaggatatagataattttaattgctcgtcggtattcgaaatcgcgactccggaaccaattactgataatgtagaagatcatacagacaccgtcacatacactagtgatagcattaatacagtaagtgcatcatctggagaatccacaacagacgagactccggaaccaattactgataaagaagaagatcatacagtcacagacactgtctcatacactacagtaagtacatcatctggaattgtcactactaaatcaaccaccgatgatgcggatctttatgatacgtacaatgataatgatacagtaccaccaactactgtaggcggtagtacaacctctattagcaattataaaaccaaggactttgtagaaatatttggtattaccgcattaattatattgtcggccgtggcaatattctgtattacatattatatatataataaacgttcacgtaaatacaaaacagagaacaaagtctagatttttgacttacataaatgtctgggatagtaaaatctatcatattgagcggaccatctggttcaggaaagacagccatagccaaaagactatgggaatatatttggatttgtggtgtcccataccactagatttcctcgtcctatggaacgagaaggtgtcgattaccattacgttaacagagaggccatctggaagggaatagccgccggaaactttctagaacatactgagtttttaggaaatatttacggaacttctaaaactgctgtgaatacagcggctattaataatcgtatttgtgtgatggatctaaacatcgatggcgttagaagtcttaaaaatacgtacctaatgccttactcggtgtatataagacctacctctcttaaaatggttgagaccaagcttcgttgtagaaacactgaagcggatgatgagattcatcgtcgtgtgatgttggcaaaaactgacatggatgaggcaggtgaagccggtctattcgacactattatcattgaagatgatgtgaatttagcatatagtaagttaattcagatactacaggaccgtattagaatgtattttaacactaattagagacttaagacttaaaacttgataattaataatataactcgtttttatatgtggctatttcaacgtctaatgtattagttaaatattaaaacttaccacgtaaaacttaaaatttaaaatgatatttcattgacagatagatcacacattatgaactttcaaggacttgtgttaactgacaattgcaaaaatcaatgggtcgttggaccattaataggaaaaggtggattcggtagtatttatactactaatgacaataattatgtagtaaaaatagagcccaaagctaacggatcattatttaccgaacaggcattttatactagagtacttaaaccatccgttatcgaagaatggaaaaaatctcacaatataaagcacgtaggtcttatcacgtgcaaggcatttggtctatacaaatccattaatgtggaatatcgattcttggtaattaatagattaggtgcagatctagatgcggtgatcagagccaataataatagattaccaaaaaggtcggtgatgttgatcggaatcgaaatcttaaataccatacaatttatgcacgagcaaggatattctcacggagatattaaagcgagtaatatagtcttggatcaaatagataagaataaattatatctagtggattacggattggtttctaaattcatgtctaatggcgaacatgttccatttataagaaatccaaataaaatggataacggtactctagaatttacacctatagattcgcataaaggatacgttgtatctagacgtggagatctagaaacacttggatattgtatgattagatggttgggaggtatcttgccatggactaagatatctgaaacaaagaattgtgcattagtaagtgccacaaaacagaaatatgttaacaatactgcgactttgttaatgaccagtttgcaatatgcacctagagaattgctgcaatatattaccatggtaaactctttgacatattttgaggaacccaattacgacgagtttcggcacatattaatgcagggtgtatattattaagtgtggtgtttggtcgatgtaaaatttttgtcgataaaaattaaaaaataacttaatttattattgatctcgtgtgtacaaccgaaatcatggcgatgttttacgcacacgctctcggtgggtacgacgagaatcttcatgcctttcctggaatatcatcgactgttgccaatgatgtcaggaaatattctgttgtgtcagtttataataacaagtatgacattgtaaaagacaaatatatgtggtgttacagtcaggtgaacaagagatatattggagcactgctgcctatgtttgagtgcaatgaatatctacaaattggagatccgatccatgatcaagaaggaaatcaaatctctatcatcacatatcgccacaaaaactactatgctctaagcggaatcgggtacgagagtctagacttgtgtttggaaggagtagggattcatcatcacgtacttgaaacaggaaacgctgtatatggaaaagttcaacatgattattctactatcaaagagaaggccaaagaaatgaatgcactcagttcaggacctatcatcgattaccacgtctggataggagattgtatctgtcaagttactgctgtggacgtacatggaaaggaaattatgagaatgagattcaaaaagggtgcggtgctacagatcccaaatctggtaaaagttaaacttggggagaatgatacagaaaatctttcttctactatatcggcggcaccatcgaggtaaccacctctcaagaagaccgcgtgaataatgtactcatgaaacgtttggaaactatacgccatatgtggtctgttgtatatgatcattttgatattgtgaatggtaaagaatgctgttatgtgcatacgcattcatctaatcaaaatcctataccgagtactgtaaaaacaaatttgtacatgaagactatgggatcatgcattcaaatggattccatggaagctctagagtatcttagcgaactgaaggaatcaggtggatggagtcccagaccagaaatgcaggaatttgaatatccagatggagtggaagacactgaatcaattgagagattggtagaggagttcttcaatagatcagaacttcaggctggtaaattagtcaaatttggtaattctattaattgttaaacatacatctgtttcagctaagcaactaagaacacgtatacggcagcagcttccttttatactctcatcttttaccaacacaaagggtggatatttgttcattggagttgataataatacacacaaagtatttggattcacggtgggttacgactacctcagactgatagagaatgatatagaaaagcatatcaaaagactttgtgttgtgcatttctgtgagaagaaagaggacatcaagtacacgtgtcgattcatcaaggtatataaacctggggatgaggctacctcgacatacgtgtgcgctatcaaagtggaaagatgctgttgtgctgtgtttgcagattggccagaatcatggtatatggatactaatggtatcaagaagtattctccagatgaatgggtgtcacatataaaattttaattaatgtaactatagagaacaaataataggttgtaatatcatatagacaataactaacaattaattagtaactgttatctcttttttaactaaccaactaactatatacctattaatacatcgtaattatagttcttaacatctattaatcattgattcgcttctttaattttttataaactaacattgttaattgaaaagggataacatgttacagaatataaattatatatggatttttttaaaaaggaaatacttgactggagtgtatatttatctcttcattatatagcacgcgtgtgttccaattcttccacatcccatataatacaggattataatctcgttcgaacatacgagaaagtggataaaacaatagttgattttttatctaggttgccaaatttattccatattttagaatatggggaaaatattctacatatttattctatggatgatgctaatacgaatattataattttttttctagatagagtattaaatattaataagaacgggtcatttatacacaatctcaggttatcatcatccattaatataaaagaatatgtatatcaattagttaataatgatcatccagataataggataagactaatgcttgaaaatggacgtagaacaagacattttttgtcctatatatcagatacagttaatatctatatatgtattttaataaatcatggattttatatagatgcagaagacagttacggttgtacattattacatagatgtatatatcactataagaaatcagaatcagaatcatacaatgaattaattaagatattgttaaataatggatccgatgtagataaaaaagatacgtacggaaacacaccttttatcctattatgtaaacacgatatcaacaacgtggaattgtttgagatatgtttagagaatgctaatatagactctgtagactttaatagatatacacctcttcattatgtctcatgtcgtaataaatatgattttgtaaagttattaatttctaaaggagcaaatgttaatgcgcgtaataaattcggaactactccattttattgtggaattatacacggtatctcgcttataaaactatatttggaatcagacacagagttagaaatagataatgaacatatagttcgtcatttaataatttttgatgctgttgaatctttagattatctattatccagaggagttattgatattaactatcgtactatatacaacgaaacatctatttacgacgctgtcagttataatgcgtataatacgttggtctatctattaaacagaaatggtgattttgagacgattactactagtggatgtacatgtatttcggaagcagtcgcaaacaacaacaaaataataatggaagtactattgtctaaacgaccatctttgaaaattatgatacagtctatgatagcaattactaaaaataaacaacataatgcagatttattgaaaatgtgtataaaatatactgcgtgtatgaccgattatgatactcttatagatgtacagtcgctacagcaatataaatggtatattttaaaatgtttcgatgaaatagatatcatgaagagatgttatataaaaaataaaactgtattccaattagttttttgtatcaaagacattaatactttaatgagatatggtaaacatccttctttcgtgaagtgcactagtctcgacgtatacggaagtcgtgtacgtaatatcatagcatctattagatatcgtcagagattaattagtctattatccaagaagctggatgcgggagataaatggtcgtgttttcctaacgaaataaaatataaaatattggaaaactttaacgataacgaactatccacatatctaaaaatcttataaacactattaaaatataaaatctaagtaggataaaatcacactacatcattgtttccttttagtgctcgacagtgtatactatttttaacactcataaataaaaatgaaaacgatttccgttgttacgttgttatgcgtactacctgctgttgtttattcaacatgtactgtacccactatgaataacgctaaattaacgtctaccgaaacatcgtttaatgataaacagaaagttacatttacatgtgatcagggatatcattctttggatccaaatgctgtctgcgaaacagataaatggaaatacgaaaatccatgcaagaaaatgtgcacagtttctgattatgtctctgaattatatgataagccattatacgaagtgaattccaccatgacactaagttgcaacggcgaaacaaaatattttcgttgcgaagaaaaaaatggaaatacttcttggaatgatactgttacgtgtcctaatgcggaatgtcaacctcttcaattagaacacggatcgtgtcaaccagttaaagaaaaatactcatttggggaatatatgactatcaactgtgatgttggatatgaggttattggtgcttcgtacataagttgtacagctaattcttggaatgttattccatcatgtcaacaaaaatgtgatataccgtctctatctaatggattaatttccggatctacattttctatcggtggcgttatacatcttagttgtaaaagtggttttatactaacgggatctccatcatccacatgtatcgacggtaaatggaatcccatactcccaacatgtgtacgatctaacgaaaaatttgatccagtggatgatggtcccgacgatgagacagatttgagcaaactctcgaaagacgttgtacaatatgaacaagaaatagaatcgttagaagcaacttatcatataatcatagtggcgttaacaattatgggcgtcatatttttaatctccgttatagtattagtttgttcctgtgacaaaaataatgaccaatataagttccataaattgctaccgtaaatataaatccgttaaaataattaataatttaataacaaacaagtatcaaaagattaaagacttatagctagaatcaattgagatgtcttcttcagtggatgttgatatctacgatgccgttagagcatttttactcaggcactattataacaagagatttattgtgtatggaagaagtaacgccatattacataatatatacaggctatttacaagatgcgccgttataccgttcgatgatatagtacgtactatgccaaatgaatcacgtgttaaacaatgggtgatggatacacttaatggtataatgatgaatgaacgcgatgtttctgtaagcgttggcaccggaatactattcatggaaatgtttttcgattacaataaaaatagtatcaacaatcaactaatgtatgatataattaatagcgtatctataattctagctaatgagagatatagaagcgcttttaacgacgatggtatatacatccgtagaaatatgattaacaagttgtacggatacgcatctctaactactattggcacgatcgctggaggtgtttgttattatctgttgatgcatctagttagtttgtataaataattatttcaatatactagttaaaattttaagattttaaatgtataaaaaactaataacgtttttatttgtaataggtgcattagcatcctattcgaataatgagtacactccgtttaataaactgagtgtaaaactctatatagatggagtagataatatagaaaattcatatactgatgataataatgaattggtgttaaattttaaagagtacacaatttctattattacagagtcatgcgacgtcggatttgattccatagatatagatgttataaacgactataaaattattgatatgtataccattgactcgtctactattcaacgcagaggtcacacgtgtagaatatctaccaaattatcatgccattatgataagtacccttatattcacaaatatgatggtgatgagcaacaatattctattactgcagagggaaaatgctataaaggaataaaatatgaaataagtatgatcaacgatgatactctattgagaaaacatactcttaaaattggatctacttatatatttgatcgtcatggacatagtaatacatattattcaaaatatgatttttaaaaatttaaaatatattatcacttcagtgacagtagtcaaataacaaacaacaccatgagatatattataattctcgcagttttgttcattaatagtatacacgctaaaataactagttataagtttgaatccgtcaattttgattccaaaattgaatggactggggatggtctatacaatatatcccttaaaaattatggcatcaagacgtggcaaacaatgtatacaaatgtaccagaaggaacatacgacatatccgcatttccaaagaatgatttcgtatctttctgggttaaatttgaacaaggcgattataaagtggaagagtattgtacgggactatgcgtcgaagtaaaaattggaccaccgactgtaacattgactgaatacgacgaccatatcaatttgtacatcgagcatccgtatgctactagaggtagcaaaaagattcctatttacaaacgcggtgacatgtgtgatatctacttgttgtatacggctaacttcacattcggagattctaaagaaccagtaccatatgatatcgatgactacgattgcacgtctacaggttgcagcatagactttgtcacaacagaaaaagtgtgcgtgacagcacagggagccacagaagggtttctcgaaaaaattactccatggagttcgaaagtatgtctgacacctaaaaagagtgtatatacatgcgcaattagatccaaagaagatgttcccaatttcaaggacaaaatggccagagttatcaagagaaaatttaataaacagtctcaatcttatttaactaaatttctcggtagcacatcaaatgatgttaccacttttcttagcatgcttaacttgactaaatattcataactaatttttattaatgatacaaaaacgaaataaaactgcatattatacactggttaacgcccttataggctctaaccattttcaagatgaggtccctgattatagtccttctgttcccctctatcatctactccatgtctattagacgatgtgagaagactgaagaggaaacatggggattgaaaatagggttgtgtataattgccaaagatttctatcccgaaagaactgattgcagtgttcatctcccaactgcaagtgaaggattgataactgaaggcaatggattcagggatatacgaaacaccgataaattataaaaaaagcaatgtgtccgctgtttccgttaataatactattttcgtaactggcggattattcataaataactctaatagcacgatcgtggttaacaatatggaaaaacttgacatttataaagacaaacaatggtcgattatagaaatgcctatggctagggtatatcacggcatcgactcgacatttggaatgttatattttgccggaggtctatccgttaccgaacaatatggtaatttagagaaaaacaacgagatatcttgttacaatcctagaacgaataagtggtttgatatttcatatactatttataagatatccatatcatcattgtgtaaactaaataacgtcttctatgtatttagtaaggacattggatatgtggaaaagtatgatggtgcatggaagttagtacatgatcgtctccccgctataaaggcattatcaacttctccttattgattgaaaatgaaaatataaatagtttttatgtatagcagtattaccctatagttttattgcttactactaacatggatacagatgttacaaatgtagaagatatcataaatgaaatagatagagagaaagaagaaatactaaaaaatgtagaaattgaaaataataaaaacattaacaagaatcatccaagtggatatattagagaagcactcgttattaatacaagtagtaatagtgattccattgataaagaagttatagaatgtatcagtcacgatgtaggaatatagatcatatctactaatttttataatcgatacaaaacataaaaaacaactcgttattacatagcaggcatggaatccttcaagtattgttttgataacgatggcaagaaatggattatcggaaatactttatattctggtaattcaatactatataaggtcagaaaaaatttcactagttcgttctacaattacgtaatgaaaatagatcacaaatcacacaagccattgttgtctgaaatacgattctatatatctgtattggatcctttgactatcgacaactggacacgggaacgtggtataaagtatttggctattccagatctgtatggaattggagaaaccgatgattatatgttcttcgttataaagaattcgggaagagtattcgccccaaaggatactgaatcagtcttcgaagcatgcgtcactatgataaacacgttagagtttatacactctcgaggatttacccatggaaaaatagaaccgaggaatatactgattagaaataaacgtctttcactaattgactattctagaactaacaaactatacaagagtggaaactcacatatagattacaacgaggacatgataacttcaggaaatatcaattatatgtgtgtagacaatcatcttggagcaacagtttcaaaacgaggagatttagaaatgttgggatattgcatgatagaatggttcggtggcaaacttccatggaaaaacgaaagtagtataaaagtaataaaacaaaaaaaagaatataaaaaatttatagctactttctttgaggactgttttcctgaaggaaatgaacctctggaattagttagatatatagaattagtatacacgttagattattctcaaactcctaattatgacagactacgtaaactgtttatacaagattgaaattatattctttttttatagagtgtggtagtgttacggatatctaatattaatattagactatctctatcgcgctacacgaccaatatcgattactatggatatcttcagggaaatcgcatcttctatgaaaggagagaatgtattcatttctccagcgtcaatctcgtcagtattgacaatactgtattatggagctaatggatccactgctgaacagctatcaaaatatgtagaaacggaggagaacacggataaggttagcgctcagaatatctcattcaaatccatgaataaagtatatgggcgatattctgccgtgtttaaagattcctttttgagaaaaattggcgataagtttcaaactgttgacttcactgattgtcgcactatagatgcaatcaacaagtgtgtagatatctttactgaggggaaaatcaatccactattggatgaaccattgtctcctgatacctgtctcctagcaattagtgccgtatactttaaagcaaaatggttgatgccattcgaaaaggaatttaccagtgattatcccttttacgtatctccgacggaaatggtagatgtaagtatgatgtctatgtacggcaaggcatttaatcacgcatctgtaaaggaatcattcggcaacttttcaatcatagaactgccatatgttggagatactagtatgatggtcattcttccagacaagattgatggattagaatccatagaacaaaatctaacagatacaaattttaagaaatggtgtaactctctggaagctacgtttatcgatgttcacattcccaagtttaaggtaacaggttcgtataatcttgtggatactctagtaaagtcaggactgacagaggtgttcggttcaactggagattatagcaatatgtgtaattcagatgtgagtgtcgacgctatgattcacaaaacgtatatagatgtcaatgaagagtatacagaagcagctgcagcaacttgtgcactggtgtcagactgtgcatcaacaattacaaatgagttctgtgtagatcatccgttcatctatgtgattaggcatgttgatggaaaaattcttttcgttggtagatattgctctccgacaactaattgttaaccattttttttaaaaaaatagaaaaaacatgtggtattagtgcaggtcgttgttcttccaattgcaattggtaagatgacggccaactttagtacccacgtcttttcaccacagcactgtggatgtgacagactgaccagtattgatgacgtcagacaatgtttgactgaatatatttattggtcgtcctatgcataccgcaacaggcaatgcgctggacagttgtattccacactcctctcttttagagatgatgcggaatcagtgttcatcgacattcgcgagctggtaaaaaatatgccgtgggatgatgtcaaagattgtacagaaatcatccgttgttatataccggatgagcaaaaaaccatcagagagatttcggccatcatcggactttgtgcatatgctgctacttactggggaggtgaagaccatcccactagtaacagtctgaacgcattgtttgtgatgcttgagatgctcaattacgtggattataacatcatattccggcgtatgaattgatgagttgtacatcttgacattttctttcttctcttctccctttcttctcttctcccttcctccctcttctccctttcccagaaacaaacttttttacccactataaaataaaatgagtatactacctattatatttcttcctatatttttttattcttcattcgttcagacttttaacgcgcctgaatgtatcgacaaagggcaatattttgcatcattcatggagttagaaaacgagccagtaatcttaccatgtcctcaaataaatacgctatcatccggatataatatattagatattttatgggaaaaacgaggagcggataatgatagaattataccgatagataatggtagcaatatgctaattctgaacccgacacaatcagactctggtatttatatatgcattaccacgaacgaaacctactgtgacatgatgtcgttaaatttgacaatcgtgtctgtctcagaatcaaatatagatcttatctcgtatccacaaatagtaaatgagagatctactggcgaaatggtatgtcccaatattaatgcatttattgctagtaacgtaaacgcagatattatatggagcggacatcgacgccttagaaataagagacttaaacaacggacacctggaattattaccatagaagatgttagaaaaaatgatgctggttattatacatgtgttttagaatatatatacagaggtaaaacatataacgtaaccagaattgtaaaattagaggtacgggataaaataataccttctactatgcaattaccagatggcattgtaacttcaataggtagtaatttgactattgcgtgtagagtatcgttgagacctcccacaacggatgcagacgtcttttggataagtaatggtatgtattacgaagaagatgatggggacggagacggtagaataagtgtagcaaataaaatctatatgaccgataagagacgtgttattacatcccggttaaacattaatcctgtcaaggaagaagatgctacaacgtttacgtgtatggcgtttactattcctagcatcagcaaaacagttactgttagtataacgtgaatgtatgttgttacatttccatgtcaattgagtttataagaatttttatacattatcttccaacaaacaattgacgaacgtattgctatgattaactcccacgatactatgcatattattaatcattaacttgcagactatacctagtgctattttgacatactcatgttcttgtgtaattgcggtatctatattattaaagtacgtaaatctagctatagttttattatttaattttagataatataccgtctccttatttttaaaaattgccacatcctttattaaatcatgaatgggaatttctatgtcatcgttagtatattgtgaacaacaagagcagatatctataggaaagggtggaatgcgatacattgatctatgtagttttaaaacacacgcgaactttgaagaatttatataaatcattccatcgatacatccttctatgttgacatgtatatatccaggaattcttttattaatgtcaggaaatgtataaactaaaacattgcccgaaagcggtgcctctatctgcgttatatccgttcttaacttacaaaatgtaaccaatacctttgcatgacttgttttgttcggcaacgttagtttaaacttgacgaatggattaattacaatagcatgatccgcgcatctattaagtttttttactttaacgcccttgtatgtttttacagagactttatctaaatttctagtacttgtatgtgttataaatataacgggatatagaactgaatcacctaccttagatacccaattacattttatcagatccagataataaacaaattttgtcgccctaactaattctatattgttatatattttacaattggttatgatatcatgtaataacttggagtctaacgcgcatcgtcgtacgtttatacaattgtgatttagtgtagtatatctacacatgtatttttccgcactatagtattctggactagtgataaaactatcgttatatctgtcttcaatgaactcatcgagatattgctctctgtcatattcatacacctgcataaactttctagacatcttacaatccgtgttattttaggatcatatttacatatttacgggtatatcaaagatgttagattagttaatgggaatcgtctataataatgaatattaaacaattatatgaggacttttaccacaaagcatcataaaaatgagtcgtcgtctgatttatgttttaaatatcaaccgcaaatcaactcataaaatacaagagaatgaaatatatacatattttagtcattgcaatatagaccatacttctacagaacttgattttgtagttaaaaactatgatctaaacagacgacaacatgtaactgggtatactgcactacactgctatttgtataataattactttacaaacgatgtactgaagatattattaaatcatgacgtaaatgtaacgatgaaaaccagtagcggacgtatgcctgtttatatattgcttactagatgttgcaatatttcacatgatgtagtgatagatatgatagacaaagataaaaaccacttattacatagagactattccaacctattactagagtatataaaatctcgttacatgttattaaaggaagaggatatcgatgagaacatagtatccactttattagataagggaatcgatcctaactttaaacaagacggatatacagcgttacattattattatttgtgtctcgcacacgtttataaaccaggtgagtgtagaaaaccgataacgataaaaaaggccaagcgaattatttctttgtttatacaacatggagctaatctaaacgcgttagataattgtggtaatacaccattccatttgtatcttagtattgaaatgtgtaataatattcatatgactaaaatgctgttgacttttaatccgaatttcaaaatatgtaataatcatggattaacgcctatactatgttatataacttccgactacatacaacacgatattcttgttatgttaatacatcactatgaaacaaatgttggagaaatgccgatagatgagcgtcgtatgatcgtattcgagtttatcaaaacatattctacacgtccggcagattcgataacttatttgatgaataggtttaaaaatataaatatttatacccgctatgaaggaaagacattattacacgtagcatgtgaatataataatacacacgtaatagattatcttatacgtatcaacggagatataaatgcgttaaccgacaataacaaacacgctacacaactcattatagataacaaagaaaattccccgtataccatcgattgtttactgtatatacttagatatattgtagataagaatgtgataagatcgttggtggatcaacttccatctctacctatcttcgatataaaatcatttgagaaattcatatcctactgtatacttttagatgacacattttacgataggcacgttaagaatcgcgattctaaaacgtatcgatacgcattttcaaaatacatgtcgtttgataaatacgatggtataataactaaatgtcacgacgaaacaatgttactcaaactgtccactgttctagacactacactatatgcagttttaagatgccataattcgaaaaagttaagaagatacctcaacgagttaaaaaaatataataacgataagtcctttaaaatatattctaatattatgaatgagagataccttaatgtatattataaagatatgtacgtgtcaaaggtatatgataaactatttcctgttttcacagataaaaattgtctactaacattactaccttcagaaattatatacgaaatattatacatgctgacaattaacgatctttataatatatcgtatccacctaccaaagtatagttgtatttttctcatgcgatgtgtgtaaaaaaactgatattatataaatattttagtgccgtataataaagatgacgatgaaaatgatggtacatatatatttcgtatcattattgttattgctattccacagttacgccatagacatcgaaaatgaaatcacagaattcttcaataaaatgagagatactctaccagctaaagactctaaatggttgaatccagcatgtatgttcggaggcacaatgaatgatatagccgctctaggagagccattcagcgcaaagtgtcctcctattgaagacagtcttttatcgcacagatataaagactatgtggttaaatgggagaggctagaaaagaatagacggcgacaggtttctaataaacgtgttaaacatggtgatttatggatagccaactatacatctaaattcagtaaccgtaggtatttgtgtaccgtaactacaaagaatggtgactgtgttcagggtatagttagatctcatattaaaaaacctccttcatgcattccaaaaacatatgaactaggtactcatgataagtatggcatagacttatactgtggaattctttacgcaaaacattataataatataacttggtataaagataataaggaaattaatatcgacgacattaagtattcacaaacgggaaagaaattaattattcataatccagagttagaagatagtggaagatacaactgttacgttcattacgacgacgttagaatcaagaatgatatcgtagtatcaagatgtaaaatacttacggttataccgtcgcaagaccacaggtttaaactaatactagatccaaaaatcaacgtaacgataggagaacctgccaatataacatgcactgctgtgtcaacgtcattattgattgacgatgtactgattgaatgggaaaatccatccggatggcttataggattcgattttgatgtatactctgttttaactagtagaggcggtattaccgaggcgaccttgtactttgaaaatgttactgaagaatatataggtaatacatataaatgtcgtggacacaactattattttgaaaaaacccttacaactacagtagtattggagtaaatacacaatgcatttttatatacattactgaataattattattattatttatatcgtatttgtgctataacgcgactatctaggtatttgtatctcactgatagagaacatataaatatagactctattaaacagttgtgtaaaatatcaaatcctaatagatgtggatgtacggctttacatgagtacttttataattatagatcagtcaacggaaaatacaagtatagatacaacggttactatcaatattatttatctagcgattatgaaaattataatgaatattattatgatgattatgatagaactggtatgaacagtgagagtgataatatatcaatcaaaacagaatatgaattctatgatgaaacacaagatcaaagtacacaactagtaggttacgacattaaactcaaaaccaatgaggatgattttatggctatgatagatcagtgggtgtccatgattatatagatgaatcaattaataaagtagtatatggaagagagtctcacgtaagatggcgggatatatggcaagaacataatgatggcgtatacagtataggaaaggagtgcatagataatatatacgaagacaaccataccgtagacgaattctacaagatagacagcgtatcagatgtagatgacgcggaacacatatctccgataactaatgatgtatctacacaaacatgggaaaagaaatcagagttagatagatacatggaaatgtatcctcgtcatagatatagtaagcattctgtctttaagggattttctgacaaagttagaaaaaatgatttagacatgaatgtggtaaaagaattactttctaacggtgcatctctaacaattaaggatagcagtaataaggatccaataaccgtttattttcgaagaacgataatgaatttagaaatgattgatattattaacaaacatacaactattgatgaacgaaagtatatagtacactcctatctaaaaaattataaaaatttcgattatccatttttcaggaagttagttttgactaataaacattgtctcaacaattattataatataagcgacagcaaatatggaacaccgctacatatattggcgtctaataaaaaattaataactcctaattacatgaagttattagtgtataacggaaatgatataaacgcacgaggtgaagatacacaaatgcgaactccattacacaaatatttgtgtaaatttgtatatcataatattgaatatggtatccgatactataatgaaaagattatagacgcatttatagagttaggagccgatctaactattccaaataacgatggaatgataccagtagtttactgtatacactcaaatgcagaatatggttataacaatattactaacataaagataatacgtaaactacttaatcttagtagacgtgcgtcacataatctatttagagatcgagtcatgcacgattatataagtaatacatatattgatcttgagtgtttagatattattagatcgttggatggattcgatatcaatggttactttgaaggacgtacaccacttcattgcgctatacaacataacttcactcagattgctaagtacttattagatcgaggagctgatatagtcgtacccaacacattgattatacatcagtacatacagtaaatagcatagatatggaggaggatacaaatatttcaaataaagttataaggtacaacactgtcaataatatatggaagacattacctaacttctggactggaactataaatccaggcgtggtctcgcataaagatgatatatatgttgtatgcgacatcaaagatgaaaaaaatgttaagacttgtatatttagatataacacgaatacgtataacggatgggaattggttacgacgacagaaagcagattatcagctctgcatactattcttcatgacaataccataatgatgttacattgttatgaatcgtatatgttacaagatacatttaatgtgtacactcgcgaatggaatcatatgtgtcatcaacattcgaatagttatatcatgtacaatatactacccatctactaaatataatagaataaaataaatgagtatgatcattttagataacgattgattttatcattaccgcttcattcttatattctttgcttacggaacctatatttagaaacatctactaacgattttttatgcttgcattattaatggtatgtaatatgattgattgtgtacgcaataccaatttgttaagtatgaatacggggtacaaacataaactgaaatttaacattatttatttatgatatatatcgttatcgttattgtttggtctataccatggatatctttaaagaactaatcttaaaacaccctgatgaaaatgttttgatttctccagtttctattttatctactttatctattctaaatcatggagcagctggttctacagctgaacaactatcaaaatatatagagaatatgaatgagaatacacccgatgataagaaggatgacaataatgacatggacgtagatattccgtattgtgcgacactagctaccgcaaataaaatatacggtagcgatagtatcgagttccacgcctccttcctacaaaaaataaaagacgattttcaaactgtaaactttaataatgctaaccaaacaaaggaactaatcaacgaatgggttaagacgatgacaaatggtaaaattaattccttattgactagtccgctatccattaatactcgtatgacagttgttagcgccgtccattttaaagcaatgtggaaatatccattttctaaacatcttacatatacagacaagttttatatttctaagaatatagttaccagtgttgatatgatggtgggtaccgagaataacttgcaatatgtacatattaatgaattattcggaggattctctattatcgatattccatacgagggaaactctagtatggtaattatactaccggacgacatagaaggtatatataacatagaaaaaaatataacagatgaaaaatttaaaaaatggtgtggtatgttatctactaaaagtatagacttgtatatgccaaagtttaaagtggaaatgacagaaccgtataatctggtaccgattttagaaaatttaggacttactaatatattcggatattatgcagattttagcaagatgtgtaatgaaactatcactgtagaaaaatttctacatacgacgtttatagatgttaatgaggagtatacagaagcatcggccgttacaggagtatttatgactaacttttcgatggtatatcgtacgaaggtctacataaaccatccattcatgtacatgattaaagacaacacaggacgtatactttttatagggaaatactgctatccgcaataaatataaacaaatagacttttatcacgtttatctatgtctaaatattacaaatagtaatagtataaactaaagctgataatacttaaaaaaataataatatcatttacaattaatagtataaactaaaaattaaacaaatcgttattataagtaatatcaaaatgatgatatacggattaatagcgtgtcttatattcgtgacttcatccatcgctagtccactttatattcccgttattccacccattacggaagataaatcgttcaatagtgtagaggtattagtttccttgtttagagatgaccaaaaagactatacggtaacttctcagttcaataactacactatcgataccaaagactggactatcggcgtactatccacacctgatggtttggatataccattgactaatataacttattggtcacggtttactataggtcgtgcattgttcaaatcagagtctgaggatattttccaaaagaaaatgagtattctaggtgtttctatagaatgtaagaagtcgtcgacattacttacttttttgaccgtgcgtaaaatgactcgagtatttaataaatttccagatatggcttattatcgaggagactgtttaaaagccgtttatgtaacaatgacttataaaaatactaaaactggagagactgattacacgtacctctctaatggggggttgcctgcatactatcgtaatggggtcgatggttgattattgattagtatattccttattcacacaaaaagaacatttttataaacatgaaaccactgtctaaatgtaattatgatcttgatttatagatgaagatcagcctttagaggattttaaccagtatgtttaatatgaaaaaaataaacataacatattttgagattaagcgctattgtgcttaattattttgctctataaactgaatatatagccacaattattgacgggcttgtttatgaccggcaatcatgaatttacagaaattatctctggctatatatcttactgcgacatgttcgtggtgttatgaaacatgcataagaaaaactgcgttgtatcatgacattcaattggagcatgtagaagacaataaagatagtgtagcgtcgctaccgtacaagtagtcaatcaaagagaacgtagtagattgttggctacatttaattggacagatatagctgagggtgttagaaatgagttcattaaaatatgtgatatcaacggaacatatttatataattatactattgctgttagtataattattgattccacggaagaactaccaacagttactccaattacaacaacatatgaaccttctacatataattatactatcgatgatagcactgttattactactgaagaactacaagtgactcctcatatggatctccatcgatgatacatgtattaaaatactttccgaataagtcttttaaatattgtattaattatgaaaaactatgctatgcgagtatgatgcaaagatgtttaatgatacgatactagattttatctctagcgagagatgtcgttagaatcatttatcataactacgtttaataataattcatcaacgaatatcgataacatgtgtcatttatacgttaaagtctgtccgtcttctctattgtttagactgtttgtagaatgctgtgatataaacaaactagtagaaggtacgactccgttacactgttatctaatgaatgaaggatttgaatcatctgttttaaaaaacctattaaaggagtatgtcatgaatacgtttaatgttcatgacatccattacacaaatatttaactcatgatgaagttgagaatgatatgctttctgatagtatagatagctttagctaatataaaaatatattaatccactatatattctagacttgatttaaaaccgataaactactactacgtactgtataagttgttaaaaaaaggagcagaccctaattatgtagatgatagaggtaatacttttcttcattacttctgcatctatatgtccacttatgagaaaacgtcatttaataagatgcatcgtgaaaagaaatttattaaagagttggtaaaatatgaaaccgaaagtaaataatataggaaatacacctctacataactacgtatctcaatatgatatcactctcattcctcatccacaacccattaaaaaaatggaaattaaagccctctattagcataaacggctacaggtctacctttacaatggcctctccttgtgcccagttcagaccctgtcattgccacgctactaaggactccctgaataccgtggccgacgtcagacattgtctgactgaatacatcctgtgggtttctcatagatggacccatagagaaagcgcagggtctctctacaggcttctcatctctttcagaactgatgcaacggagctctttggtggtgagttgaaggattcacttccgtgggacaatatcgacaattgcgtggagatcattaaatgtttcatcagaaatgactccatgaaaaccgccgaagaacttcgtgcaatcattggactttgtactcaatcagctatcgtctctggaagagtcttcaacgataagtatatcgacatactacttatgctgcgaaagattctgaacgagaacgactatctcaccctcttggatcatatccgcactgctaaatactaaatctccttcatgctctctcactacactttttatcatcttatgaggaatgattgccttcatcatttttcgtgaaataggaataattagcaccagaatagctatggattgcacatgtattctatgtcgtctactggatgaagatgtgacgtacaaaaaaataaaactagaaattgaaacgtgtcacaacttatcaaaacatatagatagacgaggaaacaatgcgctacattgttacgtcttcaataaatgcgatacagacattaagattgttcgactgttactctctcgcggagtcgagagactttgtagaaacaacgaaggattaactccgctaggagcatacagtaagcatagatacgtaaaatctcaaattgtgcatctactgatatccagctattcgaattcctctaacgaactcaagtcgaatataaatgatttcgatctgtattcgtatatgtcttcggataatatcgacttacgtctgctaaaatacctaattgtggataaacggatacgtccgtccaagaatacgaattatgcaatcaatggtctcggattggtggatatatacgtaacgacgcctaatccgagaccagaagtattgctatggcttcttaaatcagaatgttacagcaccggttacgtatttcgtacctgtatgtacgacagtgatatgtgtaagaactctcttcattactatatatcgtctcatagagaatctcaatctctatccaaggatgtaattaaatgtttgatcaataacaatgtttccatccatggcagagacgaaggaggatctttacccatccaatactactggtcttgctcaaccatagatatagagattgttaaattattaataaaggatgtggacacgtgtagagtatacgacgtcagccctatattagaggcggattatctaaacaagcgatttagagtaaccccatataatgtagacatggaaatcgttaatcttcttattgagagacgtcatactcttgtcgacgtaatgcgtagtattacttcttacgattccagagactataaccactacatcatcgataacattctaaagagatttagacaacaggatgaatccatcgtacaagccatgttgataaactacttacattacggcgatatggtcgttcgatgcatgttagataacggacaacaactatcctctgcacgactactttgttaataataatctcgtcgatgtaaacgtcgtaaggtttatcgtggaaaataatggacacatggctgtaaatcacgtatcgaacaatggccgtctatgtatgtacggtctgatattatcgagatttaataattgcgggtatcactgttatgaaaccatactaatagatgtatttgatatactaagcaagtacatggataatatagatatgatcgataatgagaataaaactctactatattacgcggtcgatgtcaataatatacaatttgcaaagcggttattggaatatggagcgagtgttacaacatcacgctcgataatcaatacggccatccagaaaagtagttacagaagagaaaacaaaacgaggatagttgatttattacttagctaccatcccactctagagactatgattgacgcatttaatagagatatacgctatctatatcctgaaccattattcgcctgtatcagatacgccttaatcctagatgatgattttccttctaaagtaagtatgatatctccggtcgtcataaggaactaaagcgctatagagtagacattaatagaatgaagaatgcctacatatcaggcgtctccatgtttgatatattatttaaacgaagcaaacgccacagattgagatacgcaaagaatccgacatcaaatggtacaaaaaagaactaacgtccatcattacagaaactgtaaagaacaatgagaggatcgactccatagtggacaacattaatacagacgataacttgatttcgaaattacccatggagatactttattactccattaaataatttatcatggagcgataatgtcctgtttcatttgtttccatgacatattacaaaatcgattccgtccaagatgataaaaacatttaccggcatcataaacacggagtttattttatatgtctcgcataaacattactaaaaaaatatattgttcggttttctttcacatctttaattatgaaaaagtaaatcattatgagatggacgagattgtacgcatcgttcgcgacagtatgtggtacatacctaacgtatttatggacgacggtaagaatgaaggtcacgtttctgtcaacaatgtttgtcatatgtattttacgttctttgatgtggatacatcgtctcatctgtttaagctagttattaaacactgcgatctgaataaacgaggtaactctccattacattgctatacgatgaatacacgatttaatccatctgtattaaagatattgttacaccacggcatgcgtaactttgatagcaaggatgaaaaaggacatattcctctacaccactatctgattcattcactatcaatcgataacaagatctttgatatactaacggacaccattgatgactttagtaaatcatccgatctattgctgtgttatcttagatataaattcaatgggagcttaaactattacgttctgtacaaaggatccgaccctaattgcgtcgacgaggatggactcacttctcttcattactactgtaaacacatatccacgttctacaaaagcaattattacaagttaagtcacactaagatgcgagccgagaagcgattcatctacgcgataatagattatggagcaaacattaacgcggttacacacttaccttcaacagtataccaaacatagtcctcgtgtggtgtatgctcttttatctcgaggagccgatacgaggatacgtaataatcttgattgtacacccatcatggaacgattgtgcaacaggtcatattctcataatgttactcaattggcacgaacaaaaggaagaaggacaacatctactttatctattcataaaacataatcaaggatacactctcaatatactacggtatctactagataggttcgacattcagaaagacgaatactataataccgcctttcaaaattgtaacaacaatgttgcctcatacatcggatacgacatcaaccttccgactaaagacggtattcgacttggtgtttgaaaacagaaacatcatatacaaggcggatgttgtgaatgacatcatccaccacagactgaaagtatctctacctatgattaaatcgttgttctacaagatgtcagaattctctccctacgacgattactacgtaaaaaagatactagcctactgcctattaagggacgagtcattcgcggaactacatagtaaattctgtttaaacgaggactataaaagtgtatttatgaaaaatatatcattcgataagatagattccatcatcgtgacataagtcgccttaaagagattcgaatctccgacaccgacctgtatacggtatcacagctatcttaaagccatacattcggacagacacatttcatttcccatgtacgacgatctcatagaacagtgccatctatcgatggagcataaaagtaaactcgtcgacaaagcactcaataaattagagtctaccatcggtcaatctagactatcgtatttgcctccggaaattatgcgcaatatcatctaaacagtatgttgtacggaaagaaccattacaaatattatccatgatagaaagaaaatatctatatgattggagaagtaggaaacaggaacaagacgacgattactacattattaaatcatgaagtccgtattatactcgtatatattgtttctctcatgtataataataaacggaagagatatagcaccgcatgcaccatccgatggaaagtgtaaagacaacgaatacaaacgccataatttgtgtccgggaacatacgcttccagattatgcgatagcaagactaacacacgatgtacaccctgtggttcgggtaccttcacatctcgcaataatcatttacccgcttgtctaagttgtaacggaagacgcgatcgtgtaacacgactcacaatagaatctgtgaatgctctcccggatattattgtcttctcaaaggatcatccggatgcaaggcatgtgtttcccaaacaaaatgtggaataggatacggagtatccggagacgtcatctgttctccgtgtggtctcggaacatattctcacaccgtctcttccgcagataaatgcgaacccgtacccagtaatacctttaactatatcgatgtggaaattaatctgtatcccgtcaacgacacgtcgtgtactcggacgaccactaccggtctcagtgaatccatctcaacgtcggaactaactattactatgaatcataaagactgtaatcccgtatttcgtgaggaatacttctctgtccttaataaggtagcaacttcaggtttctttacaggagaaaggtgtgcactctgaatttcgagattaaatgcaataacaaagattcttcctccaaacagttaacgaaagcaaagaatgatgacggtatcatgccgcattcggagacagtaactctagtgggcgactgtatatctagcgtcgacatctatatactatatagtaataccaatactcaagactacgaaactgatacaatctcttatcatgtgggtaatgttctcgatgtcgatagccatatgcccggtagttgcgatatacataaactgatcactaattccaaacccacccgctttttatagtaagtttttcacccataaataataaatacaataattaatttctcgtaaaagtagaaaatatattctaatttattgcatggtaaggaagtagaatcataaagaacagtactcaatcaatagcaattatgaaacaatatatcgtcctggcatgcatgtgcctgccagtcttcagcaatcatcctcatcctcatcctcgtgtacggaagaagaaaacaaacatcatatgggaatcgatgttattatcaaagtcacaaagcaagaccaaacaccgaccaatgataagatttgccaatccgtaacggaaattacagagtccgagtcagatccaaatcccgaggtggaatcagaagatgattccacatcagtcgaggatgtagatcctcctaccacttattactccatcatcggtggaggtctgagaatgaactttggattcaccaaatgtcctcagattaaatccatctcagaatccgctgatggaaacacagtgaatgctagattgtccagcgtgtccccaggacaaggtaaggactctcccgcgatcactcatgaagaagctcttgctatgatcaaagactgtgaggtgtctatcgacatcagatgtagcgaagaagagaaagacagcgacatcaagacccatccagtactcgggtctaacatctctcataagaaagtgagttacgaagatatcatcggttcaacgatcgtcgatacaaaatgtgtcaagaatctagagtttagcgttcgtatcggagacatgtgcaaggaatcatctgaacttgaggtcaaggatggattcaagtatgtcgacggatcggcatctgaaggtgcaaccgatgatacttcactcatcgattcaacaaaactcaaagcgtgtgtctgaatcgataactctattcatctgaaattggatgagtagggttaatcgaacgattcaggcacaccacgaattaaaaaagtgtaccggacactatattccggtttgcaaaacaaaaatgttcttaactacattcacaaaaagttacctctcgcgacttcttctttttctgtctcaatagtgtgatacgattatgacactattcctattcctattcctatttcctttcagggtatcacaaaaatattaaacctctttctgatggtctcataaaaaaagttttacaaaaatatttttattctctttctctctttgatggtctcataaaaaaagttttacaaaaatatttttattctctttctctctttgat

SEQ ID NO: 11 - DNA, 195485 bp, Vaccinia virus
  source 1..195485: mol_type = other DNA
  misc_feature 1..195485: note = VIR49
atcaaagagagaaagagaataaaaatatttttgtaaaactttttttatgagaccatcaaagagagaaagagaataaaaatatttttgtaaaactttttttatgagaccatcagaaagaggtttaatatttttgtgataccctgaaaggaaataggaataggaataggaatagtgtcataatcgtatcacactattgagacagaaaaagaagaagtcgcgagaggtaactttttgtgaatgtagttaagaacatttttgttttgcaaaccggaatatagtgtccggtacacttttttaattcgtggtgtgcctgaatcgttcgattaaccctactcatccaatttcagatgaatagagttatcgattcagacacacgctttgagttttgttgaatcgatgagtgaagtatcatcggttgcaccttcagatgccgatccgtcgacatacttgaatccatccttgacctcaagttcagatgattccttgcacatgtctccgatacgaacgctaaactctagattcttgacacattttgtatcgacgatcgttgaaccgatgatatcttcgtaactcactttcttatgagagatgttagacccgagtactggatgggtcttgatgtcgctgtctttctcttcttcgctacatctgatgtcgatagacacctcacagtctttgatcatagcaagagcttcttcatgagtgatcgcgggagagtccttaccttgtcctggggacacgctggacaatctagcattcactgtgtttccatcagcggattctgagatggatttaatctgaggacatttggtgaatccaaagttcattctcagacctccaccgatgatggagtaataagtggtaggaggatctacatcctcgactgatgtggaatcatcttctgattccacctcgggatttggatctgactcggactctgtaatttccgttacggattggcaaatcttatcattggtcggtgtttggtcttgctttgtgactttgataataacatcgattcccatatgatgtttgttttcttcttccgtacacgaggatgaggatgaggatgattgctgaagactggcaggcacatgcatgccaggacgatatattgtttcataattgctattgattgagtactgttctttatgattctacttccttaccatgcaataaattagaatatattttctacttttacgagaaattaattattgtatttattatttatgggtgaaaaacttactataaaaagcgggtgggtttggaattagtgatcagtttatgtatatcgcaactaccgggcatatggctatcgacatcgagaacattacccacatgataagagattgtatcagtttcgtagtcttgagtattggtattactatatagtatatagatgtcgacgctagatatacagtcgcccactagagttactgtctccgaatgcggcatgataccgtcatcattctttgctttcgttaactgtttggaggaagaatctttgttattgcatttaatctcgaaattcagagtgcacacctttctcctgtaaagaaacctgaagttgctaccttattaaggacagagaagtattcctcacgaaatacgggattacagtctttatgattcatagtaatagttagttccgacgttgagatggattcactgagaccggtagtggtcgtccgagtacacgacgtgtcgttgacgggatacagattaatttccacatcgatatagttaaaggtattactgggtacgggttcgcatttatctgcggaagagacggtgtgagaatatgttccgagaccacacggagaacagatgacgtctccggatactccgtatcctattccacattttgtttgggaaacacatgccttgcatccggatgatcctttgagaagacaataatatccgggagagcattcacagattctattgtgagtcgtgttacacgatcgcgtcttccgttacaacttagacaagcgggtaaatgattattgcgagatgtgaaggtacccgaaccacagggtgtacatcgtgtgttagtcttgctatcgcataatctggaagcgtatgttcccggacacaaattatggcgtttgtattcgttgtctttacactttccatcggatggtgcatgcggtgctatatctcttccgtttattattatacatgagagaaacaatatatacgagtataatacggacttcatgatttaataatgtagtaatcgtcgtcttgttcctgtttcctacttctccaatcatatagatattttctttctatcatggataatatttgtaatggttctttccgtacaacatactgtttagatgatattgcgcataatttccggaggcaaatacgatagtctagattgaccgatggtagactctaatttattgagtgctttgtcgacgagtttacttttatgctccatcgatagatggcactgttctatgagatcgtcgtacatgggaaatgaaatgtgtctgtccgaatgtatggctttaagatagctgtgataccgtatacaggtcggtgtcggagattcgaatctctttaaggcgacttatgtcacgatgatggaatctatcttatcgaatgatatatttttcataaatacacttttatagtcctcgtttaaacagaatttactatgtagttccgcgaatgactcgtcccttaataggcagtaggctagtatcttttttacgtagtaatcgtcgtagggagagaattctgacatcttgtagaacaacgatttaatcataggtagagatactttcagtctgtggtggatgatgtcattcacaacatccgccttgtatatgatgtttctgttttcaaacaccaagtcgaataccgtctttagtcggaaggttgatgtcgtatccgatgtatgaggcaacattgttgttacaattttgaaaggcggtattatagtattcgtctttctgaatgtcgaacctatctagtagataccgtagtatattgagagtgtatccttgattatgttttatgaatagataaagtagatgttgtccttcttccttttgttcgtgccaattgagtaacattatgagaatatgacctgttgcacaatcgttccatgatgggtgtacaatcaagattattacgtatcctcgtatcggctcctcgagataaaagagcatacaccacacgaggactatgtttggtatactgttgaaggtaagtgtgtaaccgcgttaatgtttgctccataatctattatcgcgtagatgaatcgcttctcggctcgcatcttagtgtgacttaacttgtaataattgcttttgtagaacgtggatatgtgtttacagtagtaatgaagagaagtgagtccatcctcgtcgacgcaattagggtcggatcctttgtacagaacgtaatagtttaagctcccattgaatttatatctaagataacacagcaatagatcggatgatttactaaagtcatcaatggtgtccgttagtatatcaaagatcttgttatcgattgatagtgaatgaatcagatagtggtgtagaggaatatgtcctttttcatccttgctatcaaagttacgcatgccgtggtgtaacaatatctttaatacagatggattaaatcgtgtattcatcgtatagcaatgtaatggagagttacctcgtttattcagatcgcagtgtttaataactagcttaaacagatgagacgatgtatccacatcaaagaacgtaaaatacatatgacaaacattgttgacagaaacgtgaccttcattcttaccgtcgtccataaatacgttaggtatgtaccacatactgtcgcgaacgatgcgtacaatctcgtccatctcataatgatttactttttcataattaaagatgtgaaagaaaaccgaacaatatatttttttagtaatgtttatgcgagacatataaaataaactccgtgtttatgatgccggtaaatgtttttatcatcttggacggaatcgattttgtaatatgtcatggaaacaaatgaaacaggacattatcgctccatgataaattatttaatggagtaataaagtatctccatgggtaatttcgaaatcaagttatcgtctgtattaatgttgtccactatggagtcgatcctctcattgttctttacagtttctgtaatgatggacgttagttcttttttgtaccatttgatgtcggattctttgcgtatctcaatctgtggcgtttgcttcgtttaaataatatatcaaacatggagacgcctgatatgtaggcattcttcattctattaatgtctactctatagcgctttagttccttatgacgaccggagatatcatacttactttagaaggaaaatcatcatctaggattaaggcgtatctgatacaggcgaataatggttcaggatatagatagcgtatatctctattaaatgcgtcaatcatagtctctagagtgggatggtagctaagtaataaatcaactatcctcgttttgttttctcttctgtaactacttttctggatggccgtattgattatcgagcgtgatgttgtaacactcgctccatattccaataaccgctttgcaaattgtatattattgacatcgaccgcgtaatatagtagagttttattctcattatcgatcatatctatattatccatgtacttgcttagtatatcaaatacatctattagtatggtttcataacagtgatacccgcaattattaaatctcgataatatcagaccgtacatacatagacggccattgttcgatacgtgatttacagccatgtgtccattattttccacgataaaccttacgacgtttacatcgacgagattattattaacaaagtagtcgtgcagaggatagttgttgtccgttatctaacatgcatcgaacgaccatatcgccgtaatgtaagtagtttatcaacatggcttgtacgatggattcatcctgttgtctaaatctctttagaatgttatcgatgatgtagtggttatagtctctggaatcgtaagaagtaatactacgcattacgtcgacaagagtatgacgtctctcaataagaagattaacgatttccatgtctacattatatggggttactctaaatcgcttgtttagataatccgcctctaatatagggctgacgtcgtatactctacacgtgtccacatcctttattaataatttaacaatctctatatctatggttgagcaagaccagtagtattggatgggtaaagatcctccttcgtctctgccatggatggaaacattgttattgatcaaacatttaattacatccttggatagagattgagattctctatgagacgatatatagtaatgaagagagttcttacacatatcactgtcgtacatacaggtacgaaatacgtaaccggtgctgtaacattctgatttaagaagccatagcaatacttctggtctcggattaggcgtcgttacgtatatatccaccaatccgagaccattgattgcataattcgtattcttggacggacgtatccgtttatccacaattaggtattttagcagacgtaagtcgatattatccgaagacatatacgaatacagatcgaaatcatttatattcgacttgagttcgttagaggaattcgaatagctggatatcagtagatgcacaatttgagattttacgtatctatgcttactgtatgctcctagcggagttaatccttcgttgtttctacaaagtctctcgactccgcgagagagtaacagtcgaacaatcttaatgtctgtatcgcatttattgaagacgtaacaatgtagcgcattgtttcctcgtctatctatatgttttgataagttgtgacacgtttcaatttctagttttatttttttgtacgtcacatcttcatccagtagacgacatagaatacatgtgcaatccatagctattctggtgctaattattcctatttcacgaaaaatgatgaaggcaatcattcctcataagatgataaaaagtgtagtgagagagcatgaaggagatttagtatttagcagtgcggatatgatccaagagggtgagatagtcgttctcgttcagaatctttcgcagcataagtagtatgtcgatatacttatcgttgaagactcttccagagacgatagctgattgagtacaaagtccaatgattgcacgaagttcttcggcggttttcatggagtcatttctgatgaaacatttaatgatctccacgcaattgtcgatattgtcccacggaagtgaatccttcaactcaccaccaaagagctccgttgcatcagttctgaaagagatgagaagcctgtagagagaccctgcgctttctctatgggtccatctatgagaaacccacaggatgtattcagtcagacaatgtctgacgtcggccacggtattcagggagtccttagtagcgtggcaatgacagggtctgaactgggcacaaggagaggccattgtaaaggtagacctgtagccgtttatgctaatagagggctttaatttccatttttttaatgggttgtggatgaggaatgagagtgatatcatattgagatacgtagttatgtagaggtgtatttcctatattatttactttcggtttcatattttaccaactctttaataaatttcttttcacgatgcatcttattaaatgacgttttctcataagtggacatatagatgcagaagtaatgaagaaaagtattacctctatcatctacataattagggtctgctcctttttttaacaacttatacagtacgtagtagtagtttatcggttttaaatcaagtctagaatatatagtggattaatatatttttatattagctaaagctatctatactatcagaaagcatatcattctcaacttcatcatgagttaaatatttgtgtaatggatgtcatgaacattaaacgtattcatgacatactcctttaataggttttttaaaacagatgattcaaatccttcattcattagataacagtgtaacggagtcgtaccttctactagtttgtttatatcacagcattctacaaacagtctaaacaatagagaagacggacagactttaacgtataaatgacacatgttatcgatattcgttgatgaattattattaaacgtagttatgataaatgattctaacgacatctctcgctagagataaaatctagtatcgtatcattaaacatctttgcatcatactcgcatagcatagtttttcataattaatacaatatttaaaagacttattcggaaagtattttaatacatgtatcatcgatggagatccatatgaggagtcacttgtagttcttcagtagtaataacagtgctatcatcgatagtataattatatgtagaaggttcatatgttgttgtaattggagtaactgttggtagttcttccgtggaatcaataattatactaacagcaatagtataattatataaatatgttccgttgatatcacatattttaatgaactcatttctaacaccctcagctatatctgtccaattaaatgtagccaacaatctactacgttctctttgattgactacttgtacggtagcgacgctacactatctttattgtcttctacatgctccaattgaatgtcatgatacaacgcagtttttcttatgcatgtttcataacaccacgaacatgtcgcagtaagatatatagccagagataatttctgtaaattcatgattgccggtcataaacaagcccgtcaataattgtggctatatattcagtttatagagcaaaataattaagcacaatagcgcttaatctcaaaatatgttatgtttatttttttcatattaaacatactggttaaaatcctctaaaggctgatcttcatctataaatcaagatcataattacatttagacagtggtttcatgtttataaaaatgttctttttgtgtgaataaggaatatactaatcaataatcaaccatcgaccccattacgatagtatgcaggcaaccccccattagagaggtacgtgtaatcagtctctccagttttagtatttttataagtcattgttacataaacggcttttaaacagtctcctcgataataagccatatctggaaatttattaaatactcgagtcattttacgcacggtcaaaaaagtaagtaatgtcgacgacttcttacattctatagaaacacctagaatactcattttcttttggaaaatatcctcagactctgatttgaacaatgcacgacctatagtaaaccgtgaccaataagttatattagtcaatggtatatccaaaccatcaggtgtggatagtacgccgatagtccagtctttggtatcgatagtgtagttattgaactgagaagttaccgtatagtctttttggtcatctctaaacaaggaaactaatacctctacactattgaacgatttatcttccgtaatgggtggaataacgggaatataaagtggactagcgatggatgaagtcacgaatataagacacgctattaatccgtatatcatcattttgatattacttataataacgatttgtttaatttttagtttatactattaattgtaaatgatattattatttttttaagtattatcagctttagtttatactattactatttgtaatatttagacatagataaacgtgataaaagtctatttgtttatatttattgcggatagcagtatttccctataaaaagtatacgtcctgtgttgtctttaatcatgtacatgaatggatggtttatgtagaccttcgtacgatataccatcgaaaagttagtcataaatactcctgtaacggccgatgcttctgtatactcctcattaacatctataaacgtcgtatgtagaaatttttctacagtgatagtttcattacacatcttgctaaaatctgcataatatccgaatatattagtaagtcctaaattttctaaaatcggtaccagattatacggttctgtcatttccactttaaactttggcatatacaagtctatacttttagtagataacataccacaccattttttaaatttttcatctgttatatttttttctatgttatatataccttctatgtcgtccggtagtataattaccatactagagtttccctcgtatggaatatcgataatagagaatcctccgaataattcattaatatgtacatattgcaagttattctcggtacccaccatcatatcaacactggtaactatattcttagaaatataaaacttgtctgtatatgtaagatgtttagaaaatggatatttccacattgctttaaaatggacggcgctaacaactgtcatacgagtattaatggatagcggactagtcaataaggaattaattttaccatttgtcatcgtcttaacccattcgttgattagttcctttgtttggttagcattattaaagtttacagtttgaaaatcgtcttttattttttgtaggaaggaggcgtggaactcgatactatcgctaccgtatattttatttgcggtagctagtgtcgcacaatacggaatatctacgtccatgtcattattgtcatccttcttatcatcgggtgtattctcattcatattctctatatattttgatagttgttcagctgtagaaccagctgctccatgatttagaatagataaagtagataaaatagaaactggagaaatcaaaacattttcatcagggtgttttaagattagttctttaaagatatccatggtatagaccaaacaataacgataacgatatatatcataaataaataatgttaaatttcagtttatgtttgtaccccgtattcatacttaacaaattggtattgcgtacacaatcaatcatattacataccattaataatgcaagcataaaaaatcgttagtagatgtttctaaatataggttccgtaagcaaagaatataagaatgaagcggtaatgataaaatcaatcgttatctaaaatgatcatactcatttattttattctattatattaacacatacatttttaacagcaacacattcaatattgtattgttatttttatattatttacacaattaacaatatattattagtttatattactgaattaataatataaaattcccaatcttgtcataaacacacactgagaaacagcataaacacaaaatccatcaaaaatgtcgatgaaatatctgatgttgttgttcgctgctatgataatcagatcattcgccgatagtggtaacgctatcgaaacgacattgccagaaattacaaacgctacaacagatattccagctatcagattatgcggtccagagggagatggatattgtttacacggtgactgtatccacgctagagatatcgacggtatgtattgtagatgctctcatggttatacaggcattagatgtcagcatgtagtattagtagactatcaacgttcagaaaaaccaaacactacaacgtcatatatcccatctcccggtattgtgcttgtattagtaggcattattattatgtgttgtctattatctgtttataggttcactcgaagaactaataaactacctctacaagatatggttgtgccataatttttataaatttttttatgagtatttttacaaaaaaaatgtataaagtgtatgtcttatgtatatttataaaaatgctaagtatgcgatgtatctatgttatttgtatttatctaaacaatacctctacctctagatattatacaaaaattttttatttcggcatattaaagtaaaatctagttaccttgaaaatgaatacagtgggtggttccgtatcaccagtaagaacataatagtcgaatacagtatccgattgagattttgcatacaatactagtctagaaagaaatttgtaatcattttctgtgacgggagtccatatatctgtatcatcgtctagtttatcagtgtcccatgctatatttctgttatcatcattagttaatgaaaataactctcgtgcttcagaaaagtcaaatattgtatccatacatacatctccaaaactatcgcttatacgtttatctttaacgatacctatacctagatggttatttactaacagacattttccagatctattgactataactcctatagtttccacatcaaccaagtaatgatcatctattgttatataacaataacataactcttttccatttttatcagtatgtatatctatatcaacgtcgtcgttgtagtgaatagtagtcattgatctattatatgaaacggatatgtctagaacggcaattgtcttacgtccagttaacactttcgttgatttaaagtctagagtctttgcaaacataatatccttatccgactttatatttcctgtagggtggtataattttattttgcctccacatatcggtgtttccaaatatattactagacaatattccatatagttattagttaagggtacccaattagaacacgtacgcttattatcatcatttggatcgtatttcataaaagttattgtactatcgatgtcaacacattctacattttttaatcgtctatatagtatttttctgatattttctataatatcagaattgtcttccatcggaagttgtatactatcggaatcagttacatgtttaaataattctctgatgtcattccttatacaatcaaattcattattaaacagtttaatagtctgtagacctttatcgtcgtaaatatccattgtcttattagttacgcttatttttatgtgttttacgttgctttattatattttataagaatgattgtttgacgaatcacgagaactattaagacacattattaggtatatattataaaaaagtttttgattacgatgttataagaggaaagaggacacattaacatcatacatcaattaactacattcttataacatcgtaatcaaaagaattgcaattttgatgtataacaactgtcaatgggttatggaattgtatattacatattatacggtatgttggtaacgacaaataccgatcggtaatcgtttgccggtgtaatagaattatatatatctatctattacaccggctgagtatacataataataagttgtggtagtatgatctccatatttataatttaggactttgtattcagtatttttggaatcataaaaaataaaaaaaagttttactaatttaaaatttaaaaagtatttacatttttttcactgtttagtcgcggatatggaattcgatcctgccaaaatcaatacatcatctatagatcatgtaacaatattacaatacatagatgaaccaaatgatataagactaacagtatgcattatccgaaatattaataacattacatattatatcaatatcacaaaaataaatacacatttggctaatcaatttcgggcttggaaaaaacgtatcgccggaagggactatatgactaacttatctagagatacaggaatacaacaatcaaaacttactgaaactatacgtaactgtcaaaaaaatagaaacatatatggtctatatatacactacaatttagttattaatgtggttattgattggataaccgatgtgattgttcaatcaatattaagagggttggtaaattggtacatagctaataatacctatactccaaatacacccaataatacaacaaccatttctgagttggatatcatcaaaatactaaataaatacgaggacgtgtatagagtaagtaaagaaaaagaatgtggaatttgctatgaagttgtttactcaaaacgattagaaaacgatagatactttggtttattggattcgtgtactcatatattttgcataacatgcatcaatatatggcataaaacacgaagagaaaccggtgcgtcggataattgtcctatatgtcgtacccgttttagaaacataacaatgagcaagttctataagctagttaactaataaataaaaagtttaatttgttgacgacgtatgtcgttattttttctcgtataaaagattaatttgattctaatataatctttagtattggataaatatcaattcaaattaattccattagattatatcataaataaaaatagtagcacgcactacttcagccaaatattcttttttgaaacgccatctatcgtagtgaggacacaagtgaacctataatgagcaaatttattagtatcggttacatgaaggactttacgtagagtggtgattccactatctgtggtacgaacggtttcatcttctttgatgccatcacccagatgttctataaacttggtatcctcgtccgatttcatatcctttgccaaccaatacatatagctaaactcaggcatatgttccacacatcctgaacaatgaaattctccagaagatgttacaatgtctagatttggacatttggtttcaaccgcgttaacatatgagtgaacacacccatacatgaaagcgatgagaaataggattttcatcttgccaaaatatcactagaaaaaatttatttatcaattttaaaggtataaaaaatacttattgttgctcgaatattttgtatttgatggtatacggaagattagaaatgtaggtattatcatcaactgattctatggttttatgtattctatcatgtttcactattgcgttggaaataatatcatatgcttccacatatattttattttgttttaactcataatactcacgtaattctggattattggcatatctgtgaataattttagctccatgatcagtaaatattaatgagaacatagtattaccacctaccattatttttttcatttcgttcaattcttgattgcaaagatctatataatcattatagcgttgacttatggactctggaatcttagacgatgtacagtcatctataatcatggcatatttaatacattgttttatagcatagtagttatctacgatgttagatatttctctcaatgaatcaatcacacaatctaatgtaggtttatgacataatagcattttcagcagttcaatgtttctagattcgttgatggcaatggctatacatgtatatccgttatttgatctaatgttgacatctgaaccggattctagcagtaaagatactagagattgtttattatatctaacagccttgtgaagaagtgtttctcctcgtttgtcaatcatgttaatgtctttaagataaggtaggcaaatgtttatagtactaagaattgggcaagcataagacatgtcacaaagaccctttttgtatgtataagtgtagaaattataacatccatagttggatttacataggtgtccaatcgggatctctccatcatcgagatgattgacggcatctcccccttccttttttagtagatatttcatcgtgtaagaatcaatattaatatttctaaagtatccgtgtatagcctctttatttaccacagctccatattccaacatgcattccactaaagggatatcgatatcgccgaatgtcatatactcaattagtatatgttggaggacatccgagttcattgttttcaatatcaaagagatggtttccttatcatttctccatagtggtacaatactacacattattccgtgaggctttccattctccaaaaacaatttgaccaaatctacatctttattgtatctataatcactatttagataatcagccataattcctcgagtgcaacatgttagatcgtctatatatgaataagccgtgttatctattcctttcattaacaatttaacgatgtctatatctatatgagatgacttaatataatattgaagagctgtacaatagtttttatctatagaagacggcttgattccgtgattaattagacatttaacaacttccggacgcacatatgctctcgtatccgactctgaatacagatgagagatgatatacagatgcaatacggtaccgcaatttcgtagttgataatcatcatacgcgtatccgtactcgtcctcataaagaacactgcagccattttctatgaacaaatcaataattttaggaacaggatcattgtcattacataattttctataactgaacgatggttttcacatttaacactcaagtcaaatccatgttctaccaacacctttatcaagtcaacgtctacatttttggatttcatatagctgaatatattaaagtcatttatgttgctaaatccagtggcttctagtagagccatcgctatatcctttaactttaacatgtctactatttgtgtattcttctaatggggtagctgtctccaatttttgcgtaatggattagtgccactgtctagtagtagtttgacgacctcgacattattacaatgctcattaaaaaggtatgcgtgtaaagcattattcttgaattggttcctggtatcattaggatctctgtctctcaacatctgtttaagttcatcgagagccacctcctcattttccaaatagtcaaacattttgactgaatagaagtgaatgagctactgtgaactctatacacccacacaactaatgtcattaaatattatttttttgaatgtatttataccatgtcaaaaacttgtacaattattaataaaaataatttagtgtttaaattttaccagttccagattttacacctccgttaaccccactttttacaccactggacgaccctcctccccacattccaccgccaccagatgtataagttttagatcctttattactaccatcatgtccatggataaagacactccacatgccgccactaccccctttagaagacatattaataagacttaagagttaaggacaagtttaacaataaaattaatcacgagtaccctactaccaacctacactattatatgattatagtttctatttttacagtaccttaactaaagtttctagtcacaagagcaatactaccaacctacactattatatgattatagtttctatttttataggaacgcgtacgagaaaatcaaatgtctaatttctaacggtagtgttgataaacgattatcgtcaatggatacctcctctatcatgtcgtctattttcttactttgttctattaacttattagcattatatattatttgattataaaacttatattgcttattagcccaatctgtaaatatcggattattaacatatcgtttctttgtaggtttatttaacttgtacatcactgtaagcatgtccgtaccatttattttaatttgacgcatatccgcaatttctttttcgcagtcggttataaattctatatatgatggatacatgctacatgtgtacttataatcgactaatatgaagtacttgatacatattttcagtaacgatttattattaccacctatgaataagtacctgtgatcgtctaggtaatcaactgttttcttaatacattcgatggttggtaatttactcagaataatttccaatatcttaatatataattctgctatttctggaatatatttatctgccagtataacacaaatagtaatacatgtaaacccatattttgttattatattaatgtctgcgccattatctattaaccattctactaggctgacactatgcgacttaatacaatgataaagtatactacatccatgtttatctattttgtttatatcatcaatatacggcttacaaagttttagtatcgataacacatccaactcacgcatagagaaggtagggaataatggcataatatttattaggttatcatcattgtcattatctacaactaagtttccattttttaaaatatactcgacaactttaggatctctattgccaaatttttgaaaatatttatttatatgcttaaatctatataatgtagctccttcatcaatcatacatttaataacattgatgtatactgtatgataagatacatattctaacaatagatcttgtatagaatctgtatatcttttaagaattgtggatattaggatattattacgtaaactattacacaattctaaaatataaaacgtatcacggtcgaataatagttgatcaactatataattatcgattttgtgatttttcttcctaaactgtttacgtaaatagttagatagaatattcattagttcatgaccactatagttactatcgaataacgcgtcaaatatttcccgtttaatatcgcatttgtcaagataataatagagtgtggtatgttcacgataagtataataacgcatctctttttcgtgtgaaattaaatagtttatcacgtccaaagatgtagcataaccatcttgtgacctagtaataatataataatagagaactgttttacccattctatcatcataatcagtggtgtagtcgtaatcgtaatcgtctaattcatcatcccaattataatattcaccagcacgtctaatctgttctattttgatcttgtatccatactgtatgttgctacatgtaggtattcctttatccaataatagtttaaacacatctacattgggatttgatgttgtagcgtatttctctacaatattaataccatttttgatactatttatttctatacctttcgaaattagtaatttcaataagtctatatcgatgttatcagaacatagatattcgaatatatcaaaatcattgatatttttatagtcgactgacgacaataacaaaatcacaacatcgtttttgatattattatttttcttggtaacgtatgcctttaatggagtttcaccatcatactcatataatggatttgcaccactttctatcaatgattgtgcactgctggcatcgatgttaaatgttttacaactatcatagagtatcttatcgttaaccatgattggttgttgatgctatcgcattttttggtttctttcatttcagttatgtatggatttagcacgtttgggaagcataagctcatatgatttcagtactgtagtgtcagtactattagtttcgatcagatcaatgtctagatctatagaatcaaaacacgataggtcagaagataatgaatatctgtaggcttcttgttgtactgtaacttctcgttttgttagatggttgcatcgtgctttaacatcaatggtacaaattttatcctcgctttgtgtatcatattcgtccctactataaaattgtatattcagattatcatgagatgtgtatacgctaacggtatcaataaacggagcacaccatttagtcataaccgtaatccaaaaatttttaaagtatatcttaacgaaagaagttgtgtcattgtctacggtgtatggtactagatcctcataagtgtatatatctagagtaatgtttaatttatcaaatggttgataatatggatcctcatggcaatttcctaagacgaaaataagacataaacacgcaataaatctaattgcggacatggttactccttaaaaaaatactaataatcaccttggctatttagtaagtgtcatttaacactatactcatattaatccatggactcataatctctatacgggattaacggatgttctatatacggggatgagtagttctcttctttaactttatactttttactaatcatatttagactgatgtatgggtaatagtgtttgaagagctcgttctcatcatcagaataaatcaatatctctgtttttttgttatacagatgtattacagcctcatatattacgtaatagaacgtgtcatctaccttattaactttcaccgcatagttgtttgcaaatacggttaatcctttgacctcgtcgatttccgaccaatctgggcgtataatgaatctaaactttaatttcttgtaatcattcgaaataatttttagtttgcatccgtagttatcccctttatgtaactgtaaatttctcaacgcgatatctccattaataatgatgtcgaattcgtgctgtatacccatactgaatggatgaacgaataccgacggcgttaatagtaatttactttttcatctttacatattgggtactagttttactatcataagtttataaattccacaagctactatggaataagccaaccatcttagtataacacacatgtcttaaagtttattaattaattacatgttgttttatatatcgctacgaatttaaacagagaaatcagtttaggaaaaaaaattatctatctacatcatcacgtctctgtattctacgatagagtgctactttaagatgagacatatccgtgtcatcaaaaatatactccattaaaatgattattccggcagcgaacttgatattggatatatcacaacctttgttaatatctacgacaatagacagcagtcccatggttccataaacagtgagtttatctttctttgaagagatattttgtagagatcttataaaactgtcgaatgacatcgcatttatatctttagctaaatcgtatatgttaccatcgtaatatctaaccgcgtctatcttaaacgtttccatcgctttaaagacgtttccgatagatggtctcatttcatcagtcatactgagccaacaaatataatcgtgtataacatctttgatagaatcagactctaaagaaaacgaatcggctttattatacgcattcatgataaacttaatgaaaaatgtttttcgttgtttaagttggatgaatagtatgtcttaataattgttattatttcattaattaatatttagtaacgagtacactctataaaaacgagaatgacataactaatcataactagttatcaaagtgtctaggacgcgtaattttcatatggtatagatcctgtaagcattgtctgtattctggagctattttctctatcgcattagtgagttcagaatatgttataaatttaaatcgaataacgaacataactttagtaaagtcgtctatattaactcttttattttctagccatcgtaataccatgtttaagatagtatattctctagttactacgatctcatcgttgtctagaatatcacatactgaatctacatccaattttagaaattggtctgtgttacatatctcttctatattattgttgatgtattgtcgtagaaaactattacgtagaccattttctttataaaacgaatatatagtactccaattatctttaccgatatatttgcacacataatccattctctcaatcactacatctttaagattttcgttgttaagatatttggctaaactatataattctattagatcatcaacagaatcagtatatatttttctagatccaaagacgaactctttggcgtcctctataatattcccagaaaagatattttcgtgttttagtttatcgagatctgatctgttcatatacgccatgattgtacggtacgttatgataaccgcataaaataaaaatccattttcatttttaaccaatactattcataattgagattgatgtaatactttgttactttgaacgtaaagacagtacacggatccgtatctccaacaagcacgtagtaatcaaatttggtgttgttaaacttcgcaatatttatcaatttagatagaaacttatactcatcatctgttttaggaatccatgtattattaccactttccaacttatcattatcccaggctatgtttcgtccatcatcgttgcgcagagtgaataattcttttgtattcggtagttcaaatatataatccatgcatagatcggtaaagctattgtagatgtgatttttcctaaatctaatataaaactcgtttactagcaaacactttcctgatttatcgaccaagacacatatggtttctaaatctatcaagtggtggggatccatagttatgacgcagtaacatagattattaccttcttaactgtcgctaatatctatatatttattgttatcgtattggattctgcatatagatggcttgtatgtcaaagatatagaacacataaccaatttatagtcgcgctttacattctcgaatctaaagttaagagatttagaaaacattatatcctcggatgatgttatcactgtttctggagtaggatatattaaagtctttacagatttcgtccgattcaaataaatcactaaataatatcccacattatcatctgttagagtagtatcattaaatctattatattttatgaaagatatatcactgctcacctctatatttcgtacatttttaaactgtttgtataatatctctctgatacaatcagatatatctattgtgtcggtagacgataccgttacatttgaattaatggtgttccattttacaacttttaacaagttgaccaattcatttctaatagtatcaaacgctccatgattaaatattttaatagtatccattttatatcactacggacacaaagtagctgacataaaccattgtataatttttatgttttatgtttattagcgtacacattttggaagttccggcttccatgtatttcctggagagcaagtagatgatgaggaaccagataggttatatccgtacttgcacttaaagtttacattgtcgttgtatgagtatgatcttttaaacccgctagacaagtatccgtttgatattgtaggatgtggacatttaacaatctgacacgtgggtggatcggaccattctcctcctgaacacaggacaccagagttaccaatcaacgaatatccactattgcaactataagttacaacgcttccatcggtataaaaatcctcgtatccgttatgtcttccgttggatatagatggaggggattggcatttaacagattcacaaataggtgcctcgggattccataccatagatccagtagatcctaattcacaatacgatttagattcaccgatcaaatgatatccgctattacaagagtacgttatactagagccaaagtctactccgccaatatcaagttggccattatcgatatctcgaggcgatgggcatctccgtttaatacattgattaaagagtgtccatccagtacctgtacatttagcatatataggtcccattttttgctttctgtatccaggtagacatagatattctatagtgtctcctatgttgtaattagcattagcatcagtctccacactattcttaaatttcatattaatgggtcgtgacggaatagtacagcatgatagaacgcatcctattcccaacaatgtcaggaacgtcacgctctccaccttcatatttatttatccgtaaaaatgttatcctggacatcgtacaaataataaaaagcccatatatgttcgctattgtagaaattgtttttcacagttgctcaaaaacgatggcagtgacttatgagttacgttacactttggagtctcatctttagtaaacatatcataatattcgatattacgagttgacatatcgaacaaattccaagtatttgattttggataatattcgtattttgcatctgctataattaagatataatcaccgcaagaacacacgaacatctttcctacatggttaaagtacatgtacaattctatccatttgtcttccttaactatatatttgtatagataattacgagtctcgtgagtaattccagtaattacatagatgtcgccgtcgtactctacagcataaactatactatgatgtctaggcatgggagacttttttatccaacgatttttagtgaaacattccacatcgtttaatactacatatttttcatacgtggtataaactccacccattacatatatatcatcgtttacgaataccgacgcgcctgaatatctaggagtaattaagtttggaagtcttatccatttcgaagtgccgtgtttcaaatattctgccacacccgttgaaatagaaaattctaatcctcctattacatataactttccattgttaacacaagtactaacttctgattttaacgacgacatattagtaaccgttttccattttttcgtttcaagatctacccgcgatacggaataaacatgtctattgttaatcatgccgccaataatgtatagacaattatgtaaaacatttgcattatagaattgtctatctgtattaccgactatcgtccaatattctgttctaggagagtaatgggttattgtggatatataatcagagtttttaatgactactatattatgttttataccatttcgtgtcactggctttgtagatttggatatagttaatcccaacaatgatatagcattgcgcatagtattagtcataaacttgggatgtaaaatgttgatgatatctacatcgtttggatttttatgtatccactttaataatatcatagctgtaacatcctcatgatttacgttaacgtcttcgtgggataagatagttgtcagttcatcctttgataattttccaaattctggatcggatgtcaccgcagtaatattgttgattatttctgacatcgacgcattatatagttttttaattccatatcttttagaaaagttaaacatccttatacaatttgtggaattaatattatgaatcatagtttttacacatagatctactacaggcggaacatcaattattatggcagcaactagtatcatttctacattgtttatggtgatgtttatcttcttccagcgcatatagtctaatagcgattcaaacgcgtgatagtttataccattcaatataatcgcttcatcctttagatggtgatcctgaatgcgtttaaaaaaattatacggagatgccgtaataatttccttattcacttgtataatttccccattgatagaaaatatcacgctttccattcttgaagtactataagtaattatagtataatgtaaaggtttatatattcaatattttttataaaaaaatcatttcgacattaattcctttttaaatttccgtctatcatctatagaaacatattctatgaatttataaaatgcttttacgtgtcctatcgtaggcgatagaaccgctaaaaagcctattgaatttctacaaaagaatctattatatggtatagggagagtataaaacattaaatgcccgtacttattaaagtattcagtagccaatcctaactctttcgaatacttattaatggctcttgttctgtacgaatctatttttttgaacaacggacctagtggtatatcttgttctatgtatctaaaataatgtctgactagatccgttagtttaatatcctcagtcatcttgtctagaatggcaaatctaactgcgggtttaggctttagtttagtttttatatctacatctatgtctttatctaacaccaaaaatataatagctaatattttattacaatcatccggatattcttctacgatctcactaactaatgtttctttggttatactagtatagtcactatcggacaaataaagaaaatcagatgatcgatgaataatacatttaaattcatcatctgtaagatttttgagatgtctcattaaaatattattagggtcagtactcattatcattaggcagctattacttattttattatttttcaccatatagatcaatcattagatcatcaaaatatgtttcaatcatcctaaagagtatggtgaatgactcttcccatctaatttctgaacgttcaccaatgtctctagccactttggcactaatagcgatcattcgcttagcgtcttctatattattaactggttgattcaatctatctagcaatggaccgtcggacagcgtcattctcatgttcttaatcaatgtacatacatcgccgtcatctaccaattcatccaacaacataagctttttaaaatcatcattataataggtttgatcgttgtcatttctccaaagaatatatctaataagtagagtcctcatgcttagtaatttaactattttagttaacaactattttttatgttaaatcaattagtacaccgctatgtttaatacttattcatattttagtttttaggattgagaatcaatacaaaaattaatgcatcattaattttagaaatacttagtttccacgtagttaatgaaacatttgaactcatcgtacaagacgttctcgtacaggacgtaactataaaccggtttatatttgttcaagatagatacaaatccgataactttttttacgaattctacgggatccactttaaaagtgtcataccgggttctttttatttttttaaacagatcaatggtgtgatgttgattaggtcttttacgaatttgatatagaatagcgtttacatattctccataatggtcaatcgccatttgttcgtatgtcataaattctttaattatatgacactgtgtattgtttagttcatccttgttcattgttaggaatctatccaaaatggcaattatactagaactataggtgcgttgtatacacatattgatgtgtctgtttatacaatccatgatatttggatccatgctactaccttcgggtaaaattgtagcatcatataccatttctagtactttaggttcattattatccattgcagaggacgtcatgatcgcatcctaaaaaaatatattatttttatgttattttgttaaaaataatcatcgaatacttcgtaagatactccttcatgaacataatcagttacaaaacgtttatatgaagtaaagtatctacgatttttacaaaagtccggatgcataagtacaaagtacgcgataaacggaataataatagatttatctagtctatctttttctatagctttcatagttagatacatggtctcagaagtaggattatgtaacatcagcttcgataaaatgactgggttatttagtcttacacattcgctcatacatgtatgaccgttaactacagagtctacactaaaatgattgaacaatagatagtctaccattgtttcgtattcagatagtacagcgtagtacatggcatcttcacaaattatatcattgtctaatagatatttgacgcatcttatggatcccacttcaacagccatcttaaaatcggtaaaatcatattgctttcctttatcattaataatttctaaaacatcatctctatcataaaagatacaaatattaactgtttgatccgtaataacattgctagtcgatagcaatttgttaataagatgcgctgggctcaatgtcttaataagaagtgtaagaggactatctccgaatttgttttgtttattaacatccgttgatggaagtaaaagatctataatgtctacattcttgactgttttagagcatacaatatggagaggtgtatttccatcatgatctggttttgagggactaattcctagtttcatcatccatgagattgtagaagcttttggattgtctgacataagatgtctatgaatatgatttttgccaaatttatccactatcctggcttcgaatccgatggacattatttttttaaacactctttctgaaggatctgtacacgccaacaacggaccacatccttcttcatcaaccgagttgttaatcttggctccatactgtaccaataaatttattctctctatgacttcatcatctgttcccgagagataatatagaggcgttttatgctgtttatcacacgcgtttggatctgcgccgtgcgtcagcagcatcgcgactattctattattattaattttagaagctatatgcaatggataatttccatcatcatccgtctcatttggagagtatcctctatgaagaagttcttcgacaaatcgttcatctagtcctttaattccacaatacgcatgtagaatgtgataattatttccagaaggttcgatagcttgtagcatattcctaaatacatctaaatttttactattatatttggcataaagagatagataatactcggccgacataatgttgtccattgtagtataaaaattaatatttctatttctatttctgtatatttgcaacaatttactctctataacaaatatcataacttagttcttttatgtcaagaaggcactggtttagttcatctataaatgtcacgccataactaccacgcatgctatactcagaattatgataaagatatttatccttggggtgtaggtaatggggattaatctttgttggatcagtctctaagttaacacatgtcacacatgatccatttatagttatatcacacgatgatgatttatgaattgattccggaagatcgctatcgtattttgtggttccacaattcatttccatacatgttattgtcacactaatattatgatgaactttatctagccgctgagtggtaaacaacagaacagatagtttattatctttaccaacaccctcagccgctgccacaaatctctgatccgtatccatgatggtcatgtttatttctagtccgtatccagtcaacactatgttagcatttctgtcgatatagctttcactcatatgacactcaccaataatagtagaattaatgtcgtaatttacaccaatagtgagttcggcggcaaagtaccaataccggtaatcttgtcgaggaggacatatagtattcttgtattctaccgaatacccgagagatgcgatacaaaagagcaagactaatttgtaaaccatcttactcaaaatatgtaacaatagtacgatgcaatgagtaagacaataggaaatctatcttatatacacataattattctatcaattttaccaattagttagtgtaatgttaacaaaaatgtgggagaatctaattagtttttctttacacaattgacgtacatgagtctgagttccttgtttttgctaattatttcatccaatttattattcttgactatatcgagatcttttgtataggagtcagacttgtattcaacatgcttttctataatcattttagctatttcggcatcatccaatagtacattttccagattagcagaatagatattaatgtcgtatttgaacagagcctgtaacatctcaatgtctttattatctatagccaatttaatgtccggaatgaagagaagggaattattggtgtttgtcgacgtcatatagtcgagcaagagaatcatcatatccacgtgtccattttttatagtggtgtgaatacaactaaggagaatagccagatcaaaagtagatggtatttctgaaagaaagtatgatacaatacttacatcattaagcatgacggcatgataaaatgaagttttccatccagttttcccatagaacatcagtctccaatttttcttaacaaacagttttaccgtttgcatgttaccactatcaaccgcataatacaatgcagtgtttcccttgtcatcaaattgtgaatcatccagtccactgaatagcaaaatctttactattttggtatcttccaatgtggctgcctgatgtaatggaaattcattctctagaagatttttcaatgctccagcgttcaacaacgtacatactagacgcacgttattatcagctattgcataatacaaggcactatgtccatggacatccgccttaaatgtatctttactagagagaaagcttttcagctgcttagacttccaagtattaattcgtgacagatccatgtctgaaacgagacgctaattagtgtatattttttcattttttataattttgtcatattgcaccagaattaataatatctctaatagatctgattagtagatacatggctatcgcaaaacaacatatacacatttaataaaaataatatttattaagaaaattcagatttcacgtacccatcaatataaataaaataatgattccttacaccgtacccatattaaggagattccaccttacccataaacaatataaatccagtaatatcatgtctaatgatgaacacaaatggtgtattaaattccagtttttcaggagatgatctcgccgtagctaccataatagtagatgcctctgctacagttccttgttcgtcgacatctatctttgcattctgaaacattttataaatatataatgggtccctagtcatatgtttaaacgacgcattatctggattaaacatactaggagccatcatttcggctatcgacttaatatccctcttattttcgatagaaaatttagggagtttaagattgtacactttattccctaattgaaacgaccaatagtctaattttgcagccgtaatagaatctgtgaaatgggtcatattatcacctattgccaggtacatactaatattagcatccttatacggaaggcgtaccatgtcatattctttgtcatcgattgtgattgtatttccttgcaatttagtaactacgttcatcatgggaaccgttttcgtaccgtacttattagtaaaactagcattgcgtgttttagtgatatcaaacggatattgccatgtacctttaaaatatatagtattaatgattgcccatagagtattattgtcgagcatattagaatctactacattagacataccggatctacgttctactatagaattaattttattaaccgcatctcgtctaaagtttaatctatataggccgaatctatgatattgttgataatacgacggtttaatacacacagtattatctacgaaactttgataagttagatcagtgtacgtatatttagatgttttcagcttagctaatcctgatattaattctgtaaatgctggacccagatctctttttctcaaatccatagtcttcaataattctattctagtattacctgatgcaggcaatagcgacataaacatagaaaacgaatagccaaacggcgagaagacaatattatcatcttgaatatttttatacgctactataccggcattggtaaatccttgcagacgataggtagacgctgaacacgttaacgatagtatcaataacgcaatcatgattttatggtattaataattaaccttatttttatgttcggtataaaaaaattattgatgtctacacatccttttgtaattgacatctatatatccttttgtataatcaactctaatcactttaacttttacagttttccctaccagtttatccctatattcaacatatctatccatatgcatcttaacactctctgccaagatagcttcagagtgaggatagtcaaaaagataaatatatagagcataatccttctcgtatactctgccctttattacatcgcccgcattgggcaacgaataacaaaatgcaagcatcttgttaacgggctcgtaaattgggataaaaattatgtttttatatctattttattcaagagaatattcaggaatttctttttccggttgtatctcgtcgcagtatatatcatttgtacattgtttcatattttttaatagtttacaccttttagtaggactagtatcgtacaattcatagctgtattttgaattccaatcacgcataaaaatatcttccaattgttgacgaagacctaatccatcatccggtgtaatattaatagatgctccacatgtatccgtaaagtaatttcctgtccaatttgaggtacctatataggccgttttatcggttaccatatatttggcatggtttaccctagaatacggaatgggaggatcagcatctggtacaataaatagctttacttctatatctatgtttttagattttagcatagcgatagatcttaaaaagtttctcatgataaacgaagatcgttgccagcaactaatcaatagcttaacggatacttgtctgtctatagcggatcttcttaattcatcttctatataaggccaaaacaaaattttacccgccttcgaataaataatagggataaagttcataacagatacataaacgaatttactcgcatttctaatacatgacaataaagcggttaaatcattggttctttccatagtacatagttgttgcggcgcagaagcaataaatacagagtgtggaacaccacttacgttaatactaagaggatgatctgtattataatacgacggataaaagtttttccaattatatggtagattgttaactccaagataccagtatacctcaaaaatttgagtgagatccgctgccaagttcctattattgaagatcgcaatacccaattctttgacctgagttagtgatctccaatccatgttagcgcttcctaaataaatatgtgtattatcagatatccaaaattttgtatgaagaactcctcctaggatatttgtaatatctatgtatcgtacttcaactccggccatttgtagtctttcaacatcctttaatggtttgttagatttattgacggctactctaactcttactcctcttttgggtaattgtacaatctcgtttaatattatcgtgccgaaattcgtacccacttcatccgataaactccaataaaaagatgatatatctagtgtttttgtggtattggatagaatttccctccacatgttaaatgtagacaaatatactttatcaaattgcatacctataggaatagtctctgtaatcactgcgattgtattatccggattcattttatttgttaaaaaataatcctatatcacttcactctattaaaaatccaagtttctatttctttcatgactgattttttaacttcatccgtttccttatgaagatgatgtttggcaccttcataaatttttatttctctattacaatttgcatgttgcatgaaataatatgcacctaaaacatcgctaatctcattgtttgttccctggagtatgagagtcgggggggtgttaatcttggaaattatttttctaaccttgttggtagccttcaagacctgactagcaaatccagccttaattttttcatgattgattaatgggtcgtattggtatttataaactttatccatatctctagatactgattctggacatagctttccgactggcgcatttggtgtgatggttcccataagtttggcagctagcagattcagttttgaaacagcatctgcattaactagaggagacattagaatcattgctgtaaacaagtttggattatcgtaagaggctagtatagaaattgttgctcccatggaatgacccaataagtagatttaatagttaccacgtgctgtaccaaagtcatcaatcatcattttttcaccattacttcttccatgtccaatatgatcatgtgagaatactaaaattcctaacgatgatatgttttcagctagttcgtcataacgtccagaatgtttaccagctccatgacttatgaatactaatgccttaggatatgtaataggtttccaatatttacaatatatgtaatcattgtccagattgaacatacagtttgcactcatgattcacgttatataactatcaatattaacagttcgtttgatgatcatattatttttatgttttattgataattgtaaaaacatacaattaaatcaatatagaggaaggagacggatactgtcttttgtgagatagtcatggcgactaaatcagattatgaggatgctgttttttactttgtggatgatgataaaatatgtagtcgcgactccatcatcgatctaatagatgaatatatcacgtggagaaatcatgttatagtgtttaacaaagatattaccagttgtggaagactgtacaaggaattgatgaagttcgatgatgccgctatacagtactatggtattgataaaattaatgagattgtcgaagctatgagcgaaggagaccactacatcaattttacaaaagtccatgatcaggaaagtttattcgctaccataggaatatgtgctaaaatcactgaacattggggatacaaaaagatttcagaatctagattccaatcattgggaaacattacagatctgatgaccgacgataatataaacatcttgatactttttctagaaaaaaaattgaattgatgatataggggtcttcataacgcataattattacgttagcattctatatccgtgttaaaaaaaattatcctatcatgtatttgagagttttatatgtagcaaacatgatagctgtgatgccaataagctttagatattcacgcgtgctagtgttagggatggtattatctggtggtgaaatgtccgttatataatctacaaaacaatcatcgcatatagtatgcgatagtagagtaaacatttttatcgtttctactgggttcatacatcgtctacccaattcggttatgaatgaaattgtcgccaatcttacacccaaacccttgttatccattagcatagtattaacttcgttatttatgtcataaactgtaaatgattctgtagatgccatatcatacatgatattcatgtccctattataatcattactaactttatcacaatatatgttgataatatctatatatgatctagtctttgtgggcaactgtctatacaagtcgtctaaacgttgtttactcatatagtatcgaacagccatcattacatggtcccgttccgttgatagataatcgagtatgttagtggacttgtcaaatctatataccatattttctggaagtggatatacatagtcgtgatcaacattattgctagcctcatcttctatatcctgtactataccattatctatatcatctacataatctacgatattattatacataaacatcgacaacatactattgtcaattatctaagtcctgttgatccaaacccttgatctcctctatctgtactatctagagattgtacttcttccagttctggataatatatacgttgatagattagctgggctattctatcccccgtatttacattaaacgtacattttccattattaataagaataactcctatgtttcccctataatcttcgtctattacaccgcctcctatatcaatgccttttagggacagaccagacctaggagctattctaccatagcagaacttaggcatggacatactaatatctgtcttaattaactgtcgttctccaggagggatagtataatcgtaagcgctatataaatcatatccggcggcgtaaggtgattgcctagtaggagatttagctctgttagtttccttaacaaatctaactggtgagttaatattcatgttgaacataaaactaatattttatttcaaaattatttaccatcccatatattccatgaataagtgtgatgattgtacacttctatagtatctatatacgattcacgataaaatcctcctatcaatagcagtttattatccactatgatcaattctggattatccctcggataaataggatcatctatcagagtccatgtattgctggattcacaataaaattccgcatttctaccaaccaagaataaccttctaccgaacactaacgcgcatgatttataatgaggataataagtggatggtccaaactgccactgatcatgattgggtagcaaatattctgtagttgtatcagtttcagaatgtcctcccattacgtatataacattgtttatagatgccactgctggattacatctaggtttcagaagactcggcatattaacccaagcagcatccccgtggaaccaacgctcaacagatgtgggatttggtagacctcctactacgtataatttattgttagcgggtatcccgctagcatacagtctggggctattcatcggaggaattggaatccaattgtttgatatataatttacagctatagcattgttatgtatttcattgttcatccatccaccgatgagatatactacttctccaacatgagtacttgtacacatatggaatatatctataatttgatccatgttcataggatactctatgaatggatacttgtatgatttgcgtggttgtttatcacaatgaaatattttggtacagtctagtatccattttacattatttatacctctgggagaaagataatttgacctgattacatttttgataaggagtagcagatttcctaatttatttcttcgctttatataccacttaatgacaaaatcaactacataatcctcatctggaacatttagttcatcgctttctagaataagtttcatagatagataatcaaaattgtctatgatgtcatcttccagttccaaaaagtgtttggcaataaagtttttagtatgacataagagattggatagtccgtattctatacccatcatgtaacactcgacacaatattcctttctaaaatctcgtaagataaagtttatacaagtgtagatgataaattctacagaggttaatatagaagcacgtaataaattgacgacgttatgactatctatatatacctttccagtatatgagtaaataactatagaagttaaactgtgaatgtcaaggtctagacaaacccttgtaactggatctttatttttcgtgtatttttgacgtaaatgtgtgcgaaagtaaggagataactttttcaatatcgtagaattgactattatattgccacctatagcatcaataattgttttgaatttcttagtcatagacaatgctaatatattcttacagtacacagtattaacaaatatcggcatttatgtttctttaaaagtcaacatctagagaaaaatgattatctttttgagacataactcccattttttggtattcacccacacgtttttcgaaaaaattagtttttccttccaatgatatattttccatgaaatcaaacggattggtaacattataaatttttttaaatcccaattcagaaatcaatctatccgcgacgaattctatatatgttttcatcatttcacaattcattcctataagtttaactggaagagccgcagtaagaaattcttgttcaatggatactgcatctgttataatagatctaacggtttcttcactcggtggatacaataaatgtttaaacatcaaacatgcgaagtcgcagtgtagaccctcgtctctactaattagttcgttggaaaacgtgagtccgggcattaggccacgctttttaagccaaaatatggaagcgaatgatccggaaaagaagattccttctactgcagcaaaggcaataagtctctctccataaccggcgctgtcatgtatccacttttgagcccaatcggccttcttttttacacaaggcattgtttctatggcattaaagagatagtttttttcattactatctttaacataagtatcgatcaaaagactatacatttccgaatgaatgttttcaatggccatctgaaatccgtagaaacatctagcctcggtaatctgtacttctgtacaaaatcgttccgccaaattttcattcactattccgtcactggctgcaaaaaacgccaatacatgttttataaaatatttttcgtctggtgttagtttattccaatcattgatatctttagatatatctacttcttccactgtccaaaatgatgcctctgcctttttatacatgttccagatgtcatgatattggattgggaaaataacaaatctatttggatttggtgcaaggatgggttccataactaaattaacaatatcaataaattttttttcagttatctatatgcctgtacttggattttttgtacatcgatatcgccgcaatcactacaataattacaagtattattgatagcattgttattagtactatcataattaaattatcgacattcatgggtgctgaataatcgttattatcatcattatcattttgtaattgtgacatcatactaaataaatcgtttgcgagattgttgtgggaagcgggcatggaggatgcattatcattattatttaacgccttccatttggattcacaaatatggcgcgcgttcaacattttatggaaactataattttgtgaaaacagataacaagaaaactcgtcatcgttcaaatttttaacgatagtaaaccgattaaacgtcgagctaatttctaacgctagcgactctgttggatatgggtttccagatatatatcttttcagttcccctacgtatctataatcatctgtaggaaatggaagatatttccatttatctactgttcctaatatcatatgtggtggtgtagtagaaccattaagcgcgaaagatgttatttcgcatcgtattttaacttcgcaataatttctggttagataacgcactctaccagtcaagtcaatgatattagcctttacagatatattcatagtagtcgtaacgatgactccatcttttagatgcgatactcctttgtatgtaccagaatcttcgtacctcaaactcgatatatttaaacaagttaatgagatattaacgcgttttatgaatgatgatatataaccagaagttttatcctcggtggctagcgctataaccttatcattataataccaactagtgtgattaatatgtgacacgtcagtgtgggtacaaatatgtacattatcgtctacgtcgtattcgatacatccgcatacagccaacaaatataaaatgacaaatactctaacgccgttcgtacccatcttgatgcggtttaataaatgttttgatttcaatttattgtaaaaaaagattcggttttatactgttcgatattctcattgcttatattctcatctatcatctccacacagtcaaatccgtggttagcatgcacctcatcaaccggtaaaagactatcggactcttctatcattataactctagaatatttaatttggtcattattaatcaagtcaattatcttatttttaacaaacgtgagtattttactcattttttataaaaacttttagaaatatacagactctatcgtgtgtctatatcttctttttatatccaatgtatttatgtctgatttttcttcatttatcatatataatggtccaaattctacacgtgcttcggattcatccagatcattaaggttcttataattgtaacatccttctcttccctcttctacatcttccttcttattcttattcttagcgtcacagaatctaccacagcaggatcccatgacgagcgtcatattaaactaatccattttcaattataatatatgattagtaatgaccattaaaataaaaaatattcttcataaccggcaagaaagtgaaaagttcacattgaaactatgtcagtagtatacatcatgaaatgatgatatatatatactctattttggtggaggattatatgatataattcgtggataatcattcttaagacacatttcttcattcgtaaatcttttcacgttaaatgagtgtccatattttgcaatttcttcatatgatggcggtgtacgtggacgaggctgctcctgttcttgttgtggtcgccgactgtcgtgtttgcgtttatccctccattatcgcgattgcgtagatggagtactattatataccttgtaattaaatttttttattaattaaacgtataaaaacgttccgtatctgtatttaagagccagatttcgtctaatagaacaaatagctacagtaaaaataactagaataattgctacacccactagaaaccacggatcgtaatacggcaatcggttttcgataataggtggaacgtatattttatttaaggacttaacaattgtctgtaaaccacaatttgcttccgcggatcctgtattaactatctgtaaaagcatatgttggccgggcggagccgaacattctccgatatccaatttctgtatatctataatattattaacctccgcatacgcattacagttcttttctagcttggataccgcactaggtacatcgtctagatctattcctatttcctcagcgatagctcttctatccttttccggaagcaatgaaatcacttcaataaatgattcaaccatgagtgtgaaactaagtcgagaattactcatgcatttgttagttattcggagcgcgcaatttttaaactgtcctataacctctcctatatgaatagcacaagtgacattagtagggatagaatgttgagctaatttttgtaaataactatctataaaaagattatacaaagttttaaactctttagtttccgccatttatccagtctgagaaaatgtctctcataataaatttttccaagaaactaattgggtgaagaatggaaacctttaatctatatttatcacagtctgttttggtacacatgatgaattcttctaatgccgtactaaattcgatatctttttcgatttctggatatgtttttaataaagtatgaacaaagaaatggaaatcgtaataccagttatgtttaactttgaaattgttttttattttcttgttaatgattccagccacttgggaaaagtcaaagtcgtttaatgccgatttaatacgttcattaaaaacaaactttttatcctttagatgaattattattggttcattggaatcaaaaagtaagatattatcgggtttaagatctgcgtgtaaaaagttgtcgcagcatggtagttcgtagattttaatgtataacagagccatctgtaaaaagataaactttatgtattgtaccaaagatttaaatcctaatttgatagctaactcggtatctactttatctgccgaatacagtgctaggggaaaaattataatgtttcctctttcgtattcgtagttagttctcttttcatgttcgaaaaagtgaaacatgcggttaaaatagtttataacattaatattactgttaataactgccgggtaaaagtgggatagtaatttcacgaatttgatactgtcctttctctcgttaaacgcctttagaaaaactttagaagaatatctcaatgatagttcctgaccatccatagtttgtatcaataatagcaacatatgaagaacacgtttatacagagtatgtaaaaatgttaatttatagtttaatcccatggcccacgcacacacgattaattttttttcatctccctttagattgttgtatagaaatttgggtactgtgaactccgccgtagtttccatgggactatataattttgtggcctcgaatacaaattttactacatagttatctatcttaaaaactataccatatcctcctgtagatatgtgataaaaatcgtcgtttataggataaaatcgtttatccttttgttggaaaaaggatgaattaatgtaatcattctcttctatctttagtagtgtttccttattaaaattcttaaaataatttaacaatctaactgacggagcccaattttggtgtaaatctaattgggacattatattgttaaaatacaaacagtctcctaatataacagtatctgataatctatggggagacatccattgatattcaggggatgaatcattggcaacacccatttattgtacaaaaagccccaatttacaaacgaaagtccaggtttgatagagacaaactattaactattttgtctctgtttttaacacctccacagtttttaatttctttagtaatgaaattattcacaatatcagtatcttctttatctaccagagattttactaacttgataaccttggctgtctcattcaatagggtagtaatatttgtatgtgtgatattgatatctttttgaattgtttcttttagaagtgattctttgatggtgccagcatacgaattacaataatgcagaaactcggttaacatgcaggaattatagtaagccaattccaattgttgcctgtgttgtattagagtgtcaatatgagcaatggtgtccttgcgtttctctgatagaatgcgagcagcgattttggcgttatcatttgacgatatttctggaatgacgaatcctgtttctactaactttttggtaggacaaagtgaaacaatcaagaagatagcttctcctcctatttgtggaagaaattgaactcctctagatgatctactgacgatagtatctccttgacagatattggaccgaattacagaagtacctggaatgtaaagccctgaaaccccctcattttttaagcagattgttgccgtaaatcctgcactgtgaccaagatagagagctcctttggtgaatccatctctatgtttcagtttaaccaagaaacagtcagctggtctaaaatttccatctctatctaatacagcatctaacttgatgtcaggaactatgaccggtttaatgttatatgtaacattgagtaaatccttaagttcataatcatcactgtcatcagttatgtacgatccaaacaatgtttctactggcatagtggatacgaagatgctatccatcagaatgtttccctgattagtattttctatatagctattcttctttaaacgattttccaaatcagtaactatgttcatttttttaggagtaggacgcctagccagtatggaagaggattttctagatcctctcttcaacatctttgatctcaatggaatgcaaaaccccatagtgaaacaaccaacgataaaaataatattgtttttcactttttataattttaccatctgactcatggattcattaatatctttataagagctactaacgtataattctttataactgaactgagatatatacaccggatctatggtttccataattgagtaaatgaatgctcggcaataactaatggcaaatgtataaaacaacgaaattatactagagttgttaaagttaatattttctatgagctgttccaataaattatttgttgtgactgcgttcaagtcataaatcatcttgatactatccagtaaacagtctttaagttctggaatattatcatcccattgtaaagcccctaattcgactatcgaatatcctgctctgatagcagtttcaatatcgacggacgtcaatactgtaataaaggtggtagtattgtcatcatcgtgataaactacgggaatatggtcgttagtaggtacggtgactttacacaacgcgatatataactttccttttgtaccatttttaacgtagttgggacgtcctgcagggtattgttttgaagaaatgatatcgagaacagatttgatacgatatttgttggattcctgattattcactataatataatctagacagatagatgattcgataaatagagaaggtatatcgttggtaggataatacatccccattccagtattctcggatactctattgatgacactagttaagaacatgtcttctattctagaaaacgaaaacatcctacatggactcattaaaacttctaacgctcctgattgtgtctcgaatgcctcgtacaaggatttcaaggatgccatagattctttgaccaacgatttagaattgcgtttagcatctgatttttttattaaatcgaatggtcggctctctggtttgctaccccaatgataacaatagtcttgtaaagataaaccgcaagaaaatttatacgcatccatccaaataaccctagcaccatcggatgatattaatgtattattatagattttccatccacaattattgggccagtatactgttagcaacggtatatcgaatagattactcatgtaacctactagaatgatagttcgtgtactagtcataatatctttaatccaatctaagaaatttaaaattagattttttacactgttaaagttaacaaaggtattacccggatacgtggatatcatatatggcattggtccattatcagtaatagctccataaactgatacggcgatggtttttatatgtgtttgatctaacgaggaagaaattcgcgcccacaattcatctctagatatgtatttaatatcaaacggtaacacatcaatttcgggacgcgtatatgtttctaaatttttaatccaaatataatgatgacctatatgccctattatcatactgtcaactatagtacacctagagaacttacgatacatctgtttcctataatcgttaaattttacaaatctataacatgctaaaccttttgacgacaaccattcattaatttctgatatggaatctgtattctcgataccgtattgttctaaagccagtgctatatctccctgttcgtgggaacgctttcgtataatatcgatcaacggataatctgaagtttttggagaataatatgactcatgatctatttcgtccataaacaatctagacataggaattggaggcgatgatcttaattttgtgcaatgagtcgtcaatcctataacttctaatattgtaatattcatcatcgacataacactatctatgttatcatcgtatattagtataccacggccttcttcatttcgtgccaaaataatatacagtcttaaataattacgcaatatctcaatagtttcataattgttagctgttttcatcaaggtttgtatcctgtttaacatgatggcgttctataacgtctctattttctatttttaattttttaaatttttaacgatttactgtggctagatacccaatctctctcaaatatttttttagcctcgcttacaagctgtttatctatactattaaaactgacgaatccgtgattttggtaatgggttccgtcgaaatttgccgaagtgatatgaacatattcgtcgtcgactatcaacaattttgtattattctgaatagtgaaaaccttcacagatagatcattttgaacacacaacgcgtctagacttctggcggttgccatagaatatacgtcgttcttatcccaattaccaactagaagtctgatcttaactcctctattaatggctgcttctataatggagttgtaaatgtcaggccaatagtagctattaccgtcgacacgtgtagtgggaactatggccaaatgttcaatatctatactagtcttagccgacttgagtttatcaataactacatcagtgtctagatctctagaatatcccaataggtgttctggagaatcagtaaagaacactccacctataggattcttaatatgatacgcagtgctaactggcagacaacaagccgcagagcataaattcaaccatgaattttttgcgctattaaaggctttaaaagtatcaaatcttctacgaagatctgtggccagcgggggataatcagaatatacacctaacgttttaatcgtatgtatagatcctccagtaaatgacgcgtttcctacataacatctttcatcatctgacacccaaaaacaaccgagtagtagtcccacattattttttttatctatattaacggttataaaatttatatccgggcagtgactttgtagctctcccagatttcttttccctcgttcatctagcaaaactattattttaatccctttttcagatgcctcttttagtttatcaaaaataagcgcgcccctagtcgtactcagaggattacaacaaaaagatgctatgtatatatatttcttagctagagtgataatttcgttaaaacattcaaatgttgttaaatgatcggatctaaaatccatattttctggtagtgtttctaccagcctacattttgctcccgcaggtaccggtgcaaatggccacatttagttaacataaaaacttatacatcctgttctatcaacgattctagaatatcatcggctatatcgctaaaattttcatcaaagtcgacatcacaacctaactcagtcaatatattaagaagttccatgatgtcatcttcgtttatttctatatccgtatccattgtagattgttgaccgattatcgagtttaaatcattactaatactcaatccttcagaatacaatctgtgtttcattgtaaatttataggcggtgtatttaagttggtagattttcaattatgtatcaatatagcaacagtagttcttgctcctccttgattctagcatcctcttcattattttcttctacgtacataagcatgtccaatacgttagacaacacaccgacgatggcggccgccacagacacgaatatgactagaccgatgaccatttaaaaacccctctctagctttcacttaaactgtatcgattattcttttagaacatgtataatataaaaacattattctatttcgaatttaggcttccaaaaatttttcatccgtaaaccgataataatatatatagacttgttaatagtcggaataaatagattaatgcttaaactatcatcatctccacgattagagatacaatatttacattctttttgctgtttcgaaactttatcaatacacgttaatacaaacccaggaaggagatattgaaactgaggctgttgaaaatgaaacggtgaatacaataattcagataatgtaaaatcatgattccgtattctgatgatattagaactgctaatggatgtcgatggtatgtatctaggagtatctattttaacaaagcatcgatttgctaatatacaattatcattttgattaattgttattttattcatattcttaaaaggtttcatatttatcaattcttctacattaaaaatttccatttttaatttatgtagccccgcaatactcctcattacgtttcattttttgtctataatatccattttgttcatctcggtacatagattatccaattgagaagcgcatttagtagttttgtacattttaagtttattgacgaatcgtcgaaaactagttatagttaacattttattatttgataccctgatattaatacccctgccgttactattatttataactgatgtaacccacgtaacattagaattaattatcgatagtaatgcatcgacgcttccaaaattgtctattataaactcaccgataatttttttattgcatgttttcatattcattaggattatcaaatctttaatcttattacgattgtatgcgttgatattacaagacgtcattctaaaagacggaggatctccatcaaatgccagacaatcacgtacaaagtacatggaaataggttttgttctattgcgcatcatagattcatatagaacacccatagaaatactaatttgttttactctataaaatactaatgcatctatttcatcgttttgtataacgtctttccaagtgccaaattccaaatttttttcattgatagtaccaaattcttctatctctttaactacttgcatagataggtaattacagtgatgcctacatgccgttttttgaaactgaatagatgcgtctagaagcgatgctacactagtcacaatcaccactttcatatttagaatatatgtatgtaaaaatatagtagaatttcattttgtttttttctatgctataaatgaattctcattttgcatctgctcatactccgttttatatcaataccaaagaaggaagatatctggttctaaaagccgttaaagtatgcgatgttagaactgtagaatgcgaaggaagtaaagcttcctgcgtactcaaagtagataaaccctcatcgcccgcgtgtgagagaagaccttcgtccccgtccagatgcgagagaatgaataaccctggaaaacaagtcccgtttatgaggacggacatgctacaaaatatgttcgcggctaatcgcgataatgtagcttctagacttttgtcctaaaatactattatatccttttcgatattaataaatccgtgtcgtccaggttttttatctctttcagtatgtgaatagataggtattttatctctattcatcatcgaatttaagagatccgataaacattgtttgtattctccagatgtcagcatctgatacaacaatatatgtgcacataaacctctggcacttatttcatgtaccttccccttatcactaaggagaatagtatttgagaaatatgtatacatgatattatcatgaattagatatacagaatttgtaacactctcgaaatcacacgatgtgtcggcgttaagatctaatatatcactcgataacacattttcatctagatacactagacattttttaaagctaaaatagtctttagtagtgacagtaactatgcgattattttcatcgatgatacatttcatcggcatattattacgcttaccatcaaagactataccatgtgtatatctaacgtattctagcatggttgccatacgtgcattaaacttttcaggatctttggatagatcttccaatctatctatttgagaaaacatttttatcatgttcaatagttgaaacgtcggatccactatatagatattatctataaagattttaggaactacgttcatggtatcctggcgaatattaaaactatcaatgatatgattatcgttttcatcttttatcaccatatagtttctaagatatgggattttacttaatataatattatttcccgtgataaattttattagaaaggccaaatctataagaaaagtcctagaattagtctgaagaatatctatatcgccgtaccgtatatttggattaattagatatagagaatatgatccgtaacatatacaacttttattatggcgtctaagatattcttccatcaacttattaacatttttgactagggaagatacattatgacgtcccattacttttgccttgtctattactgcgacgttcatagaatttagcatatctcttgccaattcttccattgatgttacattataagaaattttagatgaaattacatttggagctttaatagtaagaactcctaatatgtccgtgtatgtggtcactaatacagattgtagttctataatcgtaaataatttacctatattatatgtttgagtctgtttagaaaagtagctaagtatacgatcttttatttctgatgcagatgtatcaacatcggaaaaaaatctttttttattcttttttactaaagatacaaatatgtctttgttaaaaacagttattttctgaatatttctagcttgtaattttaacatatgatattcgttcacactaggtactctgcctaaataggtttctataatctttaatgtaatattaggaagagtattctgatcaggattcctattcattttgaggatttaaaactctgattattgtctaatatggtctcaacacaaactttttcacagagcgatagagtttttgataactcgtttttcttaagaaatataaaactactgtttccagagctcgctctatcttttattttatctaattcgatacaaactcctgatactggttcagaaagtaattcattaattttcagtcctttatagaagatatttaatatagataatacaaaattttcagttcttgatatcgatctgattgatcctagaactagatatattaataacgtgctcattaggcagtttatggcagcttgataattagatatagtatattccagttcatatttattagataccgcattgcccagattttgatattctatgaattcctctgaaaataaatccaaaataactagacattctattttttgtggattagtgtactctcttccctctatcatgttcactactggtgtccacgatgataaatatctagagggaatataatatagtccataggatgccaatctagcaatgtcgaataactgtaatttgattcttcgttcttcattatgaattgattcttgaggtataaacctaacacaaattatattattagacttttcgtatgtaatgtctttcatgttataagtttttaatcctggaatagaatctattttaatgaggcttttaaacgcagagttctccaacgagtcaaagcataatactctgttgtttttcttatatacgatgttacgattttcttctttgaatggaataggtttttgaattagtttataattacaacataatagataaggaagtgtgcaaatagtacgcggaaaaaacataatagctcccctgttttcatccatggttttaagtaaatgatcactggcttctttagtcaatggatattcgaacattaaccgtttcatcatcattggacagaatccatatttcttaatgtaaagagtgatcaaatcattgtgtttattgtaccatcttgttgtaaatgtgtattcggttatcggatctgctcctttttctattaaagtatcgatgtcgatctcgtctaagaattcaactatatcgacatatttcatttgtatacacataaccattactaacgtagaatgtataggaagagatgtaacgggaacagggtttgttgattcgcaaactattctaatacataattcttctgttaatacgtcttgcacgtaatctattatagatgccaagatatctatataattattttgtaagatgatgttaactatgtgatctatataagtagtgtaataattcatgtatttcgatatatgttccaactctgtctttgtgatgtctagtttcgtaatatctatagcatcctcaaaaaatatattcgcatatattcccaagtcttcagttctatcttctaaaaaatcttcaacgtatggaatataataatctattttacctcttctgatatcattaatgatatagtttttgacactatcttctgtcaattgattcttattcactatatctaagaaacggatagcgtccctaggacgaactactgccattaatatctctattatagcttctggacataattcatctattataccagaattaatgggaactattccgtatctatctaacatagttttaagaaagtcagaatctaagacctgatgttcatatattggttcatacatgaaatgatctctattgatgatagtgactatttcattctctgaaaattggtaactcattctatatatgctttccttgttgatgaaggatagaatatactcaatagaatttgtaccaacaaactgttctcttatgaatcgtatatcatcatctgaaataatcatgtaaggcatacatttaacaattagagacttgtctcctgttatcaatatactattcttgtgataatttatgtgtgaggcaaatttgtccacgttctttaattttgttatagtagatatcaaatccaatggagctacagttcttggcttaaacagatatagtttttctggaacgaattctacaacattattataaaggactttgggtagataagtgggatgaaatcctattttaattaatgcgatagccttgtcctcgtgcagatatccaaacgcttttgtgatagtatggcattcattgtctagaaacgctctacgaatatctgtgacagatatcatctttagagaatatactagtcgcgttaatagtactacaatttgtattttttaatctatctcaataaaaaaattaatatgtatgattcaatgtataactaaactactaactgttattgataactagaatcagaatctaatgatgacgtaaccaagaagtttatctactgccaatttagctgcattatttttagcatctcgtttagattttccatctgccttatcgaatactcttccgtcgatgtctacacaggcataaaatgtaggagagttactaggccccactgattcaatacgaaaagaccaatctctcctagtaatttggcagtactcattaataacggtgacagggttagcacctttccaatcaataatttttttagccggaataacatcatcaaaagacttatgatcctctctcattgatttttcgcgggatacatcatctattatggcgtcagccataacatcagcatccggcttatccgcctccgttgtcataaaccaacgaggaggaatatcgtcggagctgtacaccatagcactacgttgaagatcgtacagagctttattaacttctcgcttctccatattaagttgtctagttagttgtgcagcagtagctccttcgattccaatggttttaatagcctcacacacaatctctgcgttagaacgttcgtcgatatagattttagacatttttagagagaactaacacaaccagcaataaaactgaacctactttatcatttttttattcatcatcctctggtggttcgtcgttcctatcgaatgtggatctgattaacccgtcatctataggtgatgctggttctggagattctggaggagatggattattatctggaagaatctctgttatttccttgttttcatgtatcgattgcgttgtaacattaagattgcgaaatgctctaaatttgggaggcttaaagtgttgtttgcaatctctacacgcatgtctaactagtggaggttcgtcagcggctctagtttgaatcatcatcggcgtagtattcctacttttacagttaggacacggtgtattgtatttctcgtcgagaacgttaaaataatcgttgtaactcacatcctttattttatctatattgtattctactcctttcttaatgcattttataccgaataagagatagcgaaggaattctttttcggtgccgctagtacccttaatcatatcacatagtgttttatattccaaatttgtggcaatagacggtttatttctatacgatagtttgtttctggaatcctttgagtattctataccaatattattctttgattcgaatttagtttcttcgatattagattttgtattacctatattcttgatgtagtactttgatgatttttccatggcccattctattaagtcttccaagttggcatcatccacatattgtgatagtaattctcggatatcagtagcggctaccgccattgatgtttgttcattggatgagtaactactaatgtatacattttccatttataacacttatgtattaactttgttcatttatattttttcattattatgttgatattaacaaaagtgaatatatatgttaataattgtattgtggttatacggctacaatttcataatgagtggaagtcagtgtccgatgatcaatgacgatagctttactctgaaaagaaagtatcaaatcgatagtgcggagtcaacaataaaaatggataagaagaggataaagtttcagaatagagccaaaatggtaaaagaaataaatcagacaataagagcagcacaaactcattacgagacattgaaactaggatacataaaatttaagagaatgattaggactactactctagaagatatagcaccatctattccaaataatcagaaaacttataaactattctcggacatttcagccatcggcaaagcatcacagaatccgagtaagatggtatatgctctgctgctttacatgtttcccaatttgtttggagatgaccatagattcattcgttatagaatgcatccaatgagtaaaatcaaacacaagatcttctctcctttcaaacttaatcttattagaatattagtggaagaaagattctataataatgaatgcagatctaataaatggagaataattggaacacaagttgataaaatgttgatagctgaatctgataaatatacaatagatgcaaggtataacctaaaacccatgtatagaatcaagggaaaatctgaagaagataccctcttcatcaaacagatggtagaacaatgtgtgacatcccaggaattggtggaaaaagtgttgaagatactgtttagagatttgttcaagagtggagaatacaaagcatacagatacgatgatgatgtagaaaatggatttattggattggatacactaaaattaaacattgttcatgatatagttgaaccatgtatgcctgttcgtaggccagtggctaagatactgtgtaaagaaatggtaaataaatactttgagaatccgctacatattattggtaaaaatcttcaagagtgcattgactttgttagtgaataggcatttcatctttctccaatactaattcaaattgttaaattaataatggatagtataaatagttattagtgataaaatagtaaaaataattattagaataagagtgtagtatcatagataactctcttctataaaaatggattttattcgtagaaagtatcttatatacacagtagaaaataatatagattttttaaaggatgatacattaagtaaagtaaacaattttaccctcaatcatgtactagctctcaagtatctagttagcaattttcctcaacacgttattactaaggatgtattagctaataccaatttttttgttttcatacatatggtacgatgttgtaaagtgtacgaagcggttttacgacacgcatttgatgcacccacgttgtacgttaaagcattgactaagaattatttatcgtttagtaacgcaatacaatcgtacaaggaaaccgtgcataaactaacacaagatgaaaaatttttagaggttgccgaatacatggacgaattaggagaacttataggcgtaaattatgacttagttcttaatccattatttcacggaggggaacccatcaaagatatggaaatcatttttttaaaactgtttaagaaaacagacttcaaagttgttaaaaaattaagtgttataagattacttatttgggcatacctaagcaagaaagatacaggcatagagtttgcggataatgatagacaagatatatatactctatttcaacaaactggtagaatcgtccatagcaatctaacagaaacgtttagagattatatctttcccggagataagactagctattgggtgtggttaaacgaaagtatagctaatgatgcggatatcgttcttaatagacacgccattaccatgtatgataaaattcttagttatatatactctgagataaaacaaggacgcgttaataaaaacatgcttaagttagtttatatctttgagcctgaaaaagatatcagagaacttctgctagaaatcatatatgatattcctggagatatcctatctattattgatgcaaaaaacgacgattggaaaaaatattttattagtttttataaagctaattttattaacggtaatacatttattagtgatagaacgtttaacgaggacttattcagagttgttgttcaaatagatcccgaatatttcgataatgaacgaattatgtctttattctctacgagtgctgcggacattaaacgatttgatgagttagatattaataacagttatatatctaatataatttatgaggtgaacgatatcacattagatacaatggatgatatgaagaagtgtcaaatctttaacgaggatacgtcgtattatgttaaggaatacaatacatacctgtttttgcacgagtcggatcccatggtcatagagaacggaatactaaagaaactgtcatctataaaatccaagagtagacggctgaacttgtttagcaaaaacattttaaaatattatttagacggacaattggctcgtctaggtcttgtgttagatgattataaaggagacttgttagttaaaatgataaaccatcttaagtctgtggaggatgtatccgcattcgttcgattttctacagataaaaaccctagtattcttccatcgctaatcaaaactattttagctagttataatatttccatcatcgtcttatttcaaaggtttttgagagataatctatatcatgtagaagaattcttggataaaagcatccatctaaccaagacggataagaaatatatacttcaattgataagacacggtagatcatagaacagaccaaatatattattaataatttgtatatacatagatataattatcacatattaaaaattcacacatttttgataaatgggaactgctgcaacaattcagactcccaccaaattaatgaataaagaaaatgcagaaatgattttggaaaaaattgttgatcatatagttatgtatattagtgacgaatcaagtgattcagaaaataatcctgaatatattgattttcgtaacagatacgaagactatagatctctcattataaaaagtgatcacgagtttgtaaagctatgtaaaaatcatgcagagaaaagttctccagaaacgcaacaaatgattatcaaacacatatacgaacaatatcttattccagtatctgaagtactattaaaacctataatgtccatgggtgacataattacatataacggatgtaaagacaatgaatggatgctagaacaactctctaccctaaactttaacaatctccgcacatggaactcatgtagcataggcaatgtaacgcgtctgttttatacattttttagttatctgatgaaagataaactaaatatataagtataatcccattctaatactttaacctgatgtattacctgcatcttattagaatattaacctaactaaaagacataacataaaaactcattacatagttgataaaaagcggtaggatataaatattatggctgccaccgttccgcgttttgacgacgtgtacaaaaatgcacaaagaagaattctagatcaagaaacattttttagtagaggtctaagtagaccgttaatgaaaaacacatatctatttgataattacgcgtatggatggataccagaaactgcaatttggagtagtagatacgcaaacttagatgcaagtgactattatcccatttcgttgggattacttaaaaagttcgagtttctcatgtctctatataaaggtcctattccagtatacgaagaaaaagtaaatactgaattcatagccaatggatcgttctctggtagatacgtatcatatcttcgaaagttttctgctcttccaacaaacgagtttattagttttttgttactgacttccattccaatctataatatcttgttctggtttaaaaatactcagtttgatattactaaacacacattattcagatacgtctatacagataatgccaaacacctggcgttggctaggtatatgcatcaaacaggagactataagcctttgtttagtcgtctcaaagagaattatatatttaccggtcccgttccaataggtatcaaagatatagatcaccctaatcttagtagagcaagaagtccatccgattatgagacattagctaatattagtactatattgtactttaccaagtatgatccggtattaatgtttttattgttttacgtacctgggtattcaattactacaaaaattactccagccgtagaatatctaatggataaactgaatctaacaaagagcgacgtacaactgttgtaaattattttatgcttcgtaaaatgtaggttttgaaccaaacattctttcaaagaatgagatgcataaaactttattatccaatagattgactatttcggacgtcaatcgtttaaagtaaacttcgtaaaatattctttgatcactgccgagtttaaaacttctatcgataattgtctcatatgttttaatatttacaagttttttggtccatggtacattagccggacaaatatatgcaaaataatatcgttctccaagttctatagtttctggattatttttattatattcagtaaccaaatacatattagggttatctgcggatttataatttgagtgatgcattcgactcaacataaataattctagaggagacgatctactatcaaattcggatcgtaaatctgtttctaaagaacggagaatatctatacatacctgattagaattcatccgtccttcagacaacatctcagacagtctggttttgtacatcttaatcatattcttatgaaacttggaaacatctcttctagtttcactagtacctttattaattctctcaggtacagattttgaattcgacgatgccgagtatttcatcgttgtatatttcttcttcgattgcataatcagattcttatataccgcctcaaactctattttaaaattattaaacaatactctactattaatcagtcgttctaactctttcgctatttctatagacttatctacatcttgactgtctatctctgtaaacacggagtcggtatctccatacacgctacgaaaacgaaatctgtaatctataggcaacgatgttttcacaatcggattaatatctctatcgtccatataaaatggattacttaatggattggcaaaccgtaacataccgttagataactctgctccatttagtaccgattctagatacaagatcattctacgtcctatggatgtgcaactcttagccgaagcgtatgagtatagagcactatttctaaatcccatcagaccatatactgagttggctactatcttgtacgtatattgcatggaatcataaatggccttttcagttgaactggtagcctgttttaacatctttttatatctggctctctctgccaaaaatgttcttaatagtctaggaatggttccttctatcgatctatcgaaaattgctatttcagagatgaggttcggtagtctaggttcacaatgaaccgtaatatatctaggaggtggatatttctgaagcaatagctgattatttatttcttcttccaatctattggtactaacaacgacaccgactaatgtttccggagatagatttccaaagatacacacattaggatacagactgttataatcaaagattaatacattattactaaacattttttgttttggagcaaataccttaccgccttcataaggaaacttttgttttgtttctgatctaactaagatagttttagtttccaacaatagctttaacagtggacccttgatgactgtactcgctctatattcgaataccatggattgaggaagcacatatgttgacgcacccgcgtctgtttttgtttctactccataatactcccacaaatactgacacaaacaagcatcatgaatacagtatctagccatatctaaagctatgtttagattataatccttatacatctgagctaaatcaacgtcatcctttccgaaagataatttatatgtatcattaggtaaagtaggacataatagtacgactttaaatccattttcccaaatatctttacgaattactttacatataatatcctcatcaacagtcacataattacctgtggttaaaacctttgcaaatgcagcggctttgcctttcgcgtccgtagtatcgtcaccgatgaacgtcatttctctaactcctctatttaatactttacccatgcaactgaacgcgttcttggatatagaatccaatttgtacgaatccaatttttcagatttttgaatgaatgaatatagatcgaaaaatatagttccattattgttattaacgtgaaacgtagtattggccatgccgcctactcccttatgactagactgatttctctcataaatacagagatgtacagcttcctttttgtccggagatctaaagataatcttctctcctgttaataactctagacgattagtaatatatctcagatcaaagttatgtccgttaaaggtaacgacgtagtcgaacgttagttccaacaattgtttagctattcgtaacaaaactatttcagaacatagaactagttctcgttcgtaatccatttccattagtgactgtatcctcaaacatcctctatcgacggcttcttgtatttcctgttccgttaacatctcttcattaatgagcgtaaacaataatcgtttaccacttaaatcgatataacagtaacttgtatgcgagattgggttaataaatacagaaggaaacttcttatcgaagtgacactctatatctagaaataagtacgatcttgggatatcgaatctaggtatttttttagcgaaacagttacgtggatcgtcacaatgataacatccattgttaatctttgtcaaatattgctcgtccaacgagtaacatccgtctggagatatcccgttagaaatataaaaccaactaatattgagaaattcatccatggtggcattttgtatgctgcgtttctttggctcttctatcaaccacatatctgcgacggagcattttctatctttaatatctagattataacttattgtctcgtcaatgtctatagttctcatctttcccaacggcctcgcattaaatggaggaggagacaatgactgatatatttcgtccgtcactacgtaataaaagtaatgaggaaatcgtataaatacggtctcaccatttcgacatctggatttcagatataaaaatctgttttcaccgtgactttcaaaccaattaatgcaccgaacatccatttatagaatttagaaatatattttcatttaaatgaatcccaaacattggggaagagccgtatggaccattatttttatagtactttcgcaagcgggtttagacggcaacatagaagcgtgtaaacgaaaactatatactatagtcagcactcttccatgtcctgcatgtagacggcacgcgactatcgctatagaggacaataatgtcatgtctagcgatgatctgaattatatttattattttttcatcagattatttaacaatttggcatctgatcccaaatacgcgatcgatgtgacaaaggttaaccctttataaacttaacccattataaaacttatgattagtcacaactgaaataaccgcgtgattattttttggtataattctacacggcatggtttctgtaactatgaattcaacccccgttacattagtgaaatctttaacaaacagcaagggttcgtcaaagacataaaactcattgtttacaatcgaaatagaccccctatcacacttaaaataaaaaatatccttatcctttaccaccaaataaaattctgattggtcaatgtgaatgtattcacttaacagttccacaaatttatttattaactccgaggcacatacatcgtcggtattttttatggcaaactttactcttccagcatccgtttctaaaaaaatattaacgagttccatttatatcatccaatattattgaaatgacgttgatggacagatgatacaaataagaaggtacggtacctttgtccaccatctcctccaattcatgctctattttgtcattaactttaatgtatgaaaacagtacgccacatgcttccatgacagtgtgtaacactttggatacaaaatgtttgacattagtataattgttcaagactgtcaatctataatagatagtagctataatatattctatgatggtattgaagaagatgacaaccttggcatattgatcatttaacacagacatggtatcaacagatagcttgaatgaaagagaatcagtaattggaataagcgtcttctcgatagagtgtccgtataccaacatgtctgatattttgatgtattccattaaattatttagttttttctttttattttcgttaaacagcatttctgtcaacggaccccaacatcgttgaccgattaagttttgattgatttttccgtgtaatgcgtatctagtcagatcgtatagcctatccaataatccatcatctgtgcgtagatcacatcgtacactttttaattctctatagaagagcgacagacatctggagcaattacagacagcaatttctttattctctacagatgtaagatacttgaagacattcctatgatgatgcagaattttggataacacggtattgatggtatctgttaccataattcctttgatggctgatagtgtcagagcacaagatttccaatctttgacaatttttagcaccattatctttgttttgatatctatatcagacagcatggtgcgtctgacaacacagggattaagacggaaagatgaaatgattctctcaacatcttcaatggataccttgctattttttctggcattatctatatgtgcgagaatatcctctagagaatcagtatcctttttgatgatagtggatctcaatgacatgggacgtctaaaccttcttattttatcaccagattgcatggtgatttgtcttctttcttttatcataatgtaatctctaaattcatcggcaaattgtctatatctaaaatcataatatgagatgtttacctctacaaatatctgttcgtccaatgttagagtatctacatcagttttgtattccaaattaaacatggcaacggatttaattttatattcctctattaagtcctcgtcgataataacagaatgtagataatcatttaatccatcgtacatggttggaagatgcttgttgacaaaatctttaattgtcttgatgaaggtgggactatatctaacatcttgattaataaaatttataacattgtccataggatactttgtaactagttttatacacatctcttcatcggtaagtttagacagaatatcgtgaacaggtggtatattatattcatcagatatacgaagaacaatgtccaaatctatattgtttaatatattatatagatgtagcgtagctcctacaggaatatctttaactaagtcaatgatttcatcaaccgttagatctattttaaagttaatcatataggcattgatttttaaaaggtatgtagccttgactacattctcattaattaaccattccaagtcactgtgtgtaagaagattatattctatcataagcttgactacatttggtcccgataccattaaagaattcttatgatataaggaaacagcttttaggtactcatctactctacaagaattttggagagccttaacgatatcagtgacgtttattatttcaggaggaaaaaacctaacattgagaatgtcggagttaatagcttccagatacagtgattttggcaatagtccgtgtaatccataatccagtaacacgagctggtgcttgctagacaccttttcaatgtttaatttttttgaaataagctttgataaagccttcctcgcaaattccggatacatgaacatgtcggcgacatgattaagtattgttttttcattatttttatattttctcaacaagttctcaataccccaatagatgatagaatatcacccaatgcgtccatgttgtctatttccaacaggtcgctatatccaccaatagaagtttttccaaaaaagattctaggaacagttctaccaccagtaatttgttcaaaatagtcacgcaattcattttcgggtttaaattctttaatatcgacaatttcatacgctcctcttttgaaactaaacttatttagaatatccagtgcatttctacaaaaaggacatgtatacttgacaaaaattgtcactttgttattggccaacctttgttgtacaaattcctcggccattttaatatttaagtgatataaaactatctcgacttatttaactctttagtcgagatatatggacgcagatagctatatgatagccaactacagaaggcaaacgctataaaaaacataattacgacgagcatatttataaatatttttattcagcattacttgatatagtaatattaggcacagtcaaacattcaaccactctcgatacattaactctctcattttctttaacaaattctgcaatatcttcgtaaaaagattcttgaaactttttagaatatctatcgactctagatgaaatagcgttcgtcaacatactatgttttgtatacataaaggcgcccattttaacagtttctagtgacaaaatgctagcgatcctaggatcctttagaatcacatagattgacgattcgtctctcttagtaactctagtaaaataatcatacaatctagtacgcgaaataatattatccttgacttgaggagatctaaacaatctagttttgagaacatcgataagttcatcgggaatgacatacatactatctttaatagaactcttttcatccagttgaatggattcgtccttaaccaactgattaatgagatcttctattttatcattttccagatgatatgtatgtccattaaagttaaattgtgtagcgcttctttttagtctagcagccaatactttaacatcactaatatcgatatacaaaggagatgatttatctatggtattaagaattcgtttttcgacatctgtcaaaaccaattcctttttgcctgtatcatccagttttccatcctttgtaaagaaattattttctactagactattaataagactgataaggattcctccataattgcacaatccaaactttttaacaaaactagactttacaagatctacaggaatgcgtacttcaggtttcttagcttgtgattttttcttttgtggacattttcttgtgaccaactcatctaccatttcattgattttagcagtgaaataagctttcaatgcacgggcactgatactattgaaaacgagttgatcttcaaattccgccatttaagttcaccaaacaacttttaaatacaaatatatcaatagtagtagaataagaactataaaaaaaataataattaaccaataccaaccccaacaaccggtattattagttgatgtgactgttttctcatcacttagaacagatttaacaatttctataaagtctgtcaaatcatcttccggagaccccataaatacaccaaatatagcggcgtacaacttatccatttatacattgaatattggcttttctttatcgctatcttcatcatattcatcatcaatatcaacaagtcccagattacgagccagatcttcttctacattttcagtcattgatacacgttcactatctccagagagtccgataacgttagccaccacttctctatcaatgattagtttcttgagtgcgaatgtaatttttgtttccgttccggatctatagaaaactacaggtgtgataattgccttggccaattgtctttctcttttactgagtgattctagttcaccttctatagatctgagaatggatgattctccagtcgaaacatattctaccatggatccgtttaatttgttgatgaagatggattcatccttaaatgttttctctgtaatagtttccaccgaaagactatgcaaagaatttggaatgcgttccttgtgcttaatgtttccatagacggcttctagaagttgatacaacataggactagccgcggtaacttttatttttagaaagtatccatcgcttctatcttgtttagatttatttttataaagtttagtctctccttccaacataataaaagtggaagtcatttgactagataaactatcagtaagttttatagagatagacgaacaattagcgtattgagaagcatttagtgtaacgtattcgatacattttgcattagatttactaatcgattttgcatactctataacacccgcacaagtctgtagagaatcgctagatgcagtaggtcttggtgaagtttcaactctcttcttgattaccttactcatgattaaacctaaataattgtactttgtaatataatgatatatattttcactttatctcatttgagaataaaaatgtttttgtttaaccactgcatgatgtacagatttcggaatcgcaaaccaccagtggttttattttatccttgtccaatgtgaattgaatgggagcggatgcgggtttcgtacgtagatagtacattcccgtttttagaccgagactccatccgtaaaaatgcatactcgttagtttggaataactcggatctgctatatggatattcatagattgactttgatcgatgaaggctcccctgtctgcagccatttttatgatcgtcttttgtggaatttcccaaatagttttataaactcgcttaatatcttctggaaggtttgtattctgaatggatccaccatctgccataatcctattcttgatctcatcattccataattttctctcggttaaaactctaaggagatgcggattaactacttgaaattctccagacaatactctccgagtgtaaatattactggtatacggttccaccgactcattatttcccaaaatttgagcagttgatgcagtcggcataggtgccaccaataaactatttctaagaccgtatgttctgattttatcttttagaggttcccaattccaaagatccgacggtacaacattccaaagatcatattgtagaataccgttactggcgtacgatcctacatatgtatcgtatggtccttccttctcagctagttcacaactcgcctctaatgcaccgtaataaatggtttcgaagatcttcttatttagatcttgtgcttccaggctatcaaatggataatttaagagaataaacgcgtccgctaatccttgaacaccaataccgataggtctatgtctcttattagagatttcagcttctggaataggataataattaatatctataattttattgagatttctgacaattactttgaccacatccttcagtttgagaaaatcaaatcgcccatctattacaaacatgttcaaggcaacagatgccagattacaaacggctacctcattagcatccgcatattgtattatctcagtgcaaagattactacacttgatagttcctaaattttgttgattactctttttgttacacgcatccttataaagaatgaatggagtaccagtttcaatctgagattctataatcgctttccagacgactcgagcctttattatagatttgtatctcctttctctttcgtatagtgtatacaatcgttcgaactcgtctccccaaacattgtccaatccaggacattcatccggacacatcaacgaccactctccgtcatccttcactcgtttcataaagagatcaggaatccaaagagctataaatagatctctggttctatgttcctcgtttcctgtattctttttaagatcgaggaacgccataatatcagaatgccacggttccaagtatatggccataactccaggccgtttgtttcctccctgatctatgtatctagcggtgttattataaactctcaacattggaataataccgtttgatataccattggtaccggagatatagcttccactggcacgaatattactaattgatagacctattccccctgccattttagagattaatgcgcatcgttttaacgtgtcatagataccctctatgctatcatcgatcatgttaagtagaaaacagctagacatttggtgacgactagttcccgcattaaataaggtaggagaagcgtgcgtaaaccatttttcagaaagtagattgtacgtctcaatagctgagtctatatcccattgatgaattcctactgcgacacgcattaacatgtgctgaggtctttcaacgatcttgttgtttattttcaacaagtaggatttttccaaagttttaaaaccaaaatagttgtatgaaaagtctcgttcgtaaataataaccgagttgagtttatccttatatttgttaactatatccatggtgatacttgaaataatcggagaatgtttcccatttttaggattaacatagttgaataaatcctccatcacttcactaaatagtttttttgtttccttgtgtagatttgatacggctattctggcggctagaatggcataatccggatgttgtgtagtacaagtggctgctatttcggctgccagagtgtccaattctaccgttgttactccattatatattccttgaataaccttcatagctattttaataggatctatatgatccgtgtttaagccataacataattttctaatacgagacgtgattttatcaaacatgacattttccttgtatccatttcgtttaatgacaaacatttttgttggtgtaataaaaaaattatttaacttttcattaatagggatttgacgtatgtagcgtacaaaattatcgttcctggtatatagataaagagtcctatatatttgaaaatcgttacggctcgattaaactttaatgattgcatagtgaatatatcattaggatttaactccttgactatcagggcggcaccagaaattaccatcaaaagcattaatacagttatgccgatcgcagttagaacggttatagcatccaccatttatatctaaaaattagatcaaagaatatgtgacaaagtcctagttgtatactgagaattgacgaaacaatgtttcttacatatttttttcttattagtaactgacttaatagtaggaactggaaagctagacttgattattctataagtatagatacccttccaaataatattctctttgataaaagttccagaaaatgtagaattttttaaaaagttatcttttgctattaccaagattgtgtttagacgcttattattaatatgagtgatgaaatccacaccgcctctagatatcgcttttatttccacattagatggtaaatccaatagtgaaactatctttttaggaatgtatggactcgcgtttagaggagtgaacgtcttaggcgtcggaaaggatgattcatcaaacgaataaacaatttcacaaatggatgttaatgtattagtaggaaattttttgacgctagtggaattgaagattctaatggatgatgttctacctatttcatccgataacatgttaatttccgacaccaacggttttaatatttcgatgatatacggtagtctctctttcggacttatatagcttattccacaatacgagtcattatatactccaaaaaacaaaataactagtataaaatctgtatcgaatgggaaaaacgaaattatcgacataggtatagaatctggaacattgaacgtattaatacttaattctttttctgtggtaagtaccgataggttattgacattgtatggttttaaatattctataacttgagacttgatagatattagtgatgaattgaaaattatttttatcaccacgtgtgtttcaggatcatcgtcgacgcccgtcaaccaaccgaatggagtaaaataaatatcattaatatatgctctagatattagtatttttatcaatcctttgattatcatcttctcgtaggcgaatgattccatgatcaagagtgatttaagaacatcctccggagtattaatgggcttagtaaacagtccatcgttgcaataataaaagttatccaagttaaaggatattatgcattcgtttaaagatatcacctcatctgacggagacaattttttggtaggttttagagactttgaagctacttgtttaacaaagttattcatcgtcgtttactattctatttaattttgtagttaatttatcacatatcacattaattgactttttggtccatttttccatacgtttatattcttttaatcctgcgttatccgtttccgttatatccagggatagatcttgcaagttaaatagaatgctcttaaataatgtcatttttttatccgctaaaaatttaaagaatgtataaacttttttcaaagatttaaaacttttaggtggagttctagtacacaatatcataaacaaactaataaacatcccgcattcagattccaacagctgattaacttccacattaatacagcctattttcgctccaaatgtacattcgaaaaatctgaataaaacatcgatgtcacaatttgtattatccaatacagaatgtctgtgattcgtgttaaaaccatcggagaaggaatagaaataaaaattattatagtggtggaattcagttggaatattgcctccggagtcataaaaggatactaaacattgttttttatcataaattacacatttccaatgagacaaataacaaaatccaaacattacaaatctagaggtagaacttttaattttgtctttaagtatatacgataagatatgtttattcataaacgcgtcaaatttttcatgaatcgctaaggagtttaagaatctcatgtcaaattgtcctatataatccacttcggatccataagcaaactgagagactaagttcttaatacttcgattgctcatccaggctcctctctcaggctctattttcatcttgacgacctttggattttcaccagtatgtattcctttacgtgataaatcatcgattttcaaatccatttgtgagaagtctatcgccttagatactttttcccgtagtcgaggtttaaagaaatacgctaacggtatactagtaggtaactcaaagacatcatatatagaatggtaacgcgtctttaactcgtcggttaactctttcttttgatcgagttcgtcgctactattgggtctgctcaggtgccccgactctactagttccaacatcataccgataggaatacaagacactttgccagcggttgtagatttatcatatttctccactacatatccgttacaatttgttaaaaatttagatacatctatattgctacataatccagctagtgaatatatatgacataataaattggtaaatcctagttctggtattttactaattactaaatctgtatatctttccatttatcatggaaaagaatttaccagatatcttcttttttccaaactgcgttaatgtattctcttacaaatattcacaagatgaattcagtaatatgagtaaaacggaacgtgatagtttctcattggcggtgtttccagttataaaacatagatggcataacgcacacgttgtaaaacataaaggaatatacaaagttagtacagaagcacgtggaaaaaaagtatctcctccatcactaggaaaacccgcacacataaacctaaccgcgaagcaatatatatacagtgaacacacaataagctttgaatgttatagttttctaaaatgtataacaaatacagaaatcaattcgttcgatgagtatatattaagaggactattagaagctggtaatagtttacagatattttccaattccgtaggtaaacgaacagatactataggtgtactagggaataagtatccatttagcaaaattccattggcctcattaactcctaaagcacaacgagagatattttcagcgtggatttctcatagacctgtagttttaactggaggaactggagtgggtaagacgtcacaggtacccaagttattgctttggtttaattatttatttggtggattctctactctagataaaatcactgactttcacgaaagaccagtcattctatctcttcctaggatagctttagttagattgcatagcaataccattttaaaatcattgggatttaaggtactagatggatctcctatttctttacggtacggatctataccggaagaattaataaacaaacaaccaaaaaaatatggaattgtattttctacccataagttatctctaacaaaactatttagttatggcactcttattatagacgaagttcatgagcatgatcaaataggagatattattatagcagtagcgagaaagcatcatacgaaaatagattctatgtttttaatgactgccacgttagaggatgacagggaacggctaaaagtatttttacctaatcccgcatttatacatattcctggagatacactgtttaaaattagcgaggtatttattcataataagataaatccatcttccagaatggcatacatagaagaagaaaagagaaatttagttactgctatacagatgtatactcctcctgatggatcatccggtatagtctttgtggcatccgttgcacagtgtcacgaatataaatcatatttagaaaaaagattaccgtatgatatgtatattattcatggtaaggtcttagatatagacgaaatattagaaaaagtgtattcatcacctaatgtatcgataattatttctactccttatttggaatccagcgttactatacacaatgttacacacatttatgatatgggtagagtttttgtccccgctccttttggaggatcgcaacaatttatttctaaatctatgagagatcaacgaaaaggaagagtaggaagagttaatcctggtacatacgtctatttctatgatctgtcttatatgaagtctatacagcgaatagattcagaatttctacataattatatattgtacgctaataagtttaatctaacactccccgaagatttgtttataatccctacaaatttggatattctatggcgtacaaaggaatatatagactcgttcgatattagtacagaaacatggaataaattattatccaattattatatgaagatgatagagtatgctaaactttatgtactaagtcctattctcgctgaggagttggataactttgagaggacgggagaattaactagtattgtacgagaagccattttatctctaaatttacgaattaagattttaaattttaaacataaagatgatgatacgtatatacacttttgtaaaatattattcggtgtctataacggaacaaacgctactatatattatcatagacctctaacgggatatatgaatatgatttcagatactatatttgttcctgtagataataactaaaaatcaaactctaatgaccacatctttttttagagatgaaaaattttctacatctccttttgtagacacgactaaacattttgcagaaaaaagtttattagtgtttagataatcgtatacttcatcagtgtagatagtaaatgtgaacagataaaaggtattcttgctcaatagattggtaaattccatagaatatattaatcctttcttcttgagatcccacatcatttcaaccagagacgttttatccaatgatttacctcgtactataccacatacaaaactagattttgcagtgacgtcgtacctggtattcctaccaaacaaaattttacttttagttcttttagaaaattctaaggtagaatctctatttgccaatatgtcatctatggaattaccactagcaaaaaatgatagaaatatatattgatacatcgcagctggttttgatctactatactttaaaaacgaatcagattccataattgcctgtatatcatcagctgaaaaactatgttttacacgtattccttcggcatttctttttaatgatatatcttgtttagacaatgataaagttatcatgtccatgagagacgcgtctccgtatcgtataaatatttcattagatgttagacgcttcattaggggtatacttctataaggtttcttaatcagtccatcattggttgcgtcaagaactactatcggatgttgttgggtatctctagtgttacacatggccttactaaagtttgggtaaataactatgatatctctattaattatagatgcatatatttcattcgtcaaggatattagtatcgacttgctatcgtcattaatacgtgtaatgtaatcatataaatcatgcgatagccaaggaaaatttaaatagatgttcatcatataatcgtcgctataattcatattaatacgttgacattgactaatttgtaatatagcctcgccacgaagaaagctctcgtattcagtttcatcgataaaggataccgttaaatataactggttgccgatagtctcatagtctattaagtggtaagtttcgtacaaatacagaatccctaaaatattatctaatgttggattaatctttaccataactgtataaaatggagacggagtcataactattttaccgtttgtacttactggaatagatgaaggaataatctccggacatgctggtaaagacccaaatgtctgtttgaagaaatccaatgttccaggtcctaatctcttaacaaaaattacgatattcgatcccgatatcctttgcattctatttaccagcatatcacgaactatattaagattatctatcatgtctattctcccaccgttatataaatcgcctccgctaagaaacgttagtatatccatacaatggaatacttcatttctaaaatagtattcgttttctaattctttaatgtgaaatcgtatactagaaagggaaaaattatctttgagttttccgttagaaaagaaccacgaaactaatgttctgattgcgtccgattccgttgctgaattaatggatttacaccaaaaactcatataacttctagatgtagaagcattcgctaaaaaattagtagaatcaaaggatataagtagatgttccaacaagtgagcaattcccaagatttcatctatatcattctcgaatccgaaattagaaattcccaagtagatatcctttttcatccgatcgttgatgaaaatacgaactttattcggtaagacaatcatttactaaggagtaaaataggaagtaatgttcgtatgtcgttatcatcgtataaattaaaggtgtgttttttaccattaagtgacattataattttaccaatattggaattataatataggtgtatttgcgcactcgcgacggttgatgcatcggtaaatatagctgtatctaatgttctagtcggtatttcatcatttcgctgtctaataatagcgttttctctatctgtttccattacagctgcctgaagtttattggtcggataatatgtaaaataataagaaatacatacgaataacaaaaataaaataagatataataaagatgccatttagagatctaattttgttcaacttgtccaaattcctacttacagaagatgaggaatcgttggagatagtgtcttccttatgtagaggatttgaaatatcttatgatgacttgataacttactttccagataggaaataccataaatatatttataaagtatttgaacatgtagatttatcggaggaattaagtatggaattccatgatacaactttgcgagatttagtttatcttagattgtacaagtattccaagtgtatacggccgtgttataaattaggagataatctaaaaggcatagttgttataaaggacaggaatatttatattagggaagcaaatgatgacttgatagaatatctcctcaaggaatacactcctcagatttatacatattctaatgagcgcgtccccataactggttcaaaattaattctttgtggattttctcaagttacatttatggcgtatacaacgtcgcatataacaacaaataaaaaggtagatgttctcgtttccaaaaaatgtatagatgaactagtcgatccaataaattatcaaatacttcaaaatttatttgataaaggaagcggaacaataaacaaaatactcaggaagatattttattcggtaaccggtggccaaactccataggtagctttttctatttcggattttagaatttccaaattcaccagcgatttatcggttttggtgaaatccaaggatttattaatgtccacaaatgccatttgttttgtctgtggattgtatttgaaaatggaaacgatgtagttagatagatgcgctgcgaagtttcctattagggttccgcgcttcacgtcacccagcatacttgaatcaccatcctttaaaaaaaatgataagatatcaacatggagtatatcatactcggattttaattcttctactgcatcactgacattttcacaaatactacaatacggtttaccgaaaataatcagtacgttcttcatttatgggtatcaaaaacttaaaatcgttactgctggaaaataaatcactgacgatattagatgataatttatacaaagtatacaatggaatatttgtggatacaatgagtatttatatagccgtcgccaattgtgtcagaaacttagaagagttaactacggtattcataaaatacgtaaacggatgggtaaaaaagggagggcatgtaaccctttttatcgatagaggaagtataaaaattaaacaagacgttagagacaagagacgtaaatattctaaattaaccaaggacagaaaaatgctagaattagaaaagtgtacatccgaaatacaaaatgttaccggatttatggaagaagaaataaaggcaaaaatgcaattaaaaatcgataaacttacatttcaaatatatttatctgattctgataacataaaaatatcattgaatgagatactaacacatttcaacaataatgagaatgttacattattttattgtgatgaacgagacgcagaattcgttatgtgtctcgaggctaaaacacatttctctaccacaggagaatggccgttgataataagtaccgatcaggatactatgctatttgcatctactgataatcatcctaagatgataaaaaacttaactcaactgtttaaatttgttccctcggcagaggataactatttagcaaaattaacggcgttagtgaatggatgtgatttctttcctggactctatggggcatctataacacccaccaacttaaacaaaatacaattgtttagtgattttacaatcgataatatagtcactagtttggcaattaaaaattattatagaaagactaactctaccgtagacgtgcgtaatattgttacgtttataaacgattacgctaatttagacgatgtctactcgtatgttcctccttgtcaatgcactgttcaagaatttatattttccgcattagatgaaaaatggaatgaatttaaatcatcttatttagagaccgttccgttaccctgtcaattaatgtacgcgttagaaccacgtaaggagattgatgtttcagaagttaaaactttatcatcttatatagatttcgaaaatactaaatcagatatcgatgttataaaatctatatcctcgatttttggatattctaacgaaaactgtaacacgatagtattcggcatctataaggataatttactactgagtataaataattcattttactttaacgatagtctgttaataaccaatactaaaagtgataatataataaatataggttactagattaaaaatggtgttccaactcgtgtgctctacatgcggtaaagatatttctcacgaacgatataaattgattatacgaaaaaaatcattaaaggatgtactcgtcagtgtaaagaacgaatgttgtaggttaaaattatctacacaaatagaacctcaacgtaacttaacagtgcaacctctattggatataaactaatatggatccggttaattttatcaagacatatgcgcctagaggttctattatttttattaattataccatgtcattaacaagtcatttgaatccatcgatagaaaaacatgtgggtatttattatggtacgttattatcggaacacttggtagttgaatctacctatagaaaaggagttcgaatagtcccattggatagtttttttgaaggatatcttagtgcaaaagtatacatgttagagaatattcaagttatgaaaatagcagctgatacgtcattaactttattgggtattccgtatggatttggtcatgatagaatgtattgttttaaattggtagctgactgttataaaaatgccggtgttgaaacatcgtctaaacgaatattaggtaaagatatttttctgagccaaaacttcacagacgataatagatggataaagatatatgattctaataatttaacattttggcaaattgattaccttaaagggtgagttaatatgcataactactcctccgttgttttttccctcgttctttttcttaacgttgtttgccatcactctcataatgtaaagatattctaaaatggtaaacttttgcatatcggacgcagaaattggtataaatgttgtaattgtattatttcccgtcaatggactagtcacagctccatcagttttatatcctttagagtatttctcactcgtgtctaacattctagagcattccatgatctgtttatcgttgatattggccggaaagatagattttttattttttattatattactattggcaattgtagatataacttctggtaaatatttttctaccttttcaatctcttctattttcaagccggctatatattctgctatattgttgctagtatcaataccttttcttgctaagaagtcatatgtggtattcactatatcagttttaactggtagttccattagcctttccacttctgcagaataatcagaaattggttctttaccagaaaatccagctactataataggctcaccgatgatcattggcaaaatcctatattgtaccagattaatgagagcatatttcatttccaataattctgctagttcttgagacattgatttatttgatgaatctagttggttctctagatactctaccatttctgccgcatacaataacttgttagataaaatcagggttatcaaagtgtttagcgtggctagaatagtgggcttgcatgtattaaagaatgcggtagtatgagtaaaccgttttaacgaattatatagtctccagaaatctgtggcgttacatacatgagccgaatgacatcgaagattgtccaatatttttaatagctgctctttgtccattatttctatatttgactcgcaacaattgtagataccattaatcactgattcctttttcgatgccggacaatagcacaattgtttagctttggactctatgtattcagaattaatagatatatctcttaatacagattgcactatacattttgaaactatgtcaaaaattgtagaacgacgctgttctgcagccatttaactttaaataatttacaaaaatttaaaatgagcatccgtataaaaatcgataaactgcgccaaattgtggcatatttttcagagttcagtgaagaagtgtctataaatgtagactcgacggatgagttaatgtatatttttgccgccttgggcggatctgtaaacatttgggccattatacctctcagtgcatcagtgttctaccgcggagccgaaaatattgtgtttaatcttccggtgtccaaggtaaaatcgtgtttgtgtagttttcacaatgatgccatcatagatatagaacctgatctggaaaataatctagtaaaactttctagttatcatgtagtaagtgtcgattgtaacaaggaactgatgcctattaggacagatactactatttgtctaagtatagatcaaaagaaatcttacgtgtttaattttcacaagtatgaagaaaaatgttgtggtagaaccgtcattcatttagaatggttgttgggctttatcaagtgtattagtcagcatcagcatttggctattatgtttaaagatgacaatattattatgaagactcctggtaatactgatgcgttttccagggaatattctatgactgaatgttctcaagaactacaaaagttttctttcaaaatagctatctcgtctctcaacaaactacgaggattcaaaaagagagtcaatgtttttgaaactagaatcgtaatggataatgacgataacattctaggaatgttgttttcggatagagttcaatcctttaagatcaacatctttatggcgtttttagattaatactttcaatgagataaatatgggtggcggagtaagtgttgagctccctaaacgggatccgcctccgggagtacccactgatgagatgttattaaacgtggataaaatgcatgacgtgatagctcccgctaagcttttagaatatgtgcatataggaccactagcaaaagataaagaggataaagtaaagaaaagatatccagagtttagattagtcaacacaggacccggtggtctttcggcattgttaagacaatcgtataatggaaccgcacccaattgctgtcgcacttttaatcgtactcattattggaagaaggatggaaagatatcagataagtatgaagagggtgcagtattagaatcgtgttggccagacgttcacgacactggaaaatgcgatgttgatttattcgactggtgtcagggggatacgttcgatagaaacatatgccatcagtggatcggttcagcctttaataggagtgatagaactgtagagggtcaacaatcgttaataaatctgtataataagatgcaaacattatgtagtaaagatgctagtgtaccaatatgtgaatcatttttgcatcatttacgcgcacacaatacagaagatagcaaagagatgatcgattatattctaagacaacagtctgcggactttaaacagaaatatatgagatgtagttatcccactagagataagttagaagagtcattaaaatatgcggaacctcgagaatgttgggatccagagtgttcgaatgccaatgttaatttcttactaacacgtaattataataatttaggactttgcaatattgtacgatgtaatactagcgtgaacaacttacagatggataaaacttcctcattaagattgtcatgtggattaagcaatagtgatagattttctactgttcccgtcaatagagcaaaagtagttcaacataatattaaacattcgttcgacctaaaattgcatttgatcagtttattatctctcttggtaatatggatactaattgtagctatttaaatgggtgccgcggcaagcatacagacgacggtgaatacactcagcgaacgtatctcgtctaaattagaacaagaagcgaacgctagtgctcaaacaaaatgtgatatagaaatcggaaatttttatatccgacaaaaccatggatgtaacctcactgttaaaaatatgtgctctgcggacgcggatgctcagttggatgctgtgttatcagccgctacagaaacatatagtggattaacaccggaacaaaaagcatacgtgccagctatgtttactgctgcgttaaacattcagacaagtgtaaacactgttgttagagattttgaaaattatgtgaaacagacttgtaattctagcgcggtcgtcgataacaaattaaagatacaaaacgtaatcatagatgaatgttacggagccccaggatctccaacaaatttggaatttattaatacaggatctagcaaaggaaattgtgccattaaagcgttgatgcaattgacgactaaggccactactcaaatagcacctagacaagttgctggtacaggagttcagttttatatgattgttatcggtgttataatattggcagcgttgtttatgtactatgccaagcgtatgctgttcacatccaccaatgataaaatcaaacttattttagccaataaggaaaacgtccattggactacttacatggacacattctttagaacttctccgatggttattgctaccacggatatacaaaactgaaaatatattgataatattttaatagattaacatggaagttatcgctgatcgtctagacgatatagtgaaacaaaatatagcggatgaaaaatttgtagattttgttatacacggtctagagcatcaatgtcctgctatacttcgaccattaattaggttgtttattgatatactattatttgttatagtaatttatatttttacggtacgtctagtaagtagaaattatcaaatgttgttggtggcgctagtcatcacattaactattttttattactttatactataatagtactagactgacttctaacaaacatctcacctgccataaataaatgcttgatattaaagtcttctatttctaacactattccatctgtggaaaataatactctgacattatcgctaattgacacatcggtgagtgatatgcctataaagtaataatcttctttgggcacatataccagtgtaccaggttctaacaacctatttactggtgctcctgtagcatactttttctttaccttgagaatatccatcgtttgcttggtcaatagcgatatgtgattttttatcaaccactcgaaaaagtaattggagtgttcatatcctctacgggctattgtctcatggccgtgtatgaaatttaagtaacacgactgtggtagatttgttctatagagccggttgccgcaaatagatagaactaccaatatgtctgtacaaatgttaaacattaattgattaacagaaaaaacaatgttcgttctgggaatagaaaccagatcaaaacaaaattcgttagaatatatgccacgtttatacattgaatataaaataactacagtttgaaaaataacagtatcatttaaacatttaacttgcggggttaatctcacaactttactgtttttaaactgttcaaaatatagcatcgatccatgagaaatacgtttagccgcctttaatagaggaaatcccaccgcctttctggatctcaccaacgacgatagttctgaccagcaactcatttcttcatcatccacctgttttaacatataataggcaggagatagatatccgtcattgcaatattccttctcgtaggcacacaatctaatattgataaaatctccattctcttctctgcatttattatcttgtttcggtggctgattaggctgtagtcttggtttaggctttggtatatcgttgttgaatctattttggtcattaaatctttcatttcttcctggtatatttttatcacctcgtttggttggatttttgtctatattatcgtttgtaacatcggtacgggtattcatttatcacaaaaaaaacttctctaaatgagtctactgctagaaaacctcatcgaagaagataccatattttttgcaggaagtatatctgagtatgatgatttacaaatggttattgccggcgcaaaatccaaatttccaagatctatgctttctatttttaatatagtacctagaacgatgtcaaaatatgagttggagttgattcataacgaaaatatcacaggagcaatgtttaccacaatgtataatataagaaacaatttgggtctaggagatgataaactaactattgaagccattgaaaactatttcttggatcctaacaatgaagttatgcctcttattattaataatacggatatgactgccgtcattcctaaaaaaagtggtaggagaaagaataagaacatggttattttccgtcaaggatcatcacctatcttgtgtattttcgaaactcgtaaaaagattaatatttataaagaaaatatggaatccgcatcgactgagtatacacctatcggagacaacaaggctttgatatctaaatatgcgggaattaatatcctaaatgtgtattctccttccacatccataagattgaatgccatttacggattcaccaataaaaataaactagagaaacttagtactaataaggaactagaatcgtatagttctagccctcttcaagaacccattaggttaaatgattttctgggactattggaatgtgttaaaaagaatattcctctaacagatattccgacaaaggattgattactataaatggagaatgttcctaatgtatactttaatcctgtgtttatagagcccacgtttaaacattctttattaagtgtttataaacacagattaatagttttatttgaagtattcgttgtattcattctaatatatgtattttttagatctgaattaaatatgttcttcatgcctaaacgaaaaatacccgatcctattgatagattacgacgtgctaatctagcgtgtgaagacgataaattaatgatctatggattaccatggatgacaactcaaacatctgcgttatcaataaatagtaaaccgatagtgtataaagattgtgcaaagcttttgcgatcaataaatggatcacaaccagtatctcttaacgatgttcttcgcagatgatgattcattttttaagtatttggctagtcaagatgatgaatcttcattatctgatatattgcaaatcactcaatatctagactttctgttattattattgatccaatcaaaaaataaattagaagccgtgggtcattgttatgaatctctttcagaggaatacagacaattgacaaaattcacagactttcaagattttaaaaaactgtttaacaaggtccctattgttacagatggaagggtcaaacttaataaaggatatttgttcgactttgtgattagtttgatgcgattcaaaaaagaatcctctctagctaccaccgcaatagatcctattagatacatagatcctcgtcgcgatatcgcattttctaacgtgatggatatattaaagtcgaataaagtgaacaataattaattctttattgtcatcatgaacggcggacatattcagttgataatcggccccatgttttcaggtaaaagtacagaattaattagacgagttggtacctgcagcggccgctcgagagctcggaggtaatgatatgtatcaatcggtgtgtagaaagtgttacatcgactcataatattatattttttatctaaaaaactaaaaataaacattgattaaattttaatataatacttaaaaatggatgttgtgtcgttagataaaccgtttatgtattttgaggaaattgataatgagttagattacgaaccagaaagtgcaaatgaggtcgcaaaaaaactaccgtatcaaggacagttaaaactattactaggagaattattttttcttagtaagttacagcgacacggtatattagatggtgccaccgtagtgtatataggatcggctcctggtacacatatacgttatttgagagatcatttctataatttaggagtgatcatcaaatggatgctaattgacggccgccatcatgatcctattttaaatggattgcgtgatgtgactctagtgactcggttcgttgatgaggaatatctacgatccatcaaaaaacaactgcatccttctaagattattttaatttctgatgtaagatccaaacgaggaggaaatgaacctagtacggcggatttactaagtaattacgctctacaaaatgtcatgattagtattttaaaccccgtggcatctagtcttaaatggagatgcccgtttccagatcaatggatcaaggacttttatatcccacacggtaataaaatgttacaaccttttgctccttcatattcagctgaaatgagattattaagtatttataccggtgagaacatgagactgactcgagttaccaaattagacgctgtaaattatgaaaaaaagatgtactaccttaataagatcgtccgtaacaaagtagttgttaactttgattatcctaatcaggaatatgactattttcacatgtactttatgctgaggaccgtgtactgcaataaaacatttcctactactaaagcaaaggtactatttctacaacaatctatatttcgtttcttaaatattccaacaacatcaactgaaaaagttagtcatgaaccaatacaacgtaaaatatctagcaaaaattctatgtctaaaaacagaaatagcaagagatccgtacgcggtaataaatagaaacgtgctactgagatatactaccgatatagagtataatgatttagttactttaataaccgttagacataaaattgattctatgaaaactgtgtttcaggtatttaacgaatcatccataaattatactccggttgatgatgattatggagaaccaatcattataacatcgtatcttcaaaaaggtcataacaagtttcctgtaaattttctatacatagatgtggtaatatctgacttatttcctagctttgttagactagatactacagaaactaatatagttaatagtgtactacaaacaggcgatggtaaaaagactcttcgtcttcccaaaatgttagagacggaaatagttgtcaagattctctatcgccctaatataccattaaaaattgttagatttttccgcaataacatggtaactggagtagagatagccgatagatctgttatttcagtcgctgattaatcaattagtagagatgagataagaacattataataatcaataatattatcttatatctcgtttagaaaaatgctaatattaaaatagctaacgctagtaatccaatcggaagccatttgatatctataatagggtatctaatttcctgattcagatagcggacagctatattctcggtagctactcgtttggaatcacaaacattatttacatctaatttactatctgtaatggaaacgtttcccaatgaaatggtacaatccgatacattgcattttgttatatttttttttaaagaggctggtaacaacgcatcgcttcgtttacatggctcgtaccaacaataatagggtaatcttgtatctattcctatccgtactatgcttttatcaggataaatacatttacatcgtatatcgtctttgttagcatcacagaatgcataaatttgttcgtccgtcatgataaaaatttaaagtgtaaatataactattatttttatagttgtaataaaaagggaaatttgattgtatactttcggttctttaaaagaaactgacttgataaaaatggctgtaatctctaaggttacgtatagtctatatgatcaaaaagagattaatgctacagatattatcattagtcatgttaaaaatgacgacgatatcggtaccgttaaagatggtagactaggtgctatggatggggcattatgtaaaacttgtgggaaaacggaattggaatgtttcggtcactggggtaaagtaagtatttataaaactcatatagttaagcctgaatttatttcagaaattattcgtttactgaatcatatatgtattcactgcggattattgcgttcacgagaaccgtattccgacgatattaacctaaaagagttatcgggacacgctcttaggagattaaaggataaaatattatccaagaaaaagtcatgttggaacagcgaatgtatgcaaccgtatcaaaaaattactttttcaaagaaaaaggtttgtttcgtcaacaagttggatgatattaacgttcctaattctctcatctatcaaaagttaatttctattcatgaaaagttttggccattattagaaattcatcaatatccagctaacttattttatacagactactttcccatccctccgctgattattagaccggctattagtttttggatagatagtatacccaaagagaccaatgaattaacttacttattaggtatgatcgttaagaattgtaacttgaatgctgatgaacaggttatccagaaggcggtaatagaatacgatgatattaaaattatttctaataacactaccagtatcaatttatcatatattacatccggcaaaaataatatgattagaagttatatcgtcgcccgacgaaaagatcagaccgctagatctgtaattggtcccagtacatctatcaccgttaatgaggtaggaatgcccgcatatattagaaatacacttacagaaaagatatttgttaatgcctttacagtggataaagttaaacaactattagcgtcaaaccaagttaaattttactttaataaacgattaaaccaattaacaagaatacgccaaggaaagtttatcaaaaataaaatacatttattgcctggtgattgggtagaagtagctgttcaagaatatacaagtattatttttggaagacagccgtctctacatagatacaacgtcatcgcttcatctatcagagctaccgaaggagatactatcaaaatatctcccggaattgccaactctcaaaatgctgatttcgacggagatgaagaatggatgatattggagcaaaatcctaaagccgtaattgaacaaagtattcttatgtatccgacgacgttactcaaacacgatattcatggagcccccgtttatggatctattcaagatgaaatcgtagcagcgtattcattgtttaggatacaagatctttgtttagatgaagtattgaacatcttggggaaatatggaagagagttcgatcctaaaggtaaatgtaaattcagcggtaaagatatctatacttacttgataggtgaaaagattaattatccgggtctcttaaaggatggtgaaattattgcaaacgacgtagatagtaattttgttgtggctatgaggcatctgtcattggctggactcttatccgatcataagtcgaacgtggaaggtatcaactttattatcaagtcatcttatgtttttaagagatatctatctatttacggttttggggtgacattcaaagatctgagaccaaattcgacgttcactaataaattggaggccatcaacgtagaaaaaatagaacttatcaaagaagcatacgccaaatatctcaacgatgtaagagacgggaaaatagttccattatctaaagctttagaggcggactatgtggaatccatgttatccaacttgacaaatcttaatatccgagagatagaagaacatatgagacaaacgctgatagatgatccagataataacctcctgaaaatggccaaagcgggttataaagtaaatcctacagaactaatgtatattctaggtacgtatggacaacaaaggattgatggtgaaccagcagagactcgagtattgggtagagtcttaccttactatcttccagactctaaggatccagaaggaagaggttacattcttaattctttaacaaaaggattaacgggttctcaatattacttttcgatgctggttgccagatctcaatctactgatatcgtctgtgaaacatcacgtaccggaacactggctagaaaaatcattaaaaagatggaggatatggtggtcgacggatacggacaagtagttataggtaatacgctcatcaagtacgccgccaattataccaaaattctaggctcagtatgtaaacctgtagatcttatctatccagatgagtccatgacttggtatttggaaattagtgctctgtggaataaaataaaacagggattcgtttactctcagaaacagaaacttgcaaagaagacattggcgccgtttaatttcctagtattcgtcaaacccaccactgaggataatgctattaaggttaaggatctgtacgatatgattcataacgtcattgatgatgtgagagagaaatacttctttacggtatctaatatagattttatggagtatatattcttgacgcatcttaatccttctagaattagaattacaaaagaaacggctatcactatctttgaaaagttctatgaaaaactcaattatactctaggtggtggaactcctattggaattatttctgcacaggtattgtctgagaagtttacacaacaagccctgtccagttttcacactactgaaaaaagtggtgccgtcaaacaaaaacttggtttcaacgagtttaataacttgactaatttgagtaagaataagaccgaaattatcactctggtatccgatgatatctctaaacttcaatctgttaagattaatttcgaatttgtatgtttgggagaattaaatccagacatcactcttcgaaaagaaacagataaatatgtagtagatataatagttaatagattatacatcaagagagcagaaataaccgaattagttgtcgaatatatgattgaacgatttatctcctttagcgtcattgtaaaggaatggggtatggagacattcattgaggacgaggataatattagatttactgtctacctaaatttcgttgaaccggaagaattgaatcttagtaagtttatgatggttcttccgggtgccgccaacaagggcaagattagtaaattcaagattcctatctctgattatacgggttatgacgacttcaatcaaacaaaaaagctcaataagatgactgtagaactcatgaatctaaaagaattgggttctttcgatttggaaaacgtcaacgtgtatcctggagtatggaatacatacgatatcttcggtatcgaggccgctcgtgaatacttgtgcgaagccatgttaaacacctatggagaagggttcgattatctgtatcagccttgtgatcttctcgctagtttactatgtgctagttacgaaccagaatcagttaataaattcaagttcggtgcagctagtactcttaagagagctacgttcggagacaataaagcattgttaaacgcggctcttcataaaaagtcagaacctattaacgataatagtagctgccacttttttagcaaggtccctaatataggaactggatattacaaatactttatcgacttgggtcttctcatgagaatggaaaggaaactatctgataagatatcttctcaaaagatcaaggaaatggaagaaacagaagacttttaattcttatcaataacatatttttctatgatctgtcttttaaacgatggattttccacaaatgcgcctctcaagtccctcatagaatgatacacgtataaaaaatatagcataggcaatgactccttatttttagacattagatatgccaaaatcatagccccgcttctatttactcccgcagcacaatgaaccaacacgggctcgtttcgttgatcacatttagataaaaaggcggttacgtcgtcaaaatatttactaatatcggtagttgtatcatctaccaacggtatatgaataatattaatattagagttaggtaatgtatatttatccatcgtcaaatttaaaacatatttgaacttaacttcagatgatggtgcatccatagcatttttataatttcccaaatacacattattggttacccttgtcattatagtgggagatttggctttgtgcatatctccagttgaacgtagtagtaagtatttatacaaacttttcttatccatttataacgtacaaatggataaaactactttatcggtaaacgcgtgtaatttagaatacgttagagaaaaggctatagtaggcgtacaagcagccaaaacatcaacacttatattctttgttattatattggcaattagtgcgctattactctggtttcagacgtctgataatccagtctttaatgaattaacgagatatatgcgaattaaaaatacggttaacgattggaaatcattaacggatagcaaaacaaaattagaaagtgatagaggtagacttctagccgctggtaaggatgatatattcgacttcaaatgtgtggatttcggcgcctattttatagctatgcgattggataagaaaacatatctgccgcaagctattaggcgaggtactggagacgcgtggatggttaaaaaggcggcaaaggtcgatccatctgctcaacaattttgtcagtatttgataaaacacaagtctaataatgttattacttgtggtaatgagatgttaaatgaattaggttatagcggttattttatgtcaccgcattggtgttccgattttagtaatatggaatagtgttagataaatgcggtaacgaatgttcctgtaaggaaccataacagtttagatttaacgttaaagatgagcataaacataataaacaaaattacaatcaaacctataacattaatatcaaacaatccaaaaaatgaaatcagtggagtagtaaacgcgtacataactcctggataacgtttagcagctgccgttcctattctagaccaaaaattcggtttcatgttttcgaagcggtgttctgcaacaagtcggggatcgtgttctacatatttggcggcgttatccagtatctgcctattgatcttcatttcgttttcgattctggctatttcaaaataaaatcccgatgatagacctccagactttataatttcatctacgatgttcagcgccgtagtaactctaataatataggctgataagctaacatcataccctcctgtatatgtgaatatggcatgatttttgtccattacaagctcggttttaactttattgcctgtaataatttctctcatctgtaggatatctatttttttgtcatgcattgccttcaagacgggacgaagaaacgtaatatcctcaataacgttatcgttttctacaataactacatattctacctttttattttctaactcggtaaaaaaattagaatcccatagggctaaatgtctagcgatatttcttttcgtttcctctgtacacatagtgttacaaaaccctgaaaagaagtgagtatacttgtcatcatttctaatgtttcctccagtccactgtataaacgcataatccttgtaatgatctggatcatccttgactaccacaacatttcttttttctggcataacttcgttgtcctttacatcatcgaacttctgatcattaatatgctcatgaacattaggaaatgtttctgatggaggtctatcaataactggcacaacaataacaggagttttcaccgccgccatttagttattgaaattaatcatatacaactctttaatacgagttatattttcgtctatccattgtttcacatttacatatttcgacaaaaagatataaaatgcgtattccaatgcttctctgtttaatgaattactaaaatatacaaacacgtcactgtctggcaataaatgatatcttagaatattgtaacaatttattttgtattgcacatgttcgtgatctatgagttcttcttcgaatggcataggatctccgaatctgaaaacgtataaataggagttagaataataatatttgagagtattggtaatatataaactctttagcggtataattagtttttttctctcaatttctatttttagatgtgatggaaaaatgactaattttgtagcattagtatcatgaactctaatcaaaatcttaatatcttcgtcacacgttagctctttgaagtttttaagagatgcatcagttggttctacagatggagtaggtgcaacaattttttgttctacacatgtatgtactggagccattgttttaactataatggtgcttgtatcgaaaaactttaatgcagatagcggaagctcttcgccgcgactttctacatcgtaattgggttctaacgccgatctctgaatggatactagttttctaagttctaatgtgattctctgaaaatgtaaatccaattcctccggcattatagatgtgtatacatcggtaaataaaactatagtatccaacgatcccttctcgcaaattctagtcttaaccaaaaaatcgtatataaccacggagatggcgtatttaagagtggattcttctaccgttttgttcttggatgtcatataggaaactataaagtccgcactactgttaagaatgattactaacgcaactatatagttcaaattaagcattttggaaacataaaataactctgtagacgatacttgactttcgaataagtttgcagacaaacgaagaaagaacagacctctcttaatttcagaagaaaactttttttcgtattcctgacgtctagagtttatatcaataagaaagttaagaattagtcggttaatgttgtatttcattacccaagtttgagatttcataatattatcaaaagacatgataatattaaagataaagcgctgactatgaacgaaatagctatatggttcgctcaagaatatagtcttgttaaacgtggaaacgataactgtatttttaatcacgtcagcggcatctaaattaaatataggtatatttattccacacactctacaatatgccacaccatcttcataataaataaattcgttagcaaaattattaattttagtgaaatagttagcgtcaactttcatagcttccttcaatctaatttgatgctcacacggtgcgaattccactctaacatcccttttccatgcctcaggttcatcgatctctataatatctagtttcttgcgtttcacaaacacgggctcgtctctcgcgatgagatctgtatagtaactatgtaaatgataactagatagaaagatgtagctatatagatgacgatcctttaagagaggtataataactttaccccaatcagataaactattgttatggtcttcggaaaaagaatttttataaatttttccagtattttccaaatatacgtacttgacatctaaaaaatccttaatgataataggaatggataatccgtctattttataaagaaatacatatcgcacattatacttttttttggaaatgggaataccgatgtgtctacataaatatgcaaagtctaaatattttttagagaatcttagttggtccaaattcttttccaagtacggtaatagatttttcatattgaacggtatcttcttaatctctggttctagttccgcattaaatgatgaaactaagtcactatttttataactaacgattacatcacctctaacatcatcatttaccagaatactgatcttcttttgtcgtaaatacatgtctaatgtgttaaaaaaaagatcatacaagttatacgtcatttcatctgtggtattcttgtcattgaaggataaactcgtactaatctcttctttaacagcctgttcaaatttatatcctatatacgaaaaaatagcaaccagtgtttgatcatccgcgtcaatattctgttctatcgtagtgtataacaatcgtatatcttcttctgtgatagtcgatacgttataaaggttgataacgaaaatatttttatttcgtgaaataaagtcatcgtaggattttggacttatattcgcgtctagtagatatgcttttatttttggaatgatctcaattagaatagtctctttagagtccatttaaagttacaaacaactaggaaattggtttatgatgtataatttttttagtttttatagattctttattctatacttaaaaaatgaaaataaatacaaaggttcttgagggttgtgttaaattgaaagcgagaaataatcataaattatttcattatcgcgatatccgttaagtttgtatcgtaatggcgtggtcaattacaaataaagcggatactagtagcttcacaaagatggctgaaatcagagctcatctaaaaaatagcgctgaaaataaagataaaaacgaggatattttcccggaagatgtaataattccatctactaagcccaaaaccaaacgagccactactcctcgtaaaccagcggctactaaaagatcaaccaaaaaggaggaagtggaagaagaagtagttatagaggaatatcatcaaacaactgaaaaaaattctccatctcctggagtcagcgacattgtagaaagcgtggccgctgtagagctcgatgatagcgacggggatgatgaacctatggtacaagttgaagctggtaaagtaaatcatagtgctagaagcgatctttctgacctaaaggtggctaccgacaatatcgttaaagatcttaagaaaattattactagaatctctgcagtatcgacggttctagaggatgttcaagcagctggtatctctagacaatttacttctatgactaaagctattacaacactatctgatctagtcaccgagggaaaatctaaagttgttcgtaaaaaagttaaaacttgtaagaagtaaatgcgtgcacttttttataaagatggtaaactctttaccgataataattttttaaatcctgtatcagacgataatccagcgtatgaggttttgcaacatgttaaaattcctactcatttaacagatgtagtagtatatgaacaaacgtgggaggaggcgttaactagattaatttttgtgggaagcgattcaaaaggacgtagacaatacttttacggaaaaatgcatgtacagaatcgcaacgctaaaagagatcgtatttttgttagagtatataacgttatgaaacgaattaattgttttataaacaaaaatataaagaaatcgtccacagattccaattatcagttggcggtttttatgttaatggaaactatgttttttattagatttggtaaaatgaaatatcttaaggagaatgaaacagtagggttattaacactaaaaaataaacacatagaaataagtcccgatgaaatagttatcaagtttgtaggaaaggacaaagtttcacatgaatttgttgttcataagtctaatagactatataagccgctattgaaactgacggatgattctagtcccgaagaatttctgttcaacaaactaagtgaacgaaaggtatacgaatgtatcaaacagtttggtattagaatcaaggatctccgaacgtatggagtcaattatacgtttttatataatttttggacaaatgtaaagtccatatctcctcttccatcaccaaaaaagttaatagcgttaactatcaaacaaactgctgaagtggtaggtcatactccatcaatttcaaaaagagcttacatggcaacgactattttagaaatggtaaaggataaaaattttttagatgtagtatctaaaactacgttcgatgaattcctatctatagtcgtagatcacgttaaatcatctacggatggatgatatagatctttacacaaataattacaagaccgataaatggaaatggataagcgtatgaaatctctcgcaatgacagctttcttcggagagctaaacacattagatattatggcattgataatgtctatatttaaacgccatccaaacaataccattttttcagtggataaggatggtcagtttatgattgatttcgaatacgataattataaggcttctcaatatttggatctgaccctcactccgatatctggagatgaatgcaagactcacgcatcgagtatagccgaacaattggcgtgtgtggatattattaaagaggatattagcgaatatatcaaaactactccccgtcttaaacgatttataaaaaaataccgcaatagatcagatactcgtatcagtcgagatacagaaaagcttaaaatagctctagctaaaggcatagattacgaatatataaaagacgcttgttaataagtaaatgaaaaaaaactagtcgtttataataaaacacaatatggatgccaacatagtatcatcttctactattgcaacgtatatagacgctttagcaaagaatgcttcagaattagaacagaggtctaccgcatacgaaataaataatgaattggaactagtatttattaagccgccattaattactttgacaaatgtagtgaatatctctacgattcaggaatcgtttattcgatttaccgttactaataaggaaggtgtcaaaattagaactaagattccattatctaaggtacatggtctagatgtaaaaaatgtacagttagtagatgctatagataacatagtttgggaaaagaaatcattagtgacggaaaatcgtcttcacaaagaatgcttgttgagactatcgacagaggaacgtcatatatttttggattacaagaaatatggatcctctatccgactagaattagtcaatcttattcaagcaaaaacaaaaaactttacgatagactttaagctaaaatattttctaggatccggtgcccaatctaaaagttctttgttgcacgctattaatcatccaaagtcaaggcctaatacatctctggaaatagaattcacacctagagacaatgaaaaagttccatatgatgaactaataaaggaattgacgactctatcacgtcatatatttatggcttctccagagaatgtaattctttctccgcctattaacgcacctataaagacttttatgttgcctaaacaagatatagtaggtctggatctggaaaatctatatgccgtaactaagactgacggcattcctataactatcagagttacatcaaacgggttgtattgttattttacacatcttgggtatattattagatatccagttaagagaataatagattccgaagtagtagtctttggtgaggcagttaaggataagaactggaccgtatatctcattaagctaatagagcctgtgaatgcaatcaatgatagactagaagaaagtaagtatgttgaatctaaactagtggatatttgtgatcggatagtattcaagtcaaagaaatatgaaggtccgtttactacaactagtgaagtcgtcgatatgttatctacatatttaccaaagcaaccagaaggtgttattctgttctattcaaagggacctaaatctaacattgattttaaaattaaaaaggaaaatactatagaccaaactgcaaatgtagtatttaggtacatgtccagtgaaccaattatctttggagaatcgtctatctttgtagagtataagaaatttagcaacgataaaggctttcctaaagaatatggttctggtaagattgtgttatataacggcgttaattatctaaataatatctattgtttggaatatattaatacacataatgaagtgggtattaagtccgtggttgtacctattaagtttatagcagaattcttagttaatggagaaatacttaaacctagaatcgataaaaccatgaaatatattaactcagaagattattatggaaatcaacataatatcatagtcgaacatttaagagatcaaagcatcaaaataggagatatctttaacgaggataaactatcggatgtgggacatcaatacgccaataatgataaatttagattaaatccagaagttagttattttacgaataaacgaactagaggaccgttgggaattttatcaaactacgtcaagactcttcttatttctatgtattgttccaaaacatttttagacgattccaacaaacgaaaggtattggcgattgattttggaaacggtgctgacctggaaaaatacttttatggagagattgcgttattggtagcgacggatccggatgctgatgctatagctagaggaaatgaaagatacaacaaattaaactctggaattaaaaccaagtactacaaatttgactacattcaggaaactattcgatccgatacatttgtctctagtgtcagagaagtattctattttggaaagtttaatatcatcgactggcagtttgctatccattattcttttcatccgagacattatgctaccgtcatgaataacttatccgaactaactgcttctggaggcaaggtattaatcactaccatggacggagacaaattatcaaaattaacagataaaaagacttttataattcataagaatttacctagtagcgaaaactatatgtctgtagaaaaaatagctgatgatagaatagtggtatataatccatcaacaatgtctactccaatgactgaatacattatcaaaaagaacgatatagtcagagtgtttaacgaatacggatttgttcttgtagataacgttgatttcgctacaattatagaacgaagtaaaaagtttattaatggcgcatctacaatggaagatagaccgtctacaaaaaactttttcgaactaaatagaggagccattaaatgtgaaggtttagatgtcgaagacttacttagttactatgttgtttatgtcttttctaagcggtaaataataatatggtatgggttctgatatccccgttctaaatgcattaaataattccaatagagcgatttttgttcctataggaccttccaactgtggatactctgtattgttaatagatatattaatacttttgtcgggtaacagaggttctacgtcttctaaaaataaaagtttgataacatctggcctgttcataaataaaaacttggcgattctatatatactcttattatcaaatctagccattgtcttatagatgtgagctactgtaggtgtaccatttgattttctttctaatactatatatttctctcgaagaagttcttgcacatcatctgggaataaaatactactgttgagtaaatcagttattttttttatatcgatattgatggacatttttatagttaaggataataagtatcccaaagtcgataacgacgataacgaagtatttatacttttaggaaatcacaatgactttatcagatcaaaattaacaaaattaaaggagcatgtatttttttctgaatatattgtgactccagatacatatggatctttatgcgtcgaattaaatgggtctagttttcagcacggtggtagatatatagaggtggaggaatttatagatgctggaagacaagttagatggtgttctacatccaatcatatatctgaagatatacccgaagatatacacactgataaatttgtcatttatgatatatacacttttgacgctttcaagaataaacgattggtattcgtacaggtacctccgtcgttaggagatgatagctatttgactaatccgttattgtctccgtattatcgtaattcagtagccagacaaatggtcaatgatatgatttttaatcaagattcatttttaaaatatttattagaacatctgattagaagccactatagagtttctaaacatataacaatagttagatacaaggataccgaagaattaaatctaacgagaatatgttataatagagataagtttaaggcgtttgtattcgcttggtttaacggcgtttcggaaaatgaaaaggtactagatacgtataaaaaggtatctaatttgatataatgaattcagtgactgtatcacacgcgccatatactattacttatcacgatgattgggaaccagtaatgagtcaattggtagagttttataacgaagtagccagttggctgctacgagacgagacgtcgcctattcctgataagttctttatacagttgaaacaaccgcttagaaataaacgagtatgtgtgtgcggtatagatccgtatccgaaagatggaactggtgtaccgttcgaatcaccaaattttacaaaaaaatcaattaaggagatagcttcatctatatctagattaaccggagtaattgattataaaggttataaccttaatataatagacggggttataccctggaattattacttaagttgtaaattaggagaaacaaaaagtcacgcgatctactgggataagatttccaagttactgctgcagcatataactaaacacgttagtgttctttattgtttgggtaaaacagatttctcgaatatacgggcaaagttagaatccccggtaactaccatagtgggatatcatccagcggctagagaccgtcaattcgagaaagatcgatcatttgaaattatcaacgttttactggaattagacaacaaggtacctataaattgggctcaagggtttatttattaatgctttagtgaaattttaacttgtgttctaaatggatgcggctattagaggtaatgatgttatctttgttcttaagactataggtgtcccgtcagcgtgcagacaaaatgaagatccaagatttgtagaagcatttaaatgcgacgagttagaaagatatattgagaataatccagaatgtacactattcgaaagtcttagggatgaggaagcatactctatagtcagaattttcatggatgtagatttagacgcgtgtctagacgaaatagattatttaacggctattcaagattttattatcgaggtgtcaaactgtgtagctagattcgcgtttacagaatgcggcgccattcatgaaaatgtaataaaatccatgagatctaatttttcattgactaagtctacaaatagagataaaacaagttttcatattatctttttagacacgtataccactatggatacattgatagctatgaaacgaacactattagaattaagtagatcatctgaaaatccactaacaagatcgatagacactgccgtatataggagaaaaacaactcttcgggttgtaggtactaggaaaaatccaaattgcgacactattcatgtaatgcaaccacctcatgataatatagaagattacctattcacttacgtggatatgaacaacaatagttattacttttctctacaacgacgattggaggatttagttcctgataagttatgggaaccagggtttatttcattcgaagacgctataaaaagagtttcaaaaatattcattaattctataataaactttaatgatctcgatgaaaataattttacaacggtaccactggtcatagattacgtaacaccttgtgcattatgtaaaaaacgatcgcataaacatccgcatcaactatcgttggaaaatggtgctattagaatttacaaaactggtaatccacatagttgtaaagttaaaattgttccgttggatggtaataaactgtttaatattgcacaaagaattttagacactaactctgttttattaaccgaacgaggagaccatatagtttggattaataattcatggaaatttaacagcgaagaacccttgataacaaaactaattttgtcaataagacatcaactacctaaggaatattcaagcgaattactctgtccaagaaaacgaaagactgtagaagctaacatacgagacatgttagtagattcagtggagaccgatacctatccggataaacttccgtttaaaaatggtgtattggacctggtagacggaatgttttactctggagatgatgctaaaaaatatatgtgtactgtatcaaccggatttaaatttgacgatacaaagttcgtcgaagacagtccagaaatggaagagttaatgaatatcattaacgatatccaaccattaacggatgaaaataagaaaaatagagagctatatgaaaaaacattatctagttgtttatgcggtgctaccaaaggatgtttaacattcttttttggagaaactgcaactggaaagtcgacaaccaaacgtttgttaaagtctgctatcggtgacctgtttgttgagacgggtcaaacaattttaacagatgtattggataaaggacctaatccatttatcgctaacatgcatttgaaaagatctgtattctgtagcgaactacctgattttgcatgtagtgggtcaaagaaaatcagatctgataatattaaaaagttgacagaaccttgtgtcattggaagaccgtgtttctccaataaaattaataatagaaaccatgcgacaatcattatcgatactaattacaaacctgtttttgataggatagataacgcattaatgagaagaattgccgtcgtgcgattcagaacacacttttctcaaccttctggtagagaggctgctgaaaataatgacgcgtacgataaagtcaaactattagacgaggggttagatggtaaaatacaaaataatagatatagattcgcatttctatacttgttggtgaaatggtacagaaaatatcatgttcctattatgaaactatatcctacacccgaagagattcctgactttgcattctatctcaaaataggtactctgttggtatctagctctgtaaagcatattccattaatgacggacctctccaaaaagggatatatattgtacgataatgtggtcactcttccgttgactactttccaacagaaaatatccaagtattttaattctagactatttggacacgatatagagagcttcatcaatagacataagaaatttgccaatgttagtgatgaatatctgcaatatatattcatagaggatatttcatctccgtaaatatatgctcatatatttatagaagatatcacatatctaaatgaataccggaattatagatttatttgataatcatgttgatagtataccaactatattacctcatcagttagctactctagattatctagttagaactatcatagatgagaacagaagcgtgttattgttccatattatgggatcaggtaaaacaataatcgctttgttgttcgccttggtagcttccagatttaaaaaggtttacattctagtgccgaacatcaacatcttaaaaattttcaattataatatgggtgtagctatgaacttgtttaatgacgaattcatagctgagaatatctttattcattccacaacaagtttttattctcttaattataacgataacgtcattaattataacggattatctcgctacaataactctatttttatcgttgatgaggcacataatatctttgggaataatactggagaacttatgaccgtgataaaaaataaaaacaagattccttttctactattgtctggatctcccattactaacacacctaatactctgggtcatattatagatttaatgtccgaagagacgatagattttggtgaaattattagtcgtggtaagaaagtaattcagacacttcttaacgaacgcggtgtgaatgtacttaaggatttgcttaaaggaagaatatcatattacgaaatgcctgataaagatctaccaacgataagatatcacggacgtaagtttctagatactagagtagtatattgtcacatgtctaaacttcaagagagagattatatgattactagacgacagctatgttatcatgaaatgtttgataaaaatatgtataacgtgtcaatggcagtattgggacaacttaatctgatgaataatttagatactttatttcaggaacaggataaggaattgtacccaaatctgaaaataaataatggcgtgttatacggagaagaattggtaacgttaaacattagttccaaatttaaatactttattaatcggatacagacactcaacggaaaacattttatatacttttctaattctacatatggcggattggtaattaaatatatcatgctcagtaatggatattctgaatataatggttctcagggaactaatccacatatgataaacggcaaaccaaaaacatttgctatcgttactagtaaaatgaaatcgtctttagaggatctattagatgtgtataattctcctgaaaacgatgatggtagtcaattgatgtttttgttttcatcaaacattatgtccgaatcctatactctaaaagaggtaaggcatatttggtttatgactatcccagatactttttctcaatacaaccaaattcttggacgatctattagaaaattctcttacgccgatatttctgaaccagttaatgtatatcttttagccgccgtatattccgatttcaatgacgaagtgacgtcattaaacgattacacacaggatgaattaattaatgttttaccatttgacatcaaaaagctgttatatctaaaatttaagacgaaagaaacgaatagaatatactctattcttcaagagatgtctgaaacgtattctcttccaccacatccatcaattgtaaaagttttattgggagaattggtcagacaatttttttataataattctcgtattaagtataacgataccaagttacttaaaatggttacatcagttataaaaaataaagaagacgctaggaattacatagatgatattgtaaacggtcacttctttgtatcgaataaagtatttgataaatctcttttatacaaatacgaaaacgatattattacagtaccgtttagactttcctacgaaccatttgtttggggagttaactttcgtaaagaatataacgtggtatcttctccataaaactgatgagatatataaagaaataaatgtcgagctttgttaccaatggataccttccagttacattggagccacacgagctgacgttagacataaaaactaatattaggaatgccgtatataagacgtatctccatagagaaattagtggtaaaatggccaagaaaatagaaattcgtgaagacgtggaattacctctcggcgaaatagttaataattctgtagttataaacgttccgtgtgtaataacctacgcgtattatcacgttggggatatagttagaggaacattaaacatcgaagatgaatcaaatgtaactattcaatgtggagatttaatctgtaaactaagtagagattcgggtactgtatcatttagcgattcaaagtactgcttttttcgaaatggtaatgcgtatgacaatggcagcgaagtcactgccgttctaatggaggctcaacaaggtatcgaatctagttttgtttttctcgcgaatatcgtcgactcataagaaagagaatagcggtaagtataaacacgaatactatggcaataattgcgaatgttttattcccttcgatatatttttgataatatgaaaaacatgtctctctcaaatcggacaaccatctcataaaatagttatctcgcgctggcgaggtggttgccgctcgtataatctccccagaataatatacttgcgtgtcgtcgttcaatttatacggatttctatagttctctgttatataatgcggttttccatcatgattagacgacgacaatagtgttctaaatttagatagttgatcagaatgaatgtttattggcgttggaaaaattatccatgctgcgtctgcagagtggttgatagttgttcctagatatgtaaaataatccaacgtactaggtagcaaattgtctagataaaatactgaatcaaacggcgcagacgtattagcggatctaatggaatccaattgattgactatcttttgaaaatatacatttttatgatccgatacttgtaagaatatagaaataatgataagtccatcatcgtgtttttttgcctcttcataagaactatattttttcttattccaatgaacaagattaatctctccagagtatttgtacacatctatcaagtgattggatccataatcgtcttcctttccccaatatatatgtagtgatgataacacatattcattggggagaaaccctccacttatatatcctcctttaaaattaatccttactagttttccagtgttctggatagtggttggtttcgactcattataatgtatgtctaacggcttcaatcgcgcgttagaaattgcttttttagtttctatattaataggagatagttgttgcggcatagtaaaaatgaaatgataactgtttaaaaatagctcttagtatgggaattacaatggatgaggaagtgatatttgaaactcctagagaattaatatctattaaacgaataaaagatattccaagatcaaaagacacgcatgtgtttgctgcgtgtataacaagtgacggatatccgttaataggagctagaagaacttcattcgcgttccaggcgatattatctcaacaaaattcagattctatctttagagtatccactaaactattacggtttatgtactacaatgaactaagagaaatctttagacggttgagaaaaggttctatcaacaatatcgatcctcactttgaagagttaatattattgggtggtaaactagataaaaaggaatctattaaagattgtttaagaagagaattaaaagaggaaagtgatgaacgtataacagtaaaagaatttggaaatgtaattctaaaacttacaacacgggataaattatttaataaagtatatataggttattgcatggcgtgttttattaatcaatcgttggaggatttatcgcatactagtatttacaatgtagaaattagaaagattaaatcattaaatgattgtattaacgacgataaatacgaatatctgtcttatatttataatatgctagttaatagtaaatgaacttttacagatctagtataattagtcagattattaagtataatagacgactagctaagtctattatttgcaaggatgactctcaaattattacactcacggcattcgttaaccaatgcctatggtgtcataaacgagtatccgtgtccgctattttattaactactgataacaaaatattagtatgtaacagacgagatagttttctctattctgaaataattagaactagaaacatgtttagaaagaaacgattatttctgaattattccaattatttgtccaaacaggaaagaagtatactatcgtcatttttttctctatatccagctactgctgataatgatagaatagacgctatttatccgggtggcatacccaaaaggggtgagaatgttccagagtgtctatccagggaaatcaaagaagaagttaatatagacaattcttttgtattcatagacactcggttttttattcatggtatcatagaagataccattatcaacaaattttttgaggtaattttctttgtcggaagaatatctctaacgagtgatcaaattattgatacctttaaaagtaatcatgaaatcaaggatctaatatttttagatccgaattcaggtaatggactccaatacgaaattgcaaaatatgctctagatactgcaaaacttaaatgttacggccatagaggatgttattatgaatcattaaaaaaattaactgaggatgattgattagaaaatataaattaatttaccatcgtgtatttttataacgggattgtccggcatatcatgtagatagttaccgtctacatcgtatactcgaccatctacgcctttaaatcctctatttattgacattaatctattagaattggaataccaaatattagtaccctcaattagtttattggtaatattttttttagacgatagatcgatggctcttgaaaccaaggttttccaaccggactcattgtcgatcggtgagaagtctttttcattagcatgaatccattctaatgatgtatgtttaaacactctaaacaattggacaaattcttttgatttgctttgaatgatttcaaataggtcttcgtctacagtaggcataccattagataatctagccattataaagtgcacgtttacatatctacgttctggaggagtaagaacgtgactattgagacgaatggctcttcctactatctgacgaagagacgcctcgttccatgtcatatctaaaatgaagatatcattaattgagaaaaaactaataccctcgcctccactagaagagaatacgcatgttttaatgcattctccgttagtgtttgattcttggttaaactcagccaccgccttgattctagtatcttttgttctagatgagaactctatattagagataccaaagactttgaaatatagtaataagatttctattcctgactgattaacaaatggttcaaagactagacatttaccatgggatgctaatattcccaaacatacatctataaatttgacgcttttctcttttaattcagtaaatagagagatatcagccgcactagcatcccctttcaatagttctccctttttaaaggtatttaatgcggatttagaaaactctctatctcttaatgaatttttaaaatcattatatagtgttgctatctcttgcgcgtattcgccgggatcacgattttgtctttcaggaaagctatcgaacgtaaacgtagtagccatacgtctcagaattctaaatgatgatataccagtttttatttctgcgagtttagccttttgataaatctcttcttgcttttttgacatattaacgtatcgcattaatactgttttcttagcgaatgatgcagacccttctacgttatcaaaaatagaaaactcgttattaactatgtacgaacataggcctcctagtttggagactaattctttttcatcgactagacgtttattctcaaatagtgattggtgttgtaaggatcctggtcgtagtaagttaaccaacatggtgaattcttgcacactattgacgataggtgtagccgataaacaaatcatcttatggttttttaatgcgatggtcttggataaaaaattatatactgaacgagtaggacggatcttaccatcttctttgattaatgatttagaaatgaagttatgacattcatcaataatgacgcatattctactcttggaattaatagttttgatattagtaaaaaatttatttctaaaattttgatcatcgtaattaataaaaatacaatccttcgttatctctggagcgtatctgagtatagtgttcatccaaggatcttctatcaaagcctttttcaccaataagataatagcccaattcgtataaatatccttaagatgtttgagaatatatacagtagtcattgttttaccgacacccgtttcatggaacaataaaagagaatgcatactgtctaatcctaagaaaactcttgctacaaaatgttgataatccttgaggcgtactacgtccgaccccatcatttcaacgggcatattagtagttctgcgtaaggcataatcgatataggccgcgtgtgatttactcatttatgagtgataagtaataactatgttttaaaaatcacagcagtagtttaactagtcttctctgatgtttgttttcgatactttttgaatcagaagtcatactagaataaagcaacgagtgaacgtaatagagagcttcgtatactctattcgaaaactctaagaacttattaatgaattccgtatccactggattgtttaaaatactaaattgaacactgttcacatccttccaagaagaagacttagtgacggacttaacatgagacataaataaatccaaattttttttacaaacatcactagccaccataatggcgctatctttcaaccagctatcgcttacgcattttagcagtctaacatttttaaagagactacaatatattctcatagtatcgattacacctctaccgaataaagttggaagtttaataatacaatatttttcgtttacaaaatcaaataatggtcgaaacacgtcgaaggttaacatcttataatcgctaatgtatagattgttttcagtgagatgattattagatttaatagcatctcgttcacgtttgaacagtttattgcgtgcgctgaggtcggcaactacggcgtccgctttagtactcctcccataatactttacgctattaatctttaaaatttcatagactttatctagatcgctttctggtaacatgatatcatgtgtaaaaagttttaacatgtcggtcggcattctatttagatcattaactctagaaatctgaagaaagtaattagctccgtattccagactaggtaatgggcttttacctagagacagattaagttctggcaatgtttcataaaatggaagaaggacatgcgttccctcccggatattttttacaatttcatccatttacaactctatagtttgttttcattattattagttattatctcccataatcttggtaatacttaccccttgatcgtaagataccttatacaggtcattacatacaactaccaattgtttttgtacataatagattggatggttgacatccatggtggaataaactactcgaacagatagtttatctttccccctagatacattggccgtaatagttgtcggcctaaagaatatctttggtgtaaagttaaaagttagggttcttgttccattattgctttttgtcagtagttcattataaattctcgagatgggtccgttctctgaatatagaacatcatttccaaatctaacttctagtctagaaataatatcggtcttattcttaaaatctattcccttgatgaagggatcgttaatgaacaaatccttggcctttgattcggctgatctattatctccgttatagacgttacgttgactagtccaaagacttacaggaatagatgtatcgatgatgttgatactatgtgatatgtgagcaaagattgttctcttagtggcatcactatatgttccagtaatggcggaaaactttttagaaatgttatatataaaagaattttttcgtgttccaaacattagcagattagtatgaagataaacactcatattatcaggaacattatcaatttttacatacacatcagcatcttgaatagaaacgataccatcttctggaacctcaacaatctcggcagactccggataaccagtcggtggaccatcgctaacaataactagatcatccaacaatctactcacatatgcatctatataatctttttcatcttgtgagtaccctggatacgaaataaatttattatccgtatttccataataaggtttagtataaacagagagcgatgttgccgcatgaacttcagttacagtcgccgttggttggtttatttgacctattactctcctaggtttctctataaacgatggtttaatttgtacattcttaaccatatatccaataaagctcaattcaggaacataaacaaattctttgttgaacgtttcaaagtcgaacgaagagtcacgaataacgatatcggatactggattgaaggttaccgttacggtaatttttgaatcggatagtttaagactgctgaatgtatcttccacatcaaacggagttttaatataaacgtatactgtagatggttctttaatagtgtcattaggagttaggccaatagaaatatcattaagttcactagaatatccagagtgtttcaaagcaattgtattattgatacaattattatataattcttcgccctcaatttcccaaataacaccgttacacgaagagatagatacgtgattaatacatttatatccaacatatggtacgtaaccgaatcttcccatacctttaacttctggaagttccaaactcagaaccaaatgattaagcgcagtaatatactgatccctaatttcgaagctagcgatagcctgattgtctggaccatcgtttgtcataactccggatagagaaatatattgcggcatatataaagttggaatttgactatcgactgcgaagacattagaccgtttaatagagtcatccccaccgatcaaagaattaatgatagtattattcattttctatttaaaatggaaaaagcttacaataaactccgtagagaaatatctataatttgtgagttttccttaaagtaacagcttccgtaaacgccgtctttatctcttagtaagtttattgtatttataaccttttccttatcttcatagaatactaaaggcaacaaagaaatttttggttcttctctaagagctacgtgagacttaaccatagaagccaacgaatccctacatattttagaacagaaataccctacttcaccacccttgtatgtctcaatactaataggtctaaaaaccaaatcttgattacaaaaccaacacttatcaattacactatttgtcttaatagacacatctgccatagatttataatactttggtagtatacaagcgagtgcttcttctttagcgggcttaaagactgctttaggtgctgaaataaccacatctggaaggcttactcgcttagccatttaattacggaactatttttttatacttctaatgagcaagtagaaaacctctcatctacaaaaacatactcgtgtccataatcctctaccatagttacacgttttttagatctcatatgtgctaaaaagttttcccatactaattggttactattatttttcgtataatttttaacagtttgaggttttagatttttagttacagaagtgatatcgaatattttatccaaaaagaatgaataattaattgtcttagaaggagtgttttcttggcaaaagaataccaagtgcttaaatatttctactacttcattaatcttttctgtactcagattcagtttctcatcttttacttgattgattatttcaaagactaacttataatcctttttatttattctctcgttagccttaagaaaactagatacaaaatttgcatctacatcatccgtggatatttgatttttttccatgatatccaagagttccgagataatttctccagaacattgatgagacaataatctccgcaatacatttctcaaatgaataagtttattagacacgtggaagtttgactttttttgtacctttgtacatttttgaaataccgactcgcaaaaaatacaatattcatatccttgttcagatactataccgttgtgtctacaaccgctacataatcgtagattcatgttaacactctacgtatctcgtcgtccaatattttatataaaaacattttatttctagacgttgccagaaaatcctgtaatacttttagttttttgggctgtgaataaagtatcgccctaatatggttaccgtcctccgccaatatagtagttaaattatccgcacatgcaaaagaacaccgcttaggcggattcagtacaatgttatatttttcgtaccaactcatttaaatatcataatctaaaatagttctgtaatatgtctagcgctaatatattgatcataatcctgtgcataaattaagatacaacaatgtctcgaaatcatcgacatggcttcttccatagttagaagatcgtcgtcaaagttagcaacgtgattcatcaacatttgctgttttgaggcagcaaatactgaaccgtcgccattcaaccattcataaaaaccatcgtctgaatccattgataatttcttgtactggtttttgagagctcgcatcaatctagcatttctagctcccggattgaaaacagaaagaggatcgtacatccagggtccattttctgtaaatagaatcgtataatgtcccttcaagaagatatcagacgatccacaatcaaagaattggtctccgagtttgtaacaaactgcggactttaacctatacatgataccgtttagcataatttctggtgatacgtcaatcggagtatcatctattagagatctaaagccggtgtaacattctccaccaaacatattcttattctgacgtcgttctacataaaacatcattgctccattaacgataacaggggaatgaacagcactacccatcacattagttcccaatggatcaatgtgtgtaactccagaacatcttccatagcctatgttaggaggagcgaacaccactcttccactattgccatcgaatgccatagaataaatatccttggaattgatagaaatcggactgtcggatgttgtgatcatcttcataggattaacaacgatgtatggtgccgcctgaagtttcatatcgtaactgatgccgttcataggtctagccacagaaaccaacgtaggtctaaatccaactatagacaaaatagaagccaatatctgttcctcatctgtcataacttgagagcatccagtatgaataatcttcattagatggggatctaccgcatcatcatcgttacaataaaaaattcccattctaatgttcataattgcttttctaatcatggtatgcatgtttgctctctgaatctctgtggaaattagatctgatacacctgtaatcactatcggattatcctccgtaagacgattaaccaacaacatataattataagactttacttttctaaattcataaagttgctggattaggctataggtgtctccatgtacatacgcgttctcgagcgcaggaagtttaataccgaatagtgccatcagaataggatgaatatagtaattagtttctggttttctataaataaaagacaaatcttgtgaactagacatatcggtaaaatgcatggattggaatcgtgtagtcgacagaagaatatgatgattagatggagagtatattttatctaactctttgagttggtcaccgattctaggactagctcgagaatgaataagtactaaaggatgagtacatttcacagaaacactagcattgttcaatgtgctctttacatgggtaaggagttgaaatagctcgtttctatttgttctgacaatatttagtttattcataatgttaagcatatcctgaatagtaaagttagatgtgtcatacttgttagtagttagatatttagcaattgcattcccatcatttctcaatctcgtactccaatcatgcgtggatgctacttcgtcgatggaaaccatacaatcctttttgataggctgttgagattgattatttcctgcacgtttaggtttggtacgttgatttctagcccctgcggatataaagtcatcgtctacaatttgggacaatgaattgcatacactacaagacaaagatttatcagaagtgtgaatatgatcttcatctaccaaagaaagagtttgattagtataactagattttagtcctgcgttagatgttaaaaaaacatcgctattgaccacggcttccattatttatattcgtagtttttactcgaaagcgtgattttaatatccaatcttattacttttggaatcgttcaaaacctttgactagttgtagaatttgatctattgccctacgcgtatactcccttgcatcatatacgttcgtcaccagatcgtttgtttcggcctgaagttggtgcatatctttttcaacactcgacatgagatccttaagggccatatcgtctagattttgttgagatgctgctcctggatttggattttgttgtgctgttgtacatactgtaccaccagtaggtgtaggagtacatacagtggccacaataggaggttgaggaggtgtaaccgttggagtagtacaagaaatatttccatccgattgttgtgtacatgtagttgttggtaacgtctgagaaggttgggtagatggcggtgtcgtcgtcttttgatctttattaaatttagagataatatcctgaacagcattgctcggcgtcaacgctggaaggagtgaactcgccggcgcatcagtatctgcagacagccaatcaaaaagattagacatatcagatgatgtattagtttgttgtcgtggttttggtgtaggagcagtactactaggtagaagaataggagccgatgtaggtgtcggaaccggctgtggagttatatgaatagttggttgtagcggttggataggctgtctgctggcggccatcatattatctctagctagttgttctcgcaactgtctttgataatacgactcttgagactttagtcctatttcaatcgcttcatcctttttcgtatccggatccttttcttcagaataatagattgacgactttggtgtagaggattctgccagcccctgtgagaacttgttaaagaagtccatttaaggctttaaaattgaattgcgattataagattaaatggcagacacagacgatattatcgactatgaatccgatgatctcactgaatacgaggatgatgaagaagaggaagaagatggagagtcactagaaactagtgatatagatcccaaatcttcttataagattgtagaatcagcatccactcatatagaagatgcgcattccaatcttaaacatatagggaatcatatatctgctcttaaacgacgctatactagacgtataagtctatttgaaatagcgggtataatagcagaaagctataacttgcttcaacgaggaagattacctctagtttcagaattttctgacgaaacgatgaagcaaaatatgctacatgtaattatacaagagatagaggagggttcttgtcctatagtcatcgaaaagaacggagaattgttgtcggtaaacgattttgacaaagatggtctaaaattccatctagactatattatcaaaatttggaaacttcaaaaacgatattagaatttatacgaatatcgttctctaaatgtcacaatcaagtctcgcatgttcagcaatttattgtcgtactttatatcgtgttcattaacgatatcttgcaaaatagtaatgattctatcttccttcgatagatattcttcagagattattgtcttatattctttcttgttatcagatatgaatttgataagactttgaacattattgatacccgtctgtttaattttttctacagatattttagttttggcagattctatcgtatctgtcaatagacatccaacatcgacattcgacgtcaattgtctataaatcaacgtataaattttagaaataacattagcgaattgttgtgcattgatgtcgttattctgaaacagtatgattttaggtagcattttcttaacaaagagaacgtatttattgttactcagttgaacagatgatatatccagattactaacgcatctgattccgtataccaaactttcagaagaaatggtatacaattgtttgtattcattcaatgtctctttttcagaaattagtttagagtcgaatactgcaataattttcaagagatagttttcatcagataagattttatttagtgtagatatgataaaactattgttttgttggagaacttgatacgccgcgttctctgtagtcgacgctctcaaatgggaaacgatctccattatttttttggaatcggatactatatcttcggtatcttgacgcagtctagtatacatagagttaagagagattagagtttgtacattaagcaacatgtctctaaatgtggctacaaacttttccttttccacatcatctagtttattatataccgatttcacaacggcaccagatttaaggaaccagaatgaaaaactctgataactacaatatttcatcatagttacgattttatcatcttctatagttggtgtaatagcgcatacctttttctccaagactggaaccaacgtcataaaaatgtttaaatcaaaatccatatcaacatctgatgcgctaagaccagtctcgcgttcaagattatctttactaatggtgacgaactcatcgtatagaactctaagtttgtccattatttatttacagatttagttgtttaatttatttgtgctcttccagagttgggatagtatttttctaacgtcggtattatattattaggatctacgttcatatgtatcataatattaatcatccacgttttgataaatctatctttagcttctgaaataacgtatttaaacaaaggagaaaaatatttagctacggcatcagacgcaataacattttttgtaaatgtaacgtatttagacgacagatcttcgttaaaaagttttccatctatgtagaatccatcagttgttaacaccattcccgcgtcagattgaataggagtttgaatagtttgttttggaaatagatccttcaataacttatagttgggtgggaaaaaatcgattttatcactagactctttcttttttactatcattacctcatgaactatttcttgaatgagtatatgtattttctttcctatatcggacgcgttcattggaaaatataccatgtcgttaactataagaatatttttatcctcgtttacaaactgaataatatcagatgtagttcgtaaacgaactatatcatcaccagcacaacatctaactatatgatatccactagtttcctttagtcgtttattatcttgttccatattagcagtcattccatcatttaagaaggcgtcaaagataatagggagaaatgacattttggattctgttacaactttaccaaaattaaggatatacggacttactatctttttctcaacgtcaatttgatgaacacacgatgaaaatgtacttcgatgagattgatcatgtagaaaacaacaagggatacaatatttccgcatatcatgaaatatattaagaaatcccaccttattatatttccccaaaggatccatgcacgtaaacattatgccgttatcattaataaagacttctttctcatcggatctgtaaaagttgttactgatttttttcattccaggatctagataattaataatgatgggttttctattcttattctttgtattttggcatatcctagaccagtaaacagtttccactttggtaaaatcagcagacttttgaacgctattaaacatggcattaatggcaataactaaaaatgtaaaatatttttctatgttaggaatatggtttttcactttaatagatatatggtttttggccaaaatgatagatatttttttatccgaggatagtaaaatattattagtcgccgtctctataaaaatgaagctagtctcgatatccaattttattctagaattgataggagtcgccaaatgtaccttatacgttatatctcccttgatgcgttccatttgtgtatctatatcggacacaagatctgtaaatagttttacgttattaatcatcacggtatcgccgtcgctagataatgctaatgtaccatccaagtcccaaatggagagatttaactgttcatcgtttagaataaaatgattaccggtcatattaataaagtgttcatcgtatctagataacaacgacttataattaatgtccaagtcttgaactcgctgaatgatcttttttaacccagttagttttagattggtacgaaatatattgttaaactttgattctacagtaatgtccaaatctagttgtggaaatacttccatcaacattgtttcaaacttgataatattattatctacatcttcatacgatccaaattccggaatagatgtatcacatgctcttgccacccagataaccaaaaagtcacacgctccaggatatacattgtataaaaagctatcgtttttaagtagggtttttttctgcgtgtatacgaagggattaaaaatagtattatcaacgtaactatattccaaattattcttatgagaatagataataatatcgtccttaatatctaacaaatttcctaaatatccctttaattgagtcattcgaagcgtcaatagaatatgtctcttaactatttccggctgttgtatatttaaatgacttcgtaaaaaataatatatgggcgacttctcatctatgtaatcatatggagtgagatatagggctcgttctacctcctgccccttacccacctgtaataccaattgcggacttactatatatcgcatatttatatcgtggggtaaagtgaaaatctactaccgatgatgtaagtcttacaatgttcgaaccagtaccagatcttaatttggaggcctccgtagaactaggggaggtaaatatagatcaaacaacacctatgataaaggaaaatagcggttttatatcccgtagtagacgtctattcgcccatagatctaaggatgatgagagaaaactagcactacgattctttttacaaagactttattttttagatcatagagagattcattatttgttcagatgcgttgacgctgtaaaagacgtcactattaccaaaaaaaataacattatcgtggcgccttatatagcacttttaactatcgcatcaaaaggatgcaaacttacagaaacaatgattgaagcattctttccagaactatataatgaacatagtaagaaatttaaattcaactctcaagtatccatcatccaagaaaaactcggataccagtttggaaactatcacgtttatgattttgaaccgtattactctacagtagctctggctattcgagatgaacattcatctggcatttttaatatccgtcaagagagttatctggtaagttcattatctgaaataacatatagattttatctaattaatctaaaatctgatcttgttcaatggagtgctagtacgggcgctgtaattaatcaaatggtaaatactgtattgattacagtgtatgaaaagttacaactggtcatagaaaatgattcacaatttacatgttcattggctgtggaatcagaacttccaataaaattacttaaagatagaaatgaattatttacaaaattcatcaacgagttaaaaaagaccagttcattcaagataagcaaacgcgataaggatacgctactaaaatattttacttaggactggagttagaatttatagacgactcatttcgtttatcattattactaccatcattattagtattcttcttgttatcttgttcagaaatatacagcaatgctatgcctaatactaaatacattatcatgcttgcaatggctctaacaacgacgaaccaaaatgaatttggtcgtagcttttgttcacaaaaatacataaagaaatgtctacataaatctatggcgccattggctacttgaaatagcgccagtcctcctacagattttaatatagctgtataacatgacatttattcatcatcaaaagagacagagtcaccatctgtcatatttagattttttttcatgtgttcaaagtatcctctactcatttcattataatagtttatcatacttagaattttaggacggatcaatgagtaagacttgactagatcgtcagtagtaatttgtgcatcgtctattctgcatccgcttcgtcgaataatgtatagcatcgctttgagattctccatagctatcaagtctttatacaatgacatggaaatatctgtgaatactttatacttctccaacatcgatgccttaacatcatcgcctactttagcattgaaaatacgttctattgtgtagatggatgtagcaagatttttaaacaacaatgccatcttacacgatgattgcctcaagtctccaatcgtttgtttagaacgattagctacagagttcaacgcttggctgactagcatattattatctttagaaattgtattcttcaatgaagcgtttatcatatctgtgatttcgttagtcatattacagtctgactgggttgtaatgttatccaacatatcacctatggatacggtacacgtaccagcatttgtaataatcctatctaagatgttgtatggcattgcgcagaaaatatcttctcctgtaatatctccactctcgataaatctactcagattattcttaaatgccttattctctggagaaaagatatcagtgtccatcatttcattaatagtatacgcagaaaagataccacgagtatcaattctatccaagatacttatcggttccgagtcacagataatggtttcctctccttcgggagatcctgcatagaaatatctaggacaatagtttctatactgtctgtaactctgataatctctaaagtcactaactgataccatgaaattgagaagatcaaacgctgaagtaatcaatttttctgcctcgtttttactacaactagttttcatcaatgtagtgacgatgtattgtttagttactcttggtctaatactgatgatagagatattattacttcccataatggatcttctagtagtcaccttaaagcccattgatgcaaatagcagatagataaagtcttggtatgactcctttctaatatagtacggactacctttgtcacccaactttatacccacataagccataacaacctctttaatagccgtttcatgaggtttatcagccatgagcctgagtagttggaagaatctcatgaatcccgtctcagaaagtcctatatgcatgatagatttatctttcctgggaaactctcgtatagtcatagatgaaatactcttcaaagtttctgaaataagattagtaacagtcttacctccgactactctgggtaacaaacatactctaataggtgttttctctgcggagataatatcagaaaggatagagcaataagtagtattattgtgattataaagaccgaatacataacaggtagaatttataaacatcatgtcctgaaggtttttagacttgtattcctcgtaatccataccgtcccaaaacatggatttggtaactttgatagccgtagatctttgttccttcgccaacaggttaaagaaattaataaagaatttgttgtttctatttatgtccacaaattgcacgtttggaagcgtaactgttacgttcactgcagcattttgaggatcgcgagtatgaagtacgatgttattgtttactggtatatctggaaagaaatctaccagtctaggaataagagattgatatcgcatagaaatagtaaagtttataatctcatcatcgaagagcattttgttaccattgtaataaatatccactctgtcatatgtataaatgaagtactgttcaaacatgatgagatgtttatatgttggcatagtagtgagatcgacgtttggtaatggcaatgtattaagattaactccataatgtctagcagcatctgcgatgttataagtgtcgtcaaagcggggtcgatcttgtgctgttatatattgtctaacacctataagattatcaaaatcttgtctgcttaatacaccgttaacaatttttgccttgaattcttttattggtgcattaataacatccttatagaggatgttaaacaaataagtgttatcaaagttaagatctggatatttcttttctgctagaacatccattgagtcggagccatctggtttaatataaccaccgataaatctagctctgtattctgtatccgtcaatctaatattaagaaggtgttgagtgaaaggtggaagatcgtaaaagctgtgagtattaatgataggattagtttccgaactaatgttaattggggtattaataatatctatatttccagcgttaagtgtaacattaaacagttttaattcacgtgacgtggtatcaattaaataattaatgcccaatttggatatagcagcctgaagctcatcttgtttagttacggatcctaatgagttattaagcaatatatcgaacggatgaacgaaggttgttttaagttggtcacatactttgtaatctagacatagatgcggaagaacggtagaaactatacgaaataaatattcagagtcctctaattgatcaagagtaactattgacttaataggcatcatttatttagtattaaatgacgaccgtaccagtgacggatatacaaaacgatttaattacagagttttcagaagataattatccatctaacaaaaattatgaaataactcttcgtcaaatgtctattctaactcacgttaacaacgtggtagatagagaacataatgccgccgtagtgtcatctccagaggaaatatcctcacaacttaatgaagatctatttccagatgatgattcaccggccactattatcgaacgagtacaacctcatactactattattgacgatactccacctcctacttttcgtagagagttattaatatcggaacaacgtcaacaacgagaaaaaagatttaatattacagtatcgaaaaatgctgaagcaataatggaatctagatctatgataacttctatgccaacacaaacaccatccttgggagtagtttatgataaagataaaagaattcagatgttagaggatgaagtggttaatcttagaaatcaacgatctaatacaaaatcatctgataatttagataattttaccaaaatactatttggtaagactccgtataaatcaacagaagttaataagcgtatagccatcgttaattatgcaaatttgaacgggtcccccttatcagttgaggacttggatgtttgttcggaggatgaaatagatagaatctataaaacgattaaacaatatcacgaaagtagaaaacgaaaaattatcgtcactaacgtgattattattgtcataaacattatcgagcaggcattgctaaaactcggatttgaagaaatcaaaggactgagtaccgatatcacttcagaaattatcgatgtggagatcggagatgactgcgatgctgtagcatctaaactaggaatcggtaacagtccggttcttaatattgtattgtttatactcaagatattcgttaaacgaattaaaattatttaatttaatacattcccatatccagacaacaatcgtctggattaatctgttcctgtcgtctcataccggacgacatattaatctttttattagtaggcatctttttagatggtttctttttcccagcattaactgagtcgatacctagaagatcgtgattgatctctccgaccattccacgaacttctaattggccgtctctgacggtaccataaactattttaccagcattagtaacagcttggacaatctgaccatccattgcgttgaatgatgtagttgctgttgttctacgtttaggagcaccagaagtatttttggagcccttggaggctgatgtagaagaagacgaggattttgatttacatgtaatacattttgtactctttgattttgtatcacatgcgccggcagtcacatttgtttgagaattaagattattgttgcctcctttgacggctgcatctccaccgatttgcgctagtagatttttaagctgtggtgtaatcttattaactgtttcgatataatcatcgtaactgcttctaacggctaaattttttttatccgccatttagaagctaaaaatatttttatttatgcagaagatttaactagattatacaatgaactaatatgatccttttccagattatttacaaacttggtattttttggttctggaggaggcgaatttaaattcggacttggattcggattttgtgagttcttgatcttattatacatcgagtataggatggcgacggtaactgctacgcaaataccgatcaacaaaagaataccaatcatttattgacaataacttcactattgatcaagtatgcaatatatcatcttttcactaaataagtagtaataatgattcaacaatgtcgagatatatggacgataataatttagttcatggaaatatcgctatgattggtatgaatgactccgctaactctgtggggtgcgcagtgctttccccacatagaataaattagcattccgactgtgataataataccaagtataaacgccataatactcaatactttccatgtacgagtgggactggtagacttactaaagtcaataaaggcgaagatacacgaaagaatcaaaagaatgattccagcgattagcacgccggaaaaataatttccaatcataagcatcatgtccatttaactaataaaaattttaaatcgccgaatgaacaaagtggaatataaaccatataaaaacaatagtttgtactgcaaaaataatatctatttttgttttcgaagatatggtaaaattaaatagtagtacacagcatgttataactaacagcagcaacggctcgtaattacttatcatttactagacgaaaaggtggtgggatattttcttgctcaaataatacgaatatatcacccatccattttatgcgatgtttatatactctaatctttaatagatctatagacgacgggtttaccaacaatatagattttatcgattcatctaatttaaacccttccttaaacgtgaatgatctattatctggcataacgatgactctacctgatgaatcggacaatgtactgggccatgtagaataaattatcaacgaattatcgtctacgaacatttatatcatttgttttaattttaggacgcgaataaatggatataaaatagaaaataacagatattacaaccaatgttatggccgcgcccaaccaggtaggcagttttattttatcttttactacaggttctcctggatgtacgtcaccaacggcggacgtagttctagtacaattagacgtaagttctgcttgggaattttttaacgctaaagagttaacgttaatcgtgcacccaacgtatttacatctagttctttgaacatcttgattataatataaccattttctatctctagattcgtcggtgcactcatgtaaccaacataccctaggtcctaaatatttatctccggaattagattttggataattcgcgcaccaacaatttctatttcctttatgatcgttacaaaagacgtataatgccgtatccccaaaagtaaaataatcaggacgaataattctaataaactcagaacaatatctcgcatccatatgtttggagcaaatatcggaataagtagacatagccggtttccgttttgcacgtaaccattctaaacaattggggtttccaggatcgtttctacaaaatccagtcatgaaatcatcacaatgttctgtcttgtaattattattaaatatttttggacagtgtttggtatttgtcttagaacaacattttgccacgctatcactatcgcccaggagataatccttttttataaaatgacatcgttgcccggatgctatataatcagtggcgtgttttaaatccttaatatattcaggagttacctcgttctgataatagattaatgatccaggacgaaatttgaaagaactacatggttctccatgaattaatacatattgtttagcaaattcaggaactataaaactactacaatgatctatcgacataccatctatcaaacaaaacttgggtttaatttctcccggagatgtttcataatagtacgtataactttcttctgcaaacttaacagctctattatattcaggataattaaaacctaattccatatatttgtctcgtatatctgctattcctggtgctattttaattctattaagagtaacggctgcccccattcttaataatcgtcagtatttaaactgttaaatgttggtatatcaacatctaccttatttcccgcagtataaggtttgttgcaggtatactgttcaggaatggttacatttatacttcttctatagtcctgtctttcgatgttcatcacatatgcaaagaacagaataaacaaaataatgtaagaaataatattaaatatctgtgaattcgtaaatacattgattgccataataattacagcagctacaatacatacaatagacattcccacagtgttgccattacctccacgatacatttgagttactaagcaataggtaataactaagctagtaagaggcaatagaaaagatgagataaatatcatcaatatagagattagaggagggctatatagagccaagacgaacaaaatcaaaccgagtaacgttctaacatcattatttttgaagattcccaaataatcattcattcctccataatcgttttgcattatacctccatctttaggcataaacgattgctgctgttcctctgtaaataaatctttatcaagcactccagcacccgcagagaagtcgtcaagcatattgtaatatcttaaataactcatttatatattaaaaaatgtcactattaaagatggagtataatctttatgccgaactaaaaaaaatgacttgtggtcaacccctaagtctttttaacgaagacggggatttcgtagaagttgaaccgggatcatcctttaagtttctgatacctaagggattttacgcctctccttccgtaaagacgagtctagtattcgagacattaacaacgaccgataataaaatcactagtatcaatccaacaaatgcgccaaagttatatcctcttcaacgcaaagtcgtatctgaagtagtttctaatatgaggaaaatgatcgaatcaaaacgtcctctatacattactcttcacttggcgtgtggatttggtaagactattaccacgtgttatcttatggctacacacggtagaaaaaccgtcatttgcgtacccaataaaatgttaatacatcaatggaagacacaggtagaggcagtcggattggaacataagatatctatagatggagtaagtagtctattaaaggaactaaagactcaaagtccggatgtattaatagtagtcagtagacatctgacaaacgatgccttttgtaaatatatcaataagcattatgatttgttcatcttggatgaatcacatacgtataatctgatgaacaatacagcagttacaagatttttagcgtattatcctccgatgatgtgttattttttaactgctacacctagaccagctaaccgaatttattgtaacagtattattaatattgccaagttatccgatctaaaaaaaactatctatgcggtagatagtttttttgagccatattccacagacaatattagacatatggtaaaacgactagatggaccatctaataaatatcatatatatactgagaagttattatctgtagacgagcctagaaatcaacttattcttgataccctggtagaagaattcaagtcaggaactattaatcgaattttagttattactaaactacgtgaacatatggtattcttctacaaacgattattagattttttcggatcagaggttgtatttataggagacgcccaaaatagacgtactccagatatggtcaaatcaatcaaggaactaaatagatttatattcgtatccaccttattttattccggtactggtttagatattcctagtttggattcgttgttcatttgctcggcagtaatcaacaatatgcaaatagagcaattactagggagggtatgtcgagaaacagaactattagataggacggtatatgtatttcctaacacatccatcaaagaaataaagtacatgataggaaatttcatgcaacgaattattagtctgtctgtagataaactaggatttaaacaaaaaagttatcggaaacatcaagaatccgatcccacttctgtatgtacaacatcctccagagaagaacgtgtattaaatagaatatttaactcgcaaaatcgttaagaagtttaagcgacgatccgcatgctgcgcaggccagtgtattacccctcatagtattaatataatccaatgatacttttgtgatgtcggaaatcttaaccaatttagactgacaggcagaacacgtcatgcaatcatcatcgtcatcgataactgtagtcttgggcttctttttgcggctcttcattccggaacgcacattggtgctatccatttaggtagtaaaaaataagtcagaatatgccctatagcacgatcgtgcaaaacctggtatatcgtctctatctttatcacaatatagtgtatcgacatttttattattattgacctcgtttatcttggaacatggaatgggaacatttttgttatcaacggccatctttgccttaattccagatgttgtaaaattataactaaacagtctatcatcgacacaaatgaaattcttgtttagacgtttgtagtttacgtatgcggctcgttcgcgtctcattttttcagatattgcaggtactataatattaaaaataagaatgaaataacataggattaaaaataaagttatcatgacttctagcgctgatttaactaacttaaaagaattacttagtctgtacaaaagtttgaaattttcagattctgcggctatagaaaagtataattctttggtagaatggggaacatctacttactggaaaataggcgtgcaaaaggtagctaatgtcgagacgtcaatatctgattattatgatgaggtaaaaaataaaccgtttaatattgatccgggatattacattttcttaccggtatattttggaagcgtctttatttattcgaagggtaaaaatatggtagaacttggatctggaaactcttttcaaataccagatgatatgcgaagtgcgtgtaacaaagtattagacagcgataacggaatagactttctgagatttgttttgttaaacaatagatggataatggaagatgctatatcaaaatatcagtctccagttaatatatttaaactagctagtgagtacggattaaacatacccaaatatttagaaattgaaatagaggaagacacattatttgacgacgagttatactctattatagaacgctctttcgatgataaatttccaaaaatatccatatcgtatattaagttgggagaacttagacggcaagttgtagactttttcaaattctcgttcatgtatattgagtccatcaaggtagatcgtataggagataatatttttattcctagcgttataacaaaatcaggaaaaaagatattagtaaaagatgtagaccatttaatacgatccaaggttagagaacatacatttgtaaaagtaaaaaagaaaaacacattttccattttatacgactatgatggaaacggaacagaaactagaggagaagtaataaaacgaattatagacactataggacgagactattatgttaacggaaagtatttctctaaggttggtagtgcaggcttaaagcaattgactaataaattagatattaatgagtgcgcaactgtcgatgagttagttgatgagattaataaatccggaactgtaaaacgaaaaataaaaaaccaatcagcatttgatttaagcagagaatgtttgggatatccagaagcggattttataacgttagttaataacatgcggttcaaaatagaaaattgtaaggttgtaaatttcaatattgaaaatactaattgtttaaataacccgagtattgaaactatatatggaaactttaaccagttcgtctcaatctttaatatcgtcaccgatgtcaaaaaaagattattcgagtgaaataatatgcgcctttgatataggtgcaaaaaatcctgccagaactgttttagaagtcaaggataactccgttagggtattggatatatcaaaattagactggagttctgattgggaaaggcgcatagctaaagatttgtcacaatatgaatacactacagttcttctagaacgtcagcctagaaggtcgccgtacgtcaaatttatctattttattaaaggctttttatatcatacatcggctgccaaagttatttgcgtctcgcctgtcatgtctggtaattcatatagagatcgaaaaaagagatcggtcgaagcatttcttgattggatggacacattcggattgcgagactccgttccggatagacgcaaattagacgatgtagcggatagtttcaatttggctatgagatacgtattagataaatggaatactaattatacaccttataataggtgtaaatctagaaattacataaaaaaaatgtaataacgttagtaacgccattatggataatctatttacctttctacatgaaatagaagatagatatgccagaactatttttaactttcatctaataagttgcgatgaaataggagatatatatggtcttatgaaagaacgcatttcctcagaggatatgtttgataatatagtgtataataaagatatacatcatgccattaagaaactagtgtattgcgacatccaacttactaaacacattattaatcagaatacgtatccggtatttaacgattcttcacaagtgaaatgttgtcattatttcgacataaactcagataatagcaatattagctctcgtacagtagagatatttgagagggaaaagtcatctcttgtatcatatattaaaactaccaataagaagagaaaggtcaattacggcgaaataaagaaaactgttcatggaggcactaatgcaaattacttttccggtaaaaagtctgacgagtatctgagtactacagttagatccaacattaatcaaccttggatcaaaaccatctctaagaggatgagagttgatatcattaatcactctatagtaacgcgtggaaaaagctctatattacaaactatagaaattatttttactaatagaacatgtgtgaaaatattcaaggattctactatgcacattattctatccaaggacaaggatgaaaaggggtgtatacacatgattgacaaattattctatgtctattataatttatttctgttgttcgaggatatcatccaaaacgagtactttaaagaagtagctaatgttgtaaaccacgtacttacggctacggcattagatgagaaattattcctaattaagaaaatggctgaacacgatgtttatggagttagcaatttcaaaatagggatgtttaacctgacatttattaagtcgttggatcataccgttttcccctctctgttagatgaggatagcaaaataaagttttttaaggggaaaaagctcaatattgtagcattacgatctctggaggattgtataaattacgtgactaaatccgagaatatgatagaaatgatgaaggaaagatcgactattttaaatagcatagatatagaaacggaatcggtagatcgtctaaaagaattgcttctaaaatgaaaaaaaacactgattcagaaatggatcaacgactcggatataagtttttggtgcctgatcctaaagccggagttttttatagaccgttacatttccaatatgtatcgtattctaattttatattgcatcgattgcatgaaatcttgaccgtcaagcggccactcttatcgtttaagaataatacagaacgaattatgatagaaattagcaatgttaaagtgactcctccagattactcacctataatcgcgagtattaaaggtaagagttatgacgcattagccacgttcactgtaaatatctttaaagaggtaatgaccaaagagggtatatccatcactaaaataagtagttatgagggaaaagattctcatttgataaaaattccgctactaataggatacgggaataaaaatccacttgatacagccaagtatcttgttcctaatgtcataggtggagtctttatcaataaacaatctgtcgaaaaagtaggaattaatctagtagaaaagattacaacatggccaaaatttagggttgttaagccaaactcattcactttctcgttttcctccgtatcccctcctaatgtattaccgacaagatatcgccattacaagatatctctggatatatcacaattggaagcgtcgaatatatcatcgacaaagacatttataacggtcaatattgttttgctgtctcaatatttatctagagtgagtctagaattcattagacgtagcttatcatacgatatgcctccagaagttgtctatctagtaaacgcgataatagatagtgctaaacgaattactgaatctattactgactttaatattgatacatacattaatgacctggtggaagctgaacacattaaacaaaaatctcagttaacgatcaacgagttcaaatatgaaatgctgcataactttttacctcatatgaactatacacccgatcaactaaagggattttatatgatatctttactaagaaagtttctctactgtatctaccacacttctagatatccagatagagattcgatggtttgtcatcgtatactaacatacggcaaatattttgagacgttggcacatgatgaattagagaattacataggcaacatccgaaacgatatcatgaacaatcacaagaacagaggcacttacgcggtaaacattcatgtactaacaactcctggacttaatcatgcattttctagtctattgagtggaaagttcaaaaagtcagacggtagttatcgaacacatcctcactattcatggatgcagaatatttctattcctaggagtgttggattttatccggatcaagtaaagatttcaaagatgttttctgtcagaaaataccatccaagtcaatatctttacttttgttcatcagacgttccggaaagaggtcctcaggtaggtttagtatctcaattgtctgtcttgagttccattacaaatatactaacgtctgagtatttggatttggaaaagaaaatttgtgagtatatcagatcatattataaagatgatataagttactttgaaacaggatttccaatcactatagaaaatgctctagtcgcatctcttaatccaaatatgatatgtgattttgtaactgactttagacgtagaaaacggatgggattcttcggtaacttggaggtaggtattactttagttagggatcacatgaatgaaattcgcattaatattggagcgggaagattagtcagaccattcttggttgtggataacggagagctcatgatggatgtgtgtccggagttagaaagcagattagacgacatgacattctctgacattcagaaagagtttccgcatgtcatcgaaatggtagatatagaacaatttacttttagtaacgtatgtgaatcggttcaaaaatttagaatgatgtcaaaggatgaaagaaagcaatacgatttatgtgactttcctgccgaatttagagatggatatgtggcatcttcattagtgggaatcaatcacaattctggacccagagctattcttggatgtgctcaagctaaacaagctatctcttgtctgagctcggatatacgaaataaaatagacaatggaattcatttgatgtatccagagaggccaatcgtgattagtaaggctttagaaacttcaaagattgcggctaattgcttcggccaacatgttactatagcattaatgtcgtacaaaggtatcaatcaagaggatggaattatcatcaaaaaacaatttattcagagaggcggtctcgatattgttacagccaagaaacatcaagtagaaattccattggaaaactttaataacaaagaaagagataggtctaacgcctattcaaaattagaaagtaatggattagttagactgaatgctttcttggaatccggagacgctatggcacgaaatatctcatcaagaactcttgaagatgattttgctagagataatcagattagcttcgatgtttccgagaaatataccgatatgtacaaatctcgcgttgaacgagtacaagtagaacttactgacaaagttaaggtacgagtattaaccatgaaagaaagaagacccattctaggagacaaatttaccactagaacgagtcaaaagggaacagtcgcgtatgtcgcggatgaaacggaacttccatacgacgaaaatggtatcacaccagatgtcattattaattctacatccatcttctctagaaaaactatatctatgttgatagaggttattttaacagccgcatattctgctaagccgtacaacaataagggagaaaaccgacctgtctgttttcctagtagtaacgaaacatccatcgatacatatatgcaattcgctaaacaatgttatgagcattcaaatccgaaattgtctgatgaagaattatcggataaaatcttttgtgaaaagattctctatgatcctgaaacggataagccttatgcatccaaagtattttttggaccaatttattacttgcgtctgagacatttaactcaggacaaggcaaccgttagatgtagaggtaaaaagacgaagctcattagacaggcgaatgagggacgaaaacgtggaggaggtatcaagttcggagaaatggagagagactgtttaatagcgcatggtgcagccaatactattacagaagttttgaaagattcggaagaagattatcaagatgtgtatgtttgtgaaaattgtggagacatagcagcacaaatcaagggtattaatacatgtcttagatgttcaaaacttaatctctctcctctcttaacaaaaattgataccacacacgtatctaaagtatttcttactcaaatgaacgccagaggcgtaaaagtcaaattagatttcgaacgaagacctccttcgttttataaaccattagataaagttgatctcaaaccgtcttttctggtctaatattgtttagtagatacttatcaacatcatcaagattatcaagattatcaagattatcaagataagctaattcactaaacacattatcgatttcggtatcgttactcgcagaataaagttcgttatgatcctgatattcggaaatctgtggagtttcaggttttggtggatgtgtaacagctacttgagataccgaagtctgatattcagaaagctgtggatgttctggttcggcatccaccgatggtgttacaccactactaattggttcagtaacgtctgtggacgatggaggcaccacttctacaggttctggttctttatcctcagtcatcaacggagctacttcaatgcgaggaaatgtataatttggtaatggtttctcatgtggatctgaagaagaggtaagatatctactagaaagataccgatcacgttctagttctcttttgtagaacttaactttttctttctcagcatctagttgatattccaacctcttcacgttactacgttcagatttcaattcacgttcgcatgggttacctccgcagtttttacgagcgatttcacgttcagccttcatgcgtctctccctctctctatcgagtttatcagagcagtctttctgaaggcgatcgaactccataaatttctccaacgctttgattgtttccatagatttccgaagttcagcttttaggactgtgattctttttctttcgaattcacagctggatgtacaaccgtttccattaccgccatctctaagtttcttttctagatcggcaacatttcatccccatgccttttacattcctcgagtctactgtcgtcgaaatatcgttccagctccttttcgacatcaataactttagcacgttgtctctcaagctctcttttgtagttatctgattccctggcacgtttaagatcttcatgcaattgagtcagctcttaacacaatctcttgcttcttcgtcatagtacgcgcaatcactgtgagatccattgttaccacgtctacactcggcgagctcgcgtttaagagattcaatttcccgtttgtattggtccatgtttccattgctaccaccattagatttacaggctgctagttgtcgttcgagatcagaaatacgggttttcttggaattgatttcgtcgatgtacttggcatcgaaacacttattaagttctttttccaattctacgattttatttctttcgcgagtcaattccctcctgtagtaactatctgttttgtcagattcacgctctctacgtagactttcttgcaagttactaatttgttccctagcacgtccgagtttagttttatatgctgaatagagttctgattcatcctttgagcagatctctagcgatcgtttaagattcctgattctagtctttagcctatttacctcctcagaagatgttccgttaccgttgcgtttacactcgttaagctgtctatcaagatccatgattctatctctaagacgttgcatctctctttccatatcagcattgctttcattattacgtctgcagtcactcaactgtctttcaatatctgagattctatctctaagacgtcgcatctctctctgtttcggcattggtttcattattacgtctacagtcgttcaactgtctttcaagatctgatattctagattggagtctgctaatctctgtagcattttcacggcattcactcagttgtctttcaagatctgaaattttagattggagtctgctaatctctgtaagatttcctcctccgctctcgatgcagtcggtcaacttattctctagttctctaatacgcgaacgcagtgcatcaacttcttgcgtgtcttcctggttgcgtgtacattcatcgagtctagattcgagatctctaacgcgtcgtcgttcttcctcaagttctctgcgtactacagaaagcgtgtccctatcttgttgatatttagcaatttctgattctagagtactgattttgcttacgtagttactaatatttgtcttggccttatcaagatcctccttgtatttgtcgcattccttgatatccctacgaagtctggacagttcccattcgacattacgacgtttatcgatttcagctcggagatcgtcatcgcgttgttttagccacatacgactgagttcaagttctcgttgacaagatccatctacttttccattcctaatagtatccagttccttttctagttctgaacgcatttctcgttccctatcaagcgattctctcaattctcggatagtcttcttatcaatttctaataaatctgaaccatcatctgtcccattttgaatatccctgtgttctttgatctcttttgtaagtcggtcgattctttcggttttataaacagaatccctttccaaagtcctaatcttactgagtttatcactaagttctgcattcaattcggtgagttttctcttggcttcttccaactctgttttaaactctccactatttccgcattcttcctcgcatttatctaaccattcaattagtttattaataactagttggtaatcagcgattcctatagccgttcttgtaattgtgggaacataattaggatcttctaatggattgtatggcttgatagcatcatctttatcattattagggggatggacaaccttaattggttggtcctcatctcctccagtagcgtgtggttcttcaatagccgtgttagtaataggcttaggcaaatgcttgtcgtacgcgggcacttcctcatccatcaagtatttataatcgggttctacgtctgaatattcttttctaagagacgcaacttctggagttagtagaagaactctgtttctatatctatcaacgctggaatcaatactcaagttaaggatagcgaatacctcatcgtcatcatccgtatcctctgaaacgccatcatatgacatttcatgaagtctaacgtattgataaacagaatcagatttagtattaaacagatccttaacctttttagtaaatgcatatgtatattttagatctccagatttcataatatggtcgcatgccttaaatgtcagtgcttccataatatagtctggaacactaattggtgatgaaaaagataccggaccatatgctacgttgataaataactctgagccactaactagataatgattaatgttaaggaagaggaaatattcagtgtataggtatgtcttggcgtcatatcttgtactaaacacgctaaacagtttgttaatgtgatcaatttccaatagattaattagagcagcaggaataccaacaaacatattaccacatccgtattttctatgaatatcacatatcatgttaaaaaatcttgatagaagagcgaatatctcgtctgacttaatgagtcgtagttcagcagcaacataagtcataactgtaaatagaacatactttcctgtagtgttgattctagactccacatcaacaccattattaaaaatagttttatatacatctttaatctgctctccgttaatcgtcgaacgttctagtatacggaaacactttgatttcttatctgtagttaatgacttagtgatatcacgaagaatattacgaattacatttcttgtttttcttgagagacctgattcagaactcaactcatcgttccatagtttttttacctcagtggcgaaatctttggagtgcttggtacatttttcaataaggttcgtgacctccatttattataaaaaaattttattcaaaacttaactacaatcgggtaattataaaatcgtagatctcccatgtggtggaatactaccatctatcgcatgtggatggacagtaggtaatggccatgggaacagtaatgtttgcatatttatctttcttgccagtattactgcatattgtcccaatgtttcgatgtgatgttctaacctatcaactgccgctgtatcacaacaatagtgtccgatgaaattaagattatgatccaatgtgtttaatatatgattatcaagtcttatacgatccgcgtcttttttgacaggatcaggttcttctacaggaagaagtttcggcctcttatgatattcatgtctgggaaacggtggtctagggtgaggctccggtatcggagtgggttttggattataatcatcatcgtctatgacatcatcttcgacttcgatatttattttgctatcttgatgatgtcctgtatcagttgcattttcagcactcgactgaatattagcgcattcattgtttattattaccatatttctaaacccaaaatgtatatgttgaacatcagtactatcgttgatgagtcttatagcatgaattcgcttatcgttatcgggtttagcttctgtcaccttagcaattccttttttattaaactctacataatcatatccatttctattgtttgttctaatataaacgagtatagcatcattgctaaatttttcaatagtatcgaaaacagaatatcctaaaccatataatatatattcaggaacactcaaactaaatgtccaggattctcctaaatacgtaaactttaatagtgcgaaatcattcaaaaatctaccacttatagatagatagtacataaatgcgtatagtagtctacctatctctttattatgaaaaccggcattacgatcatatatgtcgtgatatacctgtgatccgtttacgttaaaccataaatacatgggtgatcctataaacatgaatttatttctaattctcagagctatagttaattgaccgtgtaatatttgcttacatgcatacttgatacgctcattaataagatttttatcattgctcgttatctcagaatcgtatatataaggagtaccatcgtgattcttaccagatattatacaaaatactatatataaaatatattgaccaacgttagtaatcatataaatgtttaacgttttaaattttgtattcaatgatccattatcatacgctagcatggtcttatgatattcattctttaaaatataatattgtgttagccattgcattggggctcctaatggagattttttattctcatccattttaggataggctttcataaagtccctaataacttcgtgaataatgtttctatgttttctactgatgcatgtatttgcttcgatttttttatcccatgtttcatctatcatagatttaaacgcagtaatgctcgcaacattaacatcttgaaccgttggtacaattccgttccataaatttataatgttcgccatttatataactcattttttgaatatacttttaattaacaaaagagttaagttactcatatggacgccgtccagtctgaacatcaatctttttagccagagatatcatagccgctcttagagtttcagcgtgattttccaacctaaatagaacttcatcgttgcgtttacaacacttttctatttgttcaaactttgttgttacattagtaatctttttttccaaattagttagccgttgtttgagagtttcctcattgtcgtcttcatcggctttaacaattgcttcgcgtttagcctctggctttttagcagcctttgtagaaaaaaattcagttgctggaattgcaagatcgtcatctccggggaaaagagttccgtccatttaaagtacagattttagaaactgacactctgcgttatttatatttggtacaacacatggattataaatattgatgttaataacatcagaaaatgtaaagtctatacattgttgcatcgtgttaaattttctaatggatctagtattattgggtccaacttctgcctgaaatccaaatatggaagcggatacaaaaccgtttcctggataaaccacacatctccacttttgctttacatcagaaattgtgtcattgacatcttgaactctcctatctaatgccggtgttccacctatagattttgaatattcgaatgctgcatgagtagcattaaattccttaatattgccataattttcatatattgagtaaccctggataaaaagtaaacacaccgcagccgtcgctaccacaataaaaaaaattgatagagagttcatttataatctattagaagctgacaaaatttttttacacgcatcagacaatgctttaataaatagttcaacatctacttttgtcatatcgaaccgatggtatgattctaacctagaattacatccgaaaaagttgactatgttcatagtcattaagtcattaacaaacaacattccagactctggattataagacgatactgtttcgtcacaattacctaccttaatcatgtgattatgaatattggctattagagcaccttctaagaaatctataatatctttgaaacacgatttaaaatcaaaccacgaatatacttctacgaagaaagttagtttacccataggagaaataactataaatggagatctaaatacaaaatccggatctatgatagttttaacattattatattctctattaaatacctccacatctaaaaatgttaattttgaaactatgtcttcgtttattaccgtacctgaactaaacgctataagctctattgtttgagaactctttaaacgatattcttgaaatacatgtaacaaagtttcctttaactcggtcggtttatctaccatagttacagaatttgtatccttatctataatataataatcaaaatcgtataaagttatataattatcgcgttcagattgtgatcttttcaaatagactaaaaaccccatttctctagtaagtatcttatgtatatgtttgtaaaatatcttcatggtgggaatatgctctaccgcagttagccattcctcattgacagcggtagatgtattagacaaaactattccaatgtttaacaagggccattttacgagattattaaatccttgtttgataaatgtagccaatgagggttcgagttcaacgacgattgaattctcttcccgcggatgctgcatgatgaacgacgggatgttgttcgattgatttggaattctttttcgactttttgtttatattaaatattttaaaatttatagctgatagcaattcatgtactacggataatgtagacgcgtattgcgcatcgatatctttattattagataaatttatcaataaatgtgagaagtttgcctcgttaaggtcttccatttaaatattatataaacatttgtgtttgtatcttattcgtcttttatggaatagttttttactagtaaagctgcaattacacactttgtccgtaaaacataaatataaacaccagcttttatcaatcgttccaaaaagtcgacggcggacatttttaacatggcatctattttaaatacacttaggtttttggaaaaaacatcattttataattgtaacgattcaataactaaagaaaagattaagattaaacataagggaatgtcatttgtattttataagccaaagcattctaccgttgttaaatacttgtctggaggaggtatatatcatgatgatttggttgtattggggaaggtaacaattaatgatctaaagatgatgctattttacatggatttatcatatcatggagtgacaagtagtggagcaatttacaaattgggatcgtctatcgatagactttctctaaataggactattgttacaaaagttaataattatgatgatacattttttgacgacgatgattgatcgctattgcacaattttgtttttttactttctaatatagcgtttagattctttttcatgtgcgaatattgatttactaaaatatcgatgtttaacttttgttctatgacgtccttatcagcggtatcggtacatatacgtaattcaccttcacaaaatacggagtcttcgataataatagccaatcgattattggatctagcggtctgtatcatattcaacatgtttaatatatcctttcgtttcccctttacaggcatcgatcgtagcatattttccgcgtctgagatggaaatgttaaaactacaaaaatgcgtaatgttagcccgtcctaatattggtacgtgtctataagtttggcatagtagaataatagacgtgtttaaatgccttccaaagtttaagaattctattagagtattgcattttgatagtttatcgcctacatcatcaaaaataagtaaaaagtgtgctgattttttatgattttgtgcgacagcaatacatttttctatgttacttttagttcgtatcagattatattctagagattcctgactactaacgaaattaatatgatttggccaaatgtatccatcataatctggattataaacgggtgtaaacaagaatatatgtttatattttttaactagtgtagaaaacagagatagtaaatagatagtttttccagatccagatcctcccgttaaaaccattctaaacggcatttttaataaattttctcttgaaaattgtttttcttggaaacaattcataattatatttacagttactaaattaatttgataataaatcaaaatatggaaaactaaggtcgttagtagggaggagaacaaagaaggcatatcgtgatataaataacatttattatcatgatgacaccagaaaacgacgaagagcagacatctgtgttctccgctactgtttacggagacaaaattcagggaaagaataaacgcaaacgcgtgattggtctatgtattagaatatctatggttatttcactactatctatgattaccatgtccgcgtttctcatagtgcgcctaaatcaatgcatgtctgctaacgaggctgctattactgacgccgctgttgccgttgctgctgcatcatctactcatagaaaggttgcgtctagcactacgcaatatgatcacaaagaaagctgtaatggtttatattaccagggttcttgttatatattacattcagactaccagttattctcggatgctaaagcaaattgcactgcggaatcatcaacactacccaataaatccgatgtcttgattacctggctcattgattatgttgaggatacatggggatctgatggtaatccaattacaaaaactacatccgattatcaagattctgatatatcacaagaagttagaaagtatttttgtgttaaaacaatgaactaatatttatttttgtacattaataaatgaaatcgcttaatagacaaactgtaagtaggtttaagaagttgtcggtgccggccgctataatgatgatactctcaaccattattagtggcataggaacatttctgcattacaaagaagaactgatgcctagtgcttgcgccaatggatggatacaatacgataaacattgttatctagataccaacattaaaatgtctacagataatgcggtttatcagtgtcgtaaattacgagctagattgcctagacctgatactagacatctgagagtattgtttagtattttttataaagattattgggtaagtttaaaaaagaccaataataaatggttagatattaataatgataaagatatagatattagtaaattaacaaattttaaacaactaaacagtacgacggatgctgaagcgtgttatatatacaagtctggaaaactggttgaaacagtatgtaaaagtactcaatctgtactatgtgttaaaaaattctacaagtgacaacaaaaactgcagaaaaattgaaaaactagcgtctttttttgctcgactcgagaccatggaggaatccgtggttcggccatctgtatttgtagttgacggccaaacggacattccattcactcgcttgggacgatcacacaggcgacagagttgttcagtcgccagggtgggattgggcttgctgctgctgctcatgggcgccggcttggccgttcaaggttggtttcttcttcagcttcactggcgcttgggggagatggttacgcggttgcccgacgggccagctgggtcttgggaacaactgatccaggagaggagatcacatgaggtcaaccccgcagcgcacttgactggagccaattcttccctcacgggctcaggcggccccctgctctgggagacacagctgggactcgcttttctgcgaggactgtcttatcacgatggagcgctggtggtaaccaagacggggtactactatatctatagtaaggtacagcttggcggggtcggatgcccgctcgggttggcgggaacaatcacccacggtctgtacaagagaacacctcggtacccggaggaacttgaacttctggtgagccagcagagcccgtgtggtagagcaacatccagttccagagtatggtgggattcatcctttctcgggggtgtggtacatctggaggctggcgaaaaagtggtcgtgagagtgcttggaaagaggctcgtacgattgagagatggaactagatcatactttggggcgtttatggtgtgattaattaatttttatgagctcagacggcaatggatggatcataattgatgggaaatgcaatagtaattttttatcataaaagttgtaaagtaaataataaaacaataaatattgaactagtagtacgtatattgagcaatcagaaatgatgctggtacctcttatcacggtgaccgtagttgcgggaacaatattagtatgttatatattatatatttgtaggaaaaagatacgtactgtctataatgacaataaaattatcatgacaaaattaaaaaagataaagagttctaattccagcaaatctagtaaatcaactgatagcgaatcagactgggaggatcactgtagtgctatggaacaaaacaatgacgtagataatatttctaggaatgagatattggacgatgatagcttcgctggtagtttaatatgggataacgaatccaatgttatggcgcctagcacagaacacatttacgatagtgttgctggaagcacgctgctaataaataatgatcgtaatgaacagactatttatcagaacactacagtagtaattaatgaaacggagactgttaaagtacttaatgaagataccaaacagaatcctaactattcatccaatcctttcgtaaattataataaaaccagtatttgtagcaagtcaaatccgtttattacagaacttaacaataaatttagtgagaataatccgtttagacgagcacatagcgatgattatcttaataagcaagaacaagatcatgaacacgatgatatagaatcatcggtcgtatcattggtgtgattagtttcctttttataaaattgaagtaatatttagtattattgctgccgtcacgttgtacaaatggagatattccctgtattcggcatttctaaaattagcaattttattgctaataatgactgtagatattatatagatacagaacatcaaaaaattatatctgatgagatcaatagacagatggatgaaacggtacttcttaccaacatcttaagcgtagaagttgtaaatgacaatgagatgtaccatcttattcctcatagattatcgacgattatactctgtattagttctgtcggaggatgtgttatctctatagataatgacgtcaatggcaaaaatattctaacctttcccattgatcatgctgtaatcatatccccactgagtaaatgtgtcgtagttagcaagggccctacaaccatactggttgctaaagcggatatacccagcaaacgattggtaacatcgtttacaaacgacatactgtatgtaaacaatctatcactgattaattatttgccgttgtctgtattcattattagacgagtcaccgactatttggatagacacatatgcgatcagatatttgctaataataagtggtattcccttataaccatcgacgataagcaatatcctattccatcaaattgtataggtatgtcttctgccaagtacataaattctagcatcgagcaagatactttaatacatgtttgtaacctcgagcatccattcgacttagtatacaaaaaaatgcagtcgtacaattctgtacctatcaaggaacaaatattgtacggtagaattgataatataaatatgagcattagtatttctgtggattaatagatttctagtatggggatcattaatcatctctaatctctaaatacctcataaaacgaaaaaaaagctattatcaaatactgtacggaatagattcattctcttctctttttatgaaactctgttgtatatctactgataaaactggaagcaaaaaatctgataaaaagaataagatcaagatcaaggattatatggaacacgattattataaaataacaatagttcctggttcctcttccacgtctactagctcgtggtattatacacatgcctagtaatagtctctttgcgttgatggaaagcagactagaaataacaggctaaaatgttcagacaccataatagttcccaacccagataataacagagtaccatcaacacattcctttaaactcaatcccaaacccaaaaccgttaaaatgtatccggccaattgatagtagataatgaggtgtacagcgcatgataatttacacagtaaccaaaatgaaaatactttagtaattataagaaatatagatggtaacgtcatcatcaacaatccaataatatgccggagagtaaacattgacggataaaacaaaaatgctccgcataactctatcatggcaataacacaaccaaatacttgtaagattcctaaattagtagaaaatacaacggatatcgatgtataagtgatctcgagaaataataagaataaagtaatgcccgtaaagataaacatcaacattgtttggtaatcattaaaccaattagtatgacgttgaactaatttcacagtaaattttattccagtattatccccgcatgtataagtacctggtaagatatctttatattccataatcaatgagacatcactatctgataacgaatgaagtctagcactagtatgccatttacttaatattgtcgtcttggaagttttattataagttaaaatatcatggttatccaatttccatctaatatactttgtcggattatctatagtacacggaataatgatggtatcattacatgctgtatactctatggtctttgtagttgttataacaaccaacgtatagaggtatatcaacgatattctaactcttgacattttttatttatttaaaatgatacctttgttatttattttattctattttgctaacggtattgaatggcataagtttgaaacgagtgaagaaataatttctacttacttattagacgacgtattatacacgggtgttaatggggcggtatacacattttcaaataataaactaaacaaaactggtttaactaataataattatataacaacatctataaaagtagaggatgcggataaggatacattagtatgcggaaccaataacggaaatcccaaatgttggaaaatagacggttcagacgacccaaaacatagaggtagaggatacgctccttatcaaaatagcaaagtaacgataatcagtcacaacggatgtgtactatctgacataaacatatcaaaagaaggaattaaacgatggagaagatttgacggaccatgtggttatgatttattcacggcggataacgtaattccaaaagatggtttacgaggagcattcgtcgataaagacggtacttatgacaaagtttacattcttttcactgatactatcggctcaaagagaattgttaaaattccgtatatagcacaaatgtgcctaaacgacgaaggtggtccatcatcgttgtctagtcatagatggtcgacgtttctcaaagtcgaattagaatgtgatatcgacggaagaagttatagataaattattcattctaaaactataaaaacagataatgatacgatactatatgtattcttcgatagtccgcattatgtacctattctatgaataccattaaacaatctttttctacgtcaaaattggaaggatatacaaagcaattgccgtctccagctcctggtatatgtctaccagctggaaaagttgttccacataccacgtttgaagtcatagaaaaatataatgtactagatgatattataaagcctttatctaaccaacctatcttcgaaggaccgtctggtgttaaatggttcgatataaaggagaaggaaaatgaacatcgggaatatagaatatacttcataaaagaaaattctatatattcgttcgatacaaaatctaaacaaactcgtagctcgcaagtcgatgcgcgactattttcagtaatggtaacttcgaaaccgttatttatagcagatatagggataggagtaggaatgccacaaatgaaaaaaatacttaaaatgtaatcttaatcgagtacaccacacgacaatgaacaaacataagacagattatgctggttatgcttgctgcgtaatatgcggtctaattgttggaattatttttacagcgacactattaaaagttgtagaacgtaaattagttcatacaccatcaatagataaaacgataaaagatgcatatattagagaagattgtcctactgactggataagctataataataaatgtatccatttatctactgatcgaaaaaacctgggaggaaggacgtaatgcatgcaaagctctaaatccaaattcggatctaattaagatagagactccaaacgagttaagttttttaagaagccttagacgaggctattgggtaggagaatccgaaatattaaaccagacaaccccatataattttatagctaaaaatgccacgaagaatggaactaaaaaacggaaatatatttgtagtacaacgaatactcccaaactgcattcgtgttacactatataacaattacactacatttttatcataacactacttcggttagatgttttagaaaaaaataaatatcgccgtaccgttcttgtttttataaaaataacaattaacaattatcaaattttttctttaatattttacgtggttgaccattcttggtggtaaaataatctcttagtgttggaatggaatgctgtttaatgtttccgcactcatcgtatattttgacgtatgcagtcacatcgtttacgcaatagtcagactgtagttctatcatgcttcctacatcagaaggaggaacagttttaaagtctcttggttttaatctattgccattagttttcatgaaatcctttgttttatccacttcacattttaaataaatgtccactatacattcttctgttaattttactagatcgtcatgggtcatagaatttataggttccgtagtccatggatccaaactagcaaacttcgcgtatacggtatcgcgattagtgtatacaccaactgtatgaaaattaagaaaacagtttaataaatcaacagaaatatttaatcctccgtttgatacagatgcgccatatttatggatttcggattcacacgttgtttgtctgaggtgttcgtctagtgttgcttctacgtaaacttcgattcccatatattctttattgtcagaatcgcataccgatttatcatcatacactgtttgaaaactaaatggtatacacatcaaaataataaataataacgagtacattctgcaatattgttatcgtaattggaaaattagtgttcgagtgagtcggattatgtgagtactggattgtatattttattttatattttgtaataagaataaaatgctaatgtcaagtttattccaatagatgtcttattaaaaaacatatataataaataacaatggctgaatggcataaaattatcgaggatatctcaaaaaataataagttcgaggatgccgccatcgttgattacaagactacaaagaatgttctagctgctattcctaacagaacatttgccaagattaatccgggtgaaattattcctctcatcactaatcgtaatattctaaaacctcttattggtcagaaatattgtattgtatatactaactctctaatggatgagaacacgtatgctatggagttgcttactgggtacgcccctgtatctccgatcgttatagcgagaactcataccgcacttatatttttgatgggtaagccaacaacatccagacgtgatgtgtatagaacgtgtagagatcacgctacccgtgtacgcgcaactggtaattaaaataaaaagtaatattcatatgtagtgtcaattttaaatgatgatgatgaaatggataatatccatattgacgatgtcaataatgccggtattggcatacagctcatcgatttttagatttcattcagaggatgtggaattatgttatgggcatttgtattttgataggatctataatgtagtaaatataaaatataatccgcatattccatatagatataattttattaatcgcacgttaaccgtagatgaactagacgataatgtcttttttacacatggttattttttaaaacacaaatatggttcacttaatcctagtttgattgtctcattatcaggaaacttaaaatataatgatatacaatgctcagtaaatgtatcgtgtctcattaaaaatttggcaacgagtacatctactatattaacatctaaacataagacttattctctacatcggtccacgtgtattactataataggatacgattctattatatggtataaagatataaatgacaagtataatgacatctatgattttactgcaatatgtatgctaatagcgtctacattgatagtgaccatatacgtgtttaaaaaaataaaaatgaactcttaattatgctatgctattagaaatggataaaatcaaaattacggttgattcaaaaattggtaatgttgttaccatatcgtataacttggaaaagataactattgatgttacacctaaaaagaaaaaagaaaaggatgtattattagcgcaatcagttgctgtcgaagaggcaaaagatgtcaaggtagaagaaaaaaatattatcgatattgaagatgacgatgatatggatgtagaaagcgcataatacgatctataaaaataagtatataataaatactttttatttacggtactcttgtagtggtgataccctactcaattatttttttaaaaaaatacttattctgattcttctagccatttccgtgttcgttcgaatgccacatcgacgttaaagataggggagtagttgaaatctagttctgcattgttggtacgcacctcaaatgtagtgttggatatcttcaacgtatagttgttgagtagtgatggttttctaaatagaattctcttcatatcattcttgcacgcgtacatttttagcatccatcttggaattctagatccttgttctattcccaatggtttcatcaatagaagattaaacatatcgtacgaacacgatggagagtaatcgtagcaaaagtaagcatttcctttaatcttagatcccggatactggatatattttgcagccaacacgtgcatccatgcagcatttcctacatatacccggctatgcaccgcgtcatcatcgactgtacgatacataatgttaccgtgttgcttacattgctcgtaaaagactttcgtcaatttgtctccttctccgtaaattccagtgggtcttaggcaacaagtatacaattttgctccattcatgattacggaattattggctttcataaccagttgctcggccatacgtttactttttgcgtatacatgtcctggtgatatatcataaagggtatgctcatggccgatgaatggatcaccgtgtttattgggtcctattgcttccatgctactagtatagatcaaatacttgattcctaggtccacacaagctgccaatatagtctgtgttccataatagtttactttcatgatttcattatcggtgtattttccaaatacatccactagagcagccgtatgaataatcagatttaccccatctagcgcttctctcaccttatcaaagtcgtttatatcacattgtatatagtttataaccttaactttcgaggttattggttgtggatcttctacaatatctatgactctgatttcttgaacatcatctgcactaattaacagttttactatatacctgcctagaaatccggcaccaccagtaaccgcgtacacggccattgctgccactcataatatcagactacttattctattttactaaataatggctgtttgtataatagaccacgataatatcagaggagttatttactttgaaccagtccatggaaaagataaagttttaggatcagttattggattaaaatccggaacgtatagtttgataattcatcgttacggagatattagtcaaggatgtgattccataggcagtccagaaatatttatcggtaacatctttgtaaacagatatggtgtagcatatgtttatttagatacagatgtaaatatatttacaattattggaaaggcgttatctatttcaaaaaatgatcagagattagcgtgtggagttattggtatttcttacataaatgaaaagataatacattttcttacaattaacgagaatggcgtttgatatatcagttaatgcgtctaaaacaataaatgcattagtttacttttctactcagcaaaataaattagtcatacgtaatgaagttaatgatacacactacactgtcgaatttgatagggacaaagtagttgacacgtttatttcatataatagacataatgacaccatagagataagaggggtgcttccagaggaaactaatattggttgcgcggttaatacgccggttagtatgacttacttgtataataagtatagttttaaactgattttagcagaatatataagacacagaaatactatatccggcaatatttattcggcattgatgacactagatgatttggctattaaacagtatggagacattgatctattatttaatgagaaacttaaagtagactccgattcgggactatttgactttgtcaactttgtaaaggatatgatatgttgtgattctagaatagtagtagctctatctagtctagtatctaaacattgggaattgacaaataaaaagtataggtgtatggcattagccgaacatatatctgatagtattccaatatctgagctatctagactacgatacaatctatgtaagtatctacgcggacacactgagagcatagaggatgaatttgattattttgaagacgatgattcgtctacatgttctgccgtaaccgacagggaaacggatgtataattttttttatagcgtgaaggatatgataaaaaatataattgttgtatttatcccattccaatcaccttatatgattctgtaaaaaaattatactgtaacacaataaaggagtcttatagatgtatagaggtcagatactggtttgataaactgtttattccacataagtatgtttgactttatggttagacccgcatactttaacaaatcactgaaaattggagttaggtattgacctctcagaatcagttgccgttctggaacattaaatgtattttttatgatatactccaacgcatttatgtgggcatacaacaagtcattactaatggagtattccaagagttttagttgtctagtatttaacaagagaagagatttcaacagactgtttatgaactcgaacgccgcctcattgtcgcttatattgatgatgtcgaattctcccaatatcatcactgatgagtagctcatcttgttatcgggatccaagttttctaaagatgtcattaaaccctcgatcatgaatggatttatcatcatcgtttttatgttggacatgagcttagtccgtttgtccacatctatagacgacgatttctgaattatttcatatatccctctctttaactccaggaacttgtcaggatggtctactttaatatgttctcgtctaagagatgaaaatctttggatggttgcacgcgacttttctttaaaggatgacgttgcccaagatcctctcttaaatgaatccatcttatccttggacaagatggacagtctattttccttagatggtttaatatttttgttacccatgatctataaaggtagacctaatcgtctcggatgaccatatatttattttcagttttattatacgcataaattgtaaaaaatatgttaggtttacaaaaatgtctcgtggggcattaatcgtttttgaaggattggacaaatctggaaaaacaacacaatgtatgaacatcatggaatctataccggcaaacacgataaaatatcttaactttcctcagagatccactgtcactggaaagatgatagatgactatctaactcgtaaaaaaacctataatgatcatatagttaatctattattttgtgcaaatagatgggagtttgcatcttttatacaagaacaactagaacagggaattactttaatagttgatagatacgcattttctggagtagcgtatgccgccgctaaaggcgcgtcaatgactctcagtaagagttatgaatctggattgcctaaacccgacttagttatattcttggaatctggtagcaaagaaattaatagaaacgtcggcgaggaaatttatgaagatgttacattccaacaaaaggtattacaagaatataaaaaaatgattgaagaaggagatattcattggcaaattatttcttctgaattcgaggaagatgtaaagaaggagttgattaagaatatagttatagaggctatacacacggttactggaccagtggggcaactgtggatgtaatagtgaaattacattttttataaatagatgttagtacagtgttataaatggatgaagcatattactctggcaacttggaatcagtactcggatacgtgtccgatatgcataccgaactcgcatcaatatctcaattagttattgccaagatagaaactatagataatgatatattaaacaaggacattgtaaattttatcatgtgtagatcaaacttggataatccatttatctctttcctagatactgtatatactattatagatcaagagatctatcagaccgaattgattaattcattagacgacaatgaaattatcgattgtatagttaacaagtttatgagcttttataaggataacctagaaaatatagtagatgctatcattactctaaaatatataatgaataatccagattttaaaactacgtatgccgaagtactcggttccagaatagccgatatagatattaaacaagtgatacgtaagaatatactacaattgtctaatgatatccgcgaacgatatttgtgaaaaatattaaaaaaaaatactttttttattaaatgacgtcgcttcgcgaatttagaaaattatgctgtgatatatatcacgcatcaggatataaagaaaaatctaaattaattagagactttataacagatagggatgataaatatttgatcattaagctattgcttcccggattagacgatagaatttataacatgaacgataaacaaattataaaattatatagtataatatttaaacaatctcaggaagatatgctacaagatttaggatacggatatataggagacactattaggactttcttcaaagagaacacagaaatccgtccacgagataaaagcattttaactttagaagaagtggatagttttttaactacgttatcatccgtaactaaagaatcgcatcaaataaaattattgactgatgtagcatctgtttgtacatgtaatgatttaaaatgtgtagtcatgcttattgataaagatctaaaaattaaagcgggccctcggtacgtacttaacgctattagtcctcatgcctatgatgtgtttagaaaatctaataacttgaaagagataatagaaaatgcatctaaacaaaatctagactctatatctatttctgttatgactccaattaatcccatgttagcggaatcgtgtgattctgtcaataaggcgtttaaaaaatttccatcaggaatgtttgcggaagtcaaatacgatggtgaaagagtacaagttcataaaaataataacgagtttgccttctttagtagaaacatgaaaccagtactctctcataaagtggattatctcaaagaatacataccgaaagcatttaaaaaagctacgtctatcgtattggattctgaaattgttcttgtagacgaacataatgtaccgctaccgtttggaagtttaggaatacacaaaaagaaagaatataaaaactctaacatgtgtttgttcgtgtttgactgtttgtactttgatggattcgatatgacggacattccattgtacgaacgaagatcttttctcaaagatgttatggttgaaatacccaatagaatagtattctcagagttgacgaatattagtaacgagtctcagttaactgacgtattggatgatgcactaacgagaaaattagaaggattggtcttaaaagatattaatggagtatacgaaccgggaaagagaagatggttaaaaataaagcgagactatttgaacgagggttccatggcagattctgccgatttagtagtactaggtgcctactatggtaaaggagcaaagggtggtatcatggcagtctttctaatgggttgttacgacgatgaatccggtaaatggaagacggttaccaagtgttcaggacacgatgataatacgttaagggagttgcaagaccaattaaagatgattaaaattaacaaggatcccaaaaaaattccagagtggttagtagttaataaaatctatattcccgattttgtagtagaggatccgaaacaatctcagatatgggaaatttcaggagcagagtttacatcttccaagtcccataccgcaaatggaatatccattagatttcctagatttactaggataagagaggataaaacgtggaaagaatctactcatctaaacgatttagtaaacttgactaaatcttaatagttacatacaaactgaaaattaaaataacaccatttagttggtggtcgccatggatggtgttattgtatactgtctaaacgcgttagtaaaacatggcgaggaaataaatcatataaaaaatgatttcatgattaaaccatgttgtgaaagagtttgtgaaaaagtcaagaacgttcacattggcggacaatctaaaaacaatacagtgattgcagatttgccatatatggataatgcggtatccgatgtatgcaattcactgtataaaaagaatgtatcaagaatatccagatttgctaatttgataaagatagatgacgatgacaagactcctactggtgtatataattattttaaacctaaagatgttattcctgttatcatatctataggaaaggataaagatgtctgtgaactattaatctcatcagacatatcgtgtgcatgcgtggagttaaattcatatcacgtagccattcttcccatgaatgtttccttttttaccaaaggaaatgcctcgttgattattctcctgtttgatttctctatcgatgcagcacctctcttaagaagtgtaaccgataataatgttattatatctagacaccagcgtctacatgacgagcttccgagttccaattggttcaagttttacataagtataaagtccgactattgttctatattatatatggttgttgatggatctgtgatgcatgcgatagctgataatagaactcacgcaattattagcaaaaatatattagacaatactacaattaacgatgagtgtagatgctgttattttgaaccacagattaggattcttgatagagatgagatgctcaatggatcatcgtgtgatatgaacagacattgtattatgatgaatttacctgatgtaggcgaatttggatctagtatgttggggaaatatgaacctgacatgattaagattgctctttcggtggctggtaatttaataagaaatcgagactacattcccgggagacgaggctatagctactacgtttacggtatagcctctagataatttttttaagcacgaaataaaaaacataattttaaaccaatctatttcatactattttgtgtgatcaccatggacataaagatagatattagtatttctggtgataaatttacggtgactactaggagggaaaatgaagaaagaaaaaaatatctacctctccaaaaagaaaaaactactgatgttatcaaacctgattatcttgagtacgatgacttgttagatagagatgagatgtttactattctagaggaatattttatgtacagaggtctattaggcctcagaataaaatatggacgactctttaacgaaattaaaaaattcgacaatgatgcggaagaacaattcggtactatagaagaactcaagcagaaacttagattaaattctgaagagggagcagataactttatagattatataaaggtacaaaaacaggatatcgtcaaacttactgtatacgattgcatatctatgataggattgtgtgcatgcgtggtagatgtttggagaaatgagaaactgttttctagatggaaatattgtttacgagcgattaaactgtttattaatgatcacatgcttgataagataaaatctatactgcagaatagactagtatatgtggaaatgtcatagaaagttaatgagagcaaaaatatataaggttgtattccatatttgttattttttctgtaatagttaaaaaaatacattcgatggtctatctatcagattattatgtgttataaggtactttttctcataataaactagagtatgagtaagatagtgtttttcaaaacatataaatctaaaattgatggatgagatatacagctattaatttcgaaaatatataaatctaaaattgatggataagatatacagctattaatttcgaaaatatattttaatctgataactttaaacatggatttttgatggtggtttaacgttttaaaaaaagattttgttattgtagtatatgataatattaaaagatggatataaagaatttgctgactgcatgtactattttttacattactacattggctacggcagatatacctactccgccaccaacgggtcatgtgacaagggagaatatcttgataagaggcataatcaatgttgtaatcggtgtccacctggagaatttgccaaggttagatgtaatggtaacgataacacaaaatgtgaacgctgcccacctcatacatataccacaatccccaattattctaatggatgtcatcaatgtagaaaatgcccaaccggatcatttgataaggtaaagtgtaccggaacacagaacagtaaatgttcgtgtcttcctggttggtattgcgctactgattcttcacagactgaagattgttgaaattgtgtaccaaaaaggagatgtccatgcggatactttggtggaatagatgaacaaggaaatcctatttgtaaatcgtgctgtattggtgaatattgcaactacctacgtaattatagacttgatccattttctccatgcaaactatctaaatgtaattaattatgattttgatgataatgttaccatacattatatcgctacttggttagtgtattattcagtatgaagacctattaataattacttatcttttgacgatcttgttataattataatataaaaacttatggcatagtaactcataattgctgacgcgataaattcgtaataatctgttttgttcaaatttttataaggaatctacaggcataaaaataaaaatataatttataatatactcttacagcgcgccatcatgaatagcagcagtaaattaattgctgttattaatggatttagaaatagtggacgattttgtgatattaatatagttattaatgatgaaaggataaacgctcacagactcatcctatctggagcctccgaatatttttccattctgttttccaataattttatcgattctaatgaatacgaagttaatctaagtcatttagattatcaaagtgttaacgatttgatcgattacatttatgggatacctttgagcctaactaacgataacgtgaaatatattctttcaaccgctgattttttacaaattggatctgccattactgagtgcgaaaaatacatacttaaaaatctttgttctagaaactgtatcgatttctacatatacgctgataaatataataacaagaaaatagaatcagcgtcgtttaacacaatattacgaaatattttgagactcatcaacgatgaaaactttaaatacttaacagaggaatcaatgataaaaattttaagcgatgatatgttaaatataaaaaatgaggattttgcaccactaattctcattaaatggttagagagtactcaacaatcatgcaccgtcgagttacttagatgcctcagaatatcattgctttccccacaagttataaaatcactttatagtcatcaactggttagttcaatctacgaatgtataacattcttaaacaatatagcattcttggatgaatcatttcctagataccatagcatcgagttgatatctatcggtataagtaattcgcatgataagatttccataaactgctacaatcataaaaaaaatacatgggaaatgatatcttcacgtagatataggtgtagtttcgcagtggccgtcctggataatattatctatatgatgggtggatatgatcagtccccgtatagaagttcaaaggttatagcgtacaatacatgtacaaattcttggatatatgatataccagagctaaaatatcctcgttctaattgtgggggactggctgatgacgaatacatttattgtataggcggcatacgcgatcaggattcatcgttgacatctagtattgatagatggaagccatcaaaaccatattggcagaagtatgctaaaatgcgcgaaccaaaatgtgatatgggggttgcgatgttaaacggattaatatatgtcatgggtggaatcgttaaaggtgacacgtgtaccgacgcactagagagtttatcagaagatggatggatgaagcatcaacgtcttccaataaaaatgtccaatatgtcgacgattgttcatgatggcaagatttatatatctggaggttacaacaatagtagtgtagttaatgtaatatcgaatctagtccttagctataatccgatatatgatgaatggaccaaattatcatcattaaacattcctagaattaatcccgctctatggtcagcgcataataaattatatgtaggaggaggaatatctgatgatgttcgaactaatacatctgaaacatacgataaagaaaaagattgttggacattggataatggtcacgtgttaccacgcaattatataatgtataaatgcgaaccgattaaacataaatatccattggaaaaaacacagtacacgaatgattttctaaagtatttggaaagttttataggtagttgatagaacaaaatacataattttgtaaaaataaatcactttttatactaatatgacacgattaccaatacttttgttactaatatcattagtatacgctacaccttttcctcagacatctaaaaaaataggtgatgatgcaactctatcatgtaatcgaaataatacaaatgactacgttgttatgagtgcttggtataaggagcccaattccattattcttttagctgctaaaagcgacgtcttgtattttgataattataccaaggataaaatatcttacgactctccatacgatgatctagttacaactatcacaattaaatcattgactgctagagatgccggtacttatgtatgtgcattctttatgacatcaactacaaatgacactgataaagtagattatgaagaatactccacagagttgattgtaaatacagatagtgaatcgactatagacataatactatctggatctacacattcaccagaaactagttctgagaaaccagaggatatagataattttaattgctcgtcggtattcgaaatcgcgactccggaaccaattactgataatgtagaagatcatacagacaccgtcacatacactagtgatagcattaatacagtaagtgcatcatctggagaatccacaacagacgagactccggaaccaattactgataaagaagaagatcatacagtcacagacactgtctcatacactacagtaagtacatcatctggaattgtcactactaaatcaaccaccgatgatgcggatctttatgatacgtacaatgataatgatacagtaccaccaactactgtaggcggtagtacaacctctattagcaattataaaaccaaggactttgtagaaatatttggtattaccgcattaattatattgtcggccgtggcaatattctgtattacatattatatatataataaacgttcacgtaaatacaaaacagagaacaaagtctagatttttgacttacataaatgtctgggatagtaaaatctatcatattgagcggaccatctggttcaggaaagacagccatagccaaaagactatgggaatatatttggatttgtggtgtcccataccactagatttcctcgtcctatggaacgagaaggtgtcgattaccattacgttaacagagaggccatctggaagggaatagccgccggaaactttctagaacatactgagtttttaggaaatatttacggaacttctaaaactgctgtgaatacagcggctattaataatcgtatttgtgtgatggatctaaacatcgatggcgttagaagtcttaaaaatacgtacctaatgccttactcggtgtatataagacctacctctcttaaaatggttgagaccaagcttcgttgtagaaacactgaagcggatgatgagattcatcgtcgtgtgatgttggcaaaaactgacatggatgaggcaggtgaagccggtctattcgacactattatcattgaagatgatgtgaatttagcatatagtaagttaattcagatactacaggaccgtattagaatgtattttaacactaattagagacttaagacttaaaacttgataattaataatataactcgtttttatatgtggctatttcaacgtctaatgtattagttaaatattaaaacttaccacgtaaaacttaaaatttaaaatgatatttcattgacagatagatcacacattatgaactttcaaggacttgtgttaactgacaattgcaaaaatcaatgggtcgttggaccattaataggaaaaggtggattcggtagtatttatactactaatgacaataattatgtagtaaaaatagagcccaaagctaacggatcattatttaccgaacaggcattttatactagagtacttaaaccatccgttatcgaagaatggaaaaaatctcacaatataaagcacgtaggtcttatcacgtgcaaggcatttggtctatacaaatccattaatgtggaatatcgattcttggtaattaatagattaggtgcagatctagatgcggtgatcagagccaataataatagattaccaaaaaggtcggtgatgttgatcggaatcgaaatcttaaataccatacaatttatgcacgagcaaggatattctcacggagatattaaagcgagtaatatagtcttggatcaaatagataagaataaattatatctagtggattacggattggtttctaaattcatgtctaatggcgaacatgttccatttataagaaatccaaataaaatggataacggtactctagaatttacacctatagattcgcataaaggatacgttgtatctagacgtggagatctagaaacacttggatattgtatgattagatggttgggaggtatcttgccatggactaagatatctgaaacaaagaattgtgcattagtaagtgccacaaaacagaaatatgttaacaatactgcgactttgttaatgaccagtttgcaatatgcacctagagaattgctgcaatatattaccatggtaaactctttgacatattttgaggaacccaattacgacgagtttcggcacatattaatgcagggtgtatattattaagtgtggtgtttggtcgatgtaaaatttttgtcgataaaaattaaaaaataacttaatttattattgatctcgtgtgtacaaccgaaatcatggcgatgttttacgcacacgctctcggtgggtacgacgagaatcttcatgcctttcctggaatatcatcgactgttgccaatgatgtcaggaaatattctgttgtgtcagtttataataacaagtatgacattgtaaaagacaaatatatgtggtgttacagtcaggtgaacaagagatatattggagcactgctgcctatgtttgagtgcaatgaatatctacaaattggagatccgatccatgatcaagaaggaaatcaaatctctatcatcacatatcgccacaaaaactactatgctctaagcggaatcgggtacgagagtctagacttgtgtttggaaggagtagggattcatcatcacgtacttgaaacaggaaacgctgtatatggaaaagttcaacatgattattctactatcaaagagaaggccaaagaaatgaatgcactcagttcaggacctatcatcgattaccacgtctggataggagattgtatctgtcaagttactgctgtggacgtacatggaaaggaaattatgagaatgagattcaaaaagggtgcggtgctacagatcccaaatctggtaaaagttaaacttggggagaatgatacagaaaatctttcttctactatatcggcggcaccatcgaggtaaccacctctcaagaagaccgcgtgaataatgtactcatgaaacgtttggaaactatacgccatatgtggtctgttgtatatgatcattttgatattgtgaatggtaaagaatgctgttatgtgcatacgcattcatctaatcaaaatcctataccgagtactgtaaaaacaaatttgtacatgaagactatgggatcatgcattcaaatggattccatggaagctctagagtatcttagcgaactgaaggaatcaggtggatggagtcccagaccagaaatgcaggaatttgaatatccagatggagtggaagacactgaatcaattgagagattggtagaggagttcttcaatagatcagaacttcaggctggtaaattagtcaaatttggtaattctattaattgttaaacatacatctgtttcagctaagcaactaagaacacgtatacggcagcagcttccttttatactctcatcttttaccaacacaaagggtggatatttgttcattggagttgataataatacacacaaagtatttggattcacggtgggttacgactacctcagactgatagagaatgatatagaaaagcatatcaaaagactttgtgttgtgcatttctgtgagaagaaagaggacatcaagtacacgtgtcgattcatcaaggtatataaacctggggatgaggctacctcgacatacgtgtgcgctatcaaagtggaaagatgctgttgtgctgtgtttgcagattggccagaatcatggtatatggatactaatggtatcaagaagtattctccagatgaatgggtgtcacatataaaattttaattaatgtaactatagagaacaaataataggttgtaatatcatatagacaataactaacaattaattagtaactgttatctcttttttaactaaccaactaactatatacctattaatacatcgtaattatagttcttaacatctattaatcattgattcgcttctttaattttttataaactaacattgttaattgaaaagggataacatgttacagaatataaattatatatggatttttttaaaaaggaaatacttgactggagtgtatatttatctcttcattatatagcacgcgtgtgttccaattcttccacatcccatataatacaggattataatctcgttcgaacatacgagaaagtggataaaacaatagttgattttttatctaggttgccaaatttattccatattttagaatatggggaaaatattctacatatttattctatggatgatgctaatacgaatattataattttttttctagatagagtattaaatattaataagaacgggtcatttatacacaatctcaggttatcatcatccattaatataaaagaatatgtatatcaattagttaataatgatcatccagataataggataagactaatgcttgaaaatggacgtagaacaagacattttttgtcctatatatcagatacagttaatatctatatatgtattttaataaatcatggattttatatagatgcagaagacagttacggttgtacattattacatagatgtatatatcactataagaaatcagaatcagaatcatacaatgaattaattaagatattgttaaataatggatccgatgtagataaaaaagatacgtacggaaacacaccttttatcctattatgtaaacacgatatcaacaacgtggaattgtttgagatatgtttagagaatgctaatatagactctgtagactttaatagatatacacctcttcattatgtctcatgtcgtaataaatatgattttgtaaagttattaatttctaaaggagcaaatgttaatgcgcgtaataaattcggaactactccattttattgtggaattatacacggtatctcgcttataaaactatatttggaatcagacacagagttagaaatagataatgaacatatagttcgtcatttaataatttttgatgctgttgaatctttagattatctattatccagaggagttattgatattaactatcgtactatatacaacgaaacatctatttacgacgctgtcagttataatgcgtataatacgttggtctatctattaaacagaaatggtgattttgagacgattactactagtggatgtacatgtatttcggaagcagtcgcaaacaacaacaaaataataatggaagtactattgtctaaacgaccatctttgaaaattatgatacagtctatgatagcaattactaaaaataaacaacataatgcagatttattgaaaatgtgtataaaatatactgcgtgtatgaccgattatgatactcttatagatgtacagtcgctacagcaatataaatggtatattttaaaatgtttcgatgaaatagatatcatgaagagatgttatataaaaaataaaactgtattccaattagttttttgtatcaaagacattaatactttaatgagatatggtaaacatccttctttcgtgaagtgcactagtctcgacgtatacggaagtcgtgtacgtaatatcatagcatctattagatatcgtcagagattaattagtctattatccaagaagctggatgcgggagataaatggtcgtgttttcctaacgaaataaaatataaaatattggaaaactttaacgataacgaactatccacatatctaaaaatcttataaacactattaaaatataaaatctaagtaggataaaatcacactacatcattgtttccttttagtgctcgacagtgtatactatttttaacactcataaataaaaatgaaaacgatttccgttgttacgttgttatgcgtactacctgctgttgtttattcaacatgtactgtacccactatgaataacgctaaattaacgtctaccgaaacatcgtttaatgataaacagaaagttacatttacatgtgatcagggatatcattctttggatccaaatgctgtctgcgaaacagataaatggaaatacgaaaatccatgcaagaaaatgtgcacagtttctgattatgtctctgaattatatgataagccattatacgaagtgaattccaccatgacactaagttgcaacggcgaaacaaaatattttcgttgcgaagaaaaaaatggaaatacttcttggaatgatactgttacgtgtcctaatgcggaatgtcaacctcttcaattagaacacggatcgtgtcaaccagttaaagaaaaatactcatttggggaatatatgactatcaactgtgatgttggatatgaggttattggtgcttcgtacataagttgtacagctaattcttggaatgttattccatcatgtcaacaaaaatgtgatataccgtctctatctaatggattaatttccggatctacattttctatcggtggcgttatacatcttagttgtaaaagtggttttatactaacgggatctccatcatccacatgtatcgacggtaaatggaatcccatactcccaacatgtgtacgatctaacgaaaaatttgatccagtggatgatggtcccgacgatgagacagatttgagcaaactctcgaaagacgttgtacaatatgaacaagaaatagaatcgttagaagcaacttatcatataatcatagtggcgttaacaattatgggcgtcatatttttaatctccgttatagtattagtttgttcctgtgacaaaaataatgaccaatataagttccataaattgctaccgtaaatataaatccgttaaaataattaataatttaataacaaacaagtatcaaaagattaaagacttatagctagaatcaattgagatgtcttcttcagtggatgttgatatctacgatgccgttagagcatttttactcaggcactattataacaagagatttattgtgtatggaagaagtaacgccatattacataatatatacaggctatttacaagatgcgccgttataccgttcgatgatatagtacgtactatgccaaatgaatcacgtgttaaacaatgggtgatggatacacttaatggtataatgatgaatgaacgcgatgtttctgtaagcgttggcaccggaatactattcatggaaatgtttttcgattacaataaaaatagtatcaacaatcaactaatgtatgatataattaatagcgtatctataattctagctaatgagagatatagaagcgcttttaacgacgatggtatatacatccgtagaaatatgattaacaagttgtacggatacgcatctctaactactattggcacgatcgctggaggtgtttgttattatctgttgatgcatctagttagtttgtataaataattatttcaatatactagttaaaattttaagattttaaatgtataaaaaactaataacgtttttatttgtaataggtgcattagcatcctattcgaataatgagtacactccgtttaataaactgagtgtaaaactctatatagatggagtagataatatagaaaattcatatactgatgataataatgaattggtgttaaattttaaagagtacacaatttctattattacagagtcatgcgacgtcggatttgattccatagatatagatgttataaacgactataaaattattgatatgtataccattgactcgtctactattcaacgcagaggtcacacgtgtagaatatctaccaaattatcatgccattatgataagtacccttatattcacaaatatgatggtgatgagcaacaatattctattactgcagagggaaaatgctataaaggaataaaatatgaaataagtatgatcaacgatgatactctattgagaaaacatactcttaaaattggatctacttatatatttgatcgtcatggacatagtaatacatattattcaaaatatgatttttaaaaatttaaaatatattatcacttcagtgacagtagtcaaataacaaacaacaccatgagatatattataattctcgcagttttgttcattaatagtatacacgctaaaataactagttataagtttgaatccgtcaattttgattccaaaattgaatggactggggatggtctatacaatatatcccttaaaaattatggcatcaagacgtggcaaacaatgtatacaaatgtaccagaaggaacatacgacatatccgcatttccaaagaatgatttcgtatctttctgggttaaatttgaacaaggcgattataaagtggaagagtattgtacgggactatgcgtcgaagtaaaaattggaccaccgactgtaacattgactgaatacgacgaccatatcaatttgtacatcgagcatccgtatgctactagaggtagcaaaaagattcctatttacaaacgcggtgacatgtgtgatatctacttgttgtatacggctaacttcacattcggagattctaaagaaccagtaccatatgatatcgatgactacgattgcacgtctacaggttgcagcatagactttgtcacaacagaaaaagtgtgcgtgacagcacagggagccacagaagggtttctcgaaaaaattactccatggagttcgaaagtatgtctgacacctaaaaagagtgtatatacatgcgcaattagatccaaagaagatgttcccaatttcaaggacaaaatggccagagttatcaagagaaaatttaataaacagtctcaatcttatttaactaaatttctcggtagcacatcaaatgatgttaccacttttcttagcatgcttaacttgactaaatattcataactaatttttattaatgatacaaaaacgaaataaaactgcatattatacactggttaacgcccttataggctctaaccattttcaagatgaggtccctgattatagtccttctgttcccctctatcatctactccatgtctattagacgatgtgagaagactgaagaggaaacatggggattgaaaatagggttgtgtataattgccaaagatttctatcccgaaagaactgattgcagtgttcatctcccaactgcaagtgaaggattgataactgaaggcaatggattcagggatatacgaaacaccgataaattataaaaaaagcaatgtgtccgctgtttccgttaataatactattttcgtaactggcggattattcataaataactctaatagcacgatcgtggttaacaatatggaaaaacttgacatttataaagacaaacaatggtcgattatagaaatgcctatggctagggtatatcacggcatcgactcgacatttggaatgttatattttgccggaggtctatccgttaccgaacaatatggtaatttagagaaaaacaacgagatatcttgttacaatcctagaacgaataagtggtttgatatttcatatactatttataagatatccatatcatcattgtgtaaactaaataacgtcttctatgtatttagtaaggacattggatatgtggaaaagtatgatggtgcatggaagttagtacatgatcgtctccccgctataaaggcattatcaacttctccttattgattgaaaatgaaaatataaatagtttttatgtatagcagtattaccctatagttttattgcttactactaacatggatacagatgttacaaatgtagaagatatcataaatgaaatagatagagagaaagaagaaatactaaaaaatgtagaaattgaaaataataaaaacattaacaagaatcatccaagtggatatattagagaagcactcgttattaatacaagtagtaatagtgattccattgataaagaagttatagaatgtatcagtcacgatgtaggaatatagatcatatctactaatttttataatcgatacaaaacataaaaaacaactcgttattacatagcaggcatggaatccttcaagtattgttttgataacgatggcaagaaatggattatcggaaatactttatattctggtaattcaatactatataaggtcagaaaaaatttcactagttcgttctacaattacgtaatgaaaatagatcacaaatcacacaagccattgttgtctgaaatacgattctatatatctgtattggatcctttgactatcgacaactggacacgggaacgtggtataaagtatttggctattccagatctgtatggaattggagaaaccgatgattatatgttcttcgttataaagaattcgggaagagtattcgccccaaaggatactgaatcagtcttcgaagcatgcgtcactatgataaacacgttagagtttatacactctcgaggatttacccatggaaaaatagaaccgaggaatatactgattagaaataaacgtctttcactaattgactattctagaactaacaaactatacaagagtggaaactcacatatagattacaacgaggacatgataacttcaggaaatatcaattatatgtgtgtagacaatcatcttggagcaacagtttcaaaacgaggagatttagaaatgttgggatattgcatgatagaatggttcggtggcaaacttccatggaaaaacgaaagtagtataaaagtaataaaacaaaaaaaagaatataaaaaatttatagctactttctttgaggactgttttcctgaaggaaatgaacctctggaattagttagatatatagaattagtatacacgttagattattctcaaactcctaattatgacagactacgtaaactgtttatacaagattgaaattatattctttttttatagagtgtggtagtgttacggatatctaatattaatattagactatctctatcgcgctacacgaccaatatcgattactatggatatcttcagggaaatcgcatcttctatgaaaggagagaatgtattcatttctccagcgtcaatctcgtcagtattgacaatactgtattatggagctaatggatccactgctgaacagctatcaaaatatgtagaaacggaggagaacacggataaggttagcgctcagaatatctcattcaaatccatgaataaagtatatgggcgatattctgccgtgtttaaagattcctttttgagaaaaattggcgataagtttcaaactgttgacttcactgattgtcgcactatagatgcaatcaacaagtgtgtagatatctttactgaggggaaaatcaatccactattggatgaaccattgtctcctgatacctgtctcctagcaattagtgccgtatactttaaagcaaaatggttgatgccattcgaaaaggaatttaccagtgattatcccttttacgtatctccgacggaaatggtagatgtaagtatgatgtctatgtacggcaaggcatttaatcacgcatctgtaaaggaatcattcggcaacttttcaatcatagaactgccatatgttggagatactagtatgatggtcattcttccagacaagattgatggattagaatccatagaacaaaatctaacagatacaaattttaagaaatggtgtaactctctggaagctacgtttatcgatgttcacattcccaagtttaaggtaacaggttcgtataatcttgtggatactctagtaaagtcaggactgacagaggtgttcggttcaactggagattatagcaatatgtgtaattcagatgtgagtgtcgacgctatgattcacaaaacgtatatagatgtcaatgaagagtatacagaagcagctgcagcaacttgtgcactggtgtcagactgtgcatcaacaattacaaatgagttctgtgtagatcatccgttcatctatgtgattaggcatgttgatggaaaaattcttttcgttggtagatattgctctccgacaactaattgttaaccattttttttaaaaaaatagaaaaaacatgtggtattagtgcaggtcgttgttcttccaattgcaattggtaagatgacggccaactttagtacccacgtcttttcaccacagcactgtggatgtgacagactgaccagtattgatgacgtcagacaatgtttgactgaatatatttattggtcgtcctatgcataccgcaacaggcaatgcgctggacagttgtattccacactcctctcttttagagatgatgcggaatcagtgttcatcgacattcgcgagctggtaaaaaatatgccgtgggatgatgtcaaagattgtacagaaatcatccgttgttatataccggatgagcaaaaaaccatcagagagatttcggccatcatcggactttgtgcatatgctgctacttactggggaggtgaagaccatcccactagtaacagtctgaacgcattgtttgtgatgcttgagatgctcaattacgtggattataacatcatattccggcgtatgaattgatgagttgtacatcttgacattttctttcttctcttctccctttcttctcttctcccttcctccctcttctccctttcccagaaacaaacttttttacccactataaaataaaatgagtatactacctattatatttcttcctatatttttttattcttcattcgttcagacttttaacgcgcctgaatgtatcgacaaagggcaatattttgcatcattcatggagttagaaaacgagccagtaatcttaccatgtcctcaaataaatacgctatcatccggatataatatattagatattttatgggaaaaacgaggagcggataatgatagaattataccgatagataatggtagcaatatgctaattctgaacccgacacaatcagactctggtatttatatatgcattaccacgaacgaaacctactgtgacatgatgtcgttaaatttgacaatcgtgtctgtctcagaatcaaatatagatcttatctcgtatccacaaatagtaaatgagagatctactggcgaaatggtatgtcccaatattaatgcatttattgctagtaacgtaaacgcagatattatatggagcggacatcgacgccttagaaataagagacttaaacaacggacacctggaattattaccatagaagatgttagaaaaaatgatgctggttattatacatgtgttttagaatatatatacagaggtaaaacatataacgtaaccagaattgtaaaattagaggtacgggataaaataataccttctactatgcaattaccagatggcattgtaacttcaataggtagtaatttgactattgcgtgtagagtatcgttgagacctcccacaacggatgcagacgtcttttggataagtaatggtatgtattacgaagaagatgatggggacggagacggtagaataagtgtagcaaataaaatctatatgaccgataagagacgtgttattacatcccggttaaacattaatcctgtcaaggaagaagatgctacaacgtttacgtgtatggcgtttactattcctagcatcagcaaaacagttactgttagtataacgtgaatgtatgttgttacatttccatgtcaattgagtttataagaatttttatacattatcttccaacaaacaattgacgaacgtattgctatgattaactcccacgatactatgcatattattaatcattaacttgcagactatacctagtgctattttgacatactcatgttcttgtgtaattgcggtatctatattattaaagtacgtaaatctagctatagttttattatttaattttagataatataccgtctccttatttttaaaaattgccacatcctttattaaatcatgaatgggaatttctatgtcatcgttagtatattgtgaacaacaagagcagatatctataggaaagggtggaatgcgatacattgatctatgtagttttaaaacacacgcgaactttgaagaatttatataaatcattccatcgatacatccttctatgttgacatgtatatatccaggaattcttttattaatgtcaggaaatgtataaactaaaacattgcccgaaagcggtgcctctatctgcgttatatccgttcttaacttacaaaatgtaaccaatacctttgcatgacttgttttgttcggcaacgttagtttaaacttgacgaatggattaattacaatagcatgatccgcgcatctattaagtttttttactttaacgcccttgtatgtttttacagagactttatctaaatttctagtacttgtatgtgttataaatataacgggatatagaactgaatcacctaccttagatacccaattacattttatcagatccagataataaacaaattttgtcgccctaactaattctatattgttatatattttacaattggttatgatatcatgtaataacttggagtctaacgcgcatcgtcgtacgtttatacaattgtgatttagtgtagtatatctacacatgtatttttccgcactatagtattctggactagtgataaaactatcgttatatctgtcttcaatgaactcatcgagatattgctctctgtcatattcatacacctgcataaactttctagacatcttacaatccgtgttattttaggatcatatttacatatttacgggtatatcaaagatgttagattagttaatgggaatcgtctataataatgaatattaaacaattatatgaggacttttaccacaaagcatcataaaaatgagtcgtcgtctgatttatgttttaaatatcaaccgcaaatcaactcataaaatacaagagaatgaaatatatacatattttagtcattgcaatatagaccatacttctacagaacttgattttgtagttaaaaactatgatctaaacagacgacaacatgtaactgggtatactgcactacactgctatttgtataataattactttacaaacgatgtactgaagatattattaaatcatgacgtaaatgtaacgatgaaaaccagtagcggacgtatgcctgtttatatattgcttactagatgttgcaatatttcacatgatgtagtgatagatatgatagacaaagataaaaaccacttattacatagagactattccaacctattactagagtatataaaatctcgttacatgttattaaaggaagaggatatcgatgagaacatagtatccactttattagataagggaatcgatcctaactttaaacaagacggatatacagcgttacattattattatttgtgtctcgcacacgtttataaaccaggtgagtgtagaaaaccgataacgataaaaaaggccaagcgaattatttctttgtttatacaacatggagctaatctaaacgcgttagataattgtggtaatacaccattccatttgtatcttagtattgaaatgtgtaataatattcatatgactaaaatgctgttgacttttaatccgaatttcaaaatatgtaataatcatggattaacgcctatactatgttatataacttccgactacatacaacacgatattcttgttatgttaatacatcactatgaaacaaatgttggagaaatgccgatagatgagcgtcgtatgatcgtattcgagtttatcaaaacatattctacacgtccggcagattcgataacttatttgatgaataggtttaaaaatataaatatttatacccgctatgaaggaaagacattattacacgtagcatgtgaatataataatacacacgtaatagattatcttatacgtatcaacggagatataaatgcgttaaccgacaataacaaacacgctacacaactcattatagataacaaagaaaattccccgtataccatcgattgtttactgtatatacttagatatattgtagataagaatgtgataagatcgttggtggatcaacttccatctctacctatcttcgatataaaatcatttgagaaattcatatcctactgtatacttttagatgacacattttacgataggcacgttaagaatcgcgattctaaaacgtatcgatacgcattttcaaaatacatgtcgtttgataaatacgatggtataataactaaatgtcacgacgaaacaatgttactcaaactgtccactgttctagacactacactatatgcagttttaagatgccataattcgaaaaagttaagaagatacctcaacgagttaaaaaaatataataacgataagtcctttaaaatatattctaatattatgaatgagagataccttaatgtatattataaagatatgtacgtgtcaaaggtatatgataaactatttcctgttttcacagataaaaattgtctactaacattactaccttcagaaattatatacgaaatattatacatgctgacaattaacgatctttataatatatcgtatccacctaccaaagtatagttgtatttttctcatgcgatgtgtgtaaaaaaactgatattatataaatattttagtgccgtataataaagatgacgatgaaaatgatggtacatatatatttcgtatcattattgttattgctattccacagttacgccatagacatcgaaaatgaaatcacagaattcttcaataaaatgagagatactctaccagctaaagactctaaatggttgaatccagcatgtatgttcggaggcacaatgaatgatatagccgctctaggagagccattcagcgcaaagtgtcctcctattgaagacagtcttttatcgcacagatataaagactatgtggttaaatgggagaggctagaaaagaatagacggcgacaggtttctaataaacgtgttaaacatggtgatttatggatagccaactatacatctaaattcagtaaccgtaggtatttgtgtaccgtaactacaaagaatggtgactgtgttcagggtatagttagatctcatattaaaaaacctccttcatgcattccaaaaacatatgaactaggtactcatgataagtatggcatagacttatactgtggaattctttacgcaaaacattataataatataacttggtataaagataataaggaaattaatatcgacgacattaagtattcacaaacgggaaagaaattaattattcataatccagagttagaagatagtggaagatacaactgttacgttcattacgacgacgttagaatcaagaatgatatcgtagtatcaagatgtaaaatacttacggttataccgtcgcaagaccacaggtttaaactaatactagatccaaaaatcaacgtaacgataggagaacctgccaatataacatgcactgctgtgtcaacgtcattattgattgacgatgtactgattgaatgggaaaatccatccggatggcttataggattcgattttgatgtatactctgttttaactagtagaggcggtattaccgaggcgaccttgtactttgaaaatgttactgaagaatatataggtaatacatataaatgtcgtggacacaactattattttgaaaaaacccttacaactacagtagtattggagtaaatacacaatgcatttttatatacattactgaataattattattattatttatatcgtatttgtgctataacgcgactatctaggtatttgtatctcactgatagagaacatataaatatagactctattaaacagttgtgtaaaatatcaaatcctaatagatgtggatgtacggctttacatgagtacttttataattatagatcagtcaacggaaaatacaagtatagatacaacggttactatcaatattatttatctagcgattatgaaaattataatgaatattattatgatgattatgatagaactggtatgaacagtgagagtgataatatatcaatcaaaacagaatatgaattctatgatgaaacacaagatcaaagtacacaactagtaggttacgacattaaactcaaaaccaatgaggatgattttatggctatgatagatcagtgggtgtccatgattatatagatgaatcaattaataaagtagtatatggaagagagtctcacgtaagatggcgggatatatggcaagaacataatgatggcgtatacagtataggaaaggagtgcatagataatatatacgaagacaaccataccgtagacgaattctacaagatagacagcgtatcagatgtagatgacgcggaacacatatctccgataactaatgatgtatctacacaaacatgggaaaagaaatcagagttagatagatacatggaaatgtatcctcgtcatagatatagtaagcattctgtctttaagggattttctgacaaagttagaaaaaatgatttagacatgaatgtggtaaaagaattactttctaacggtgcatctctaacaattaaggatagcagtaataaggatccaataaccgtttattttcgaagaacgataatgaatttagaaatgattgatattattaacaaacatacaactattgatgaacgaaagtatatagtacactcctatctaaaaaattataaaaatttcgattatccatttttcaggaagttagttttgactaataaacattgtctcaacaattattataatataagcgacagcaaatatggaacaccgctacatatattggcgtctaataaaaaattaataactcctaattacatgaagttattagtgtataacggaaatgatataaacgcacgaggtgaagatacacaaatgcgaactccattacacaaatatttgtgtaaatttgtatatcataatattgaatatggtatccgatactataatgaaaagattatagacgcatttatagagttaggagccgatctaactattccaaataacgatggaatgataccagtagtttactgtatacactcaaatgcagaatatggttataacaatattactaacataaagataatacgtaaactacttaatcttagtagacgtgcgtcacataatctatttagagatcgagtcatgcacgattatataagtaatacatatattgatcttgagtgtttagatattattagatcgttggatggattcgatatcaatggttactttgaaggacgtacaccacttcattgcgctatacaacataacttcactcagattgctaagtacttattagatcgaggagctgatatagtcgtacccaacacattgattatacatcagtacatacagtaaatagcatagatatggaggaggatacaaatatttcaaataaagttataaggtacaacactgtcaataatatatggaagacattacctaacttctggactggaactataaatccaggcgtggtctcgcataaagatgatatatatgttgtatgcgacatcaaagatgaaaaaaatgttaagacttgtatatttagatataacacgaatacgtataacggatgggaattggttacgacgacagaaagcagattatcagctctgcatactattcttcatgacaataccataatgatgttacattgttatgaatcgtatatgttacaagatacatttaatgtgtacactcgcgaatggaatcatatgtgtcatcaacattcgaatagttatatcatgtacaatatactacccatctactaaatataatagaataaaataaatgagtatgatcattttagataacgattgattttatcattaccgcttcattcttatattctttgcttacggaacctatatttagaaacatctactaacgattttttatgcttgcattattaatggtatgtaatatgattgattgtgtacgcaataccaatttgttaagtatgaatacggggtacaaacataaactgaaatttaacattatttatttatgatatatatcgttatcgttattgtttggtctataccatggatatctttaaagaactaatcttaaaacaccctgatgaaaatgttttgatttctccagtttctattttatctactttatctattctaaatcatggagcagctggttctacagctgaacaactatcaaaatatatagagaatatgaatgagaatacacccgatgataagaaggatgacaataatgacatggacgtagatattccgtattgtgcgacactagctaccgcaaataaaatatacggtagcgatagtatcgagttccacgcctccttcctacaaaaaataaaagacgattttcaaactgtaaactttaataatgctaaccaaacaaaggaactaatcaacgaatgggttaagacgatgacaaatggtaaaattaattccttattgactagtccgctatccattaatactcgtatgacagttgttagcgccgtccattttaaagcaatgtggaaatatccattttctaaacatcttacatatacagacaagttttatatttctaagaatatagttaccagtgttgatatgatggtgggtaccgagaataacttgcaatatgtacatattaatgaattattcggaggattctctattatcgatattccatacgagggaaactctagtatggtaattatactaccggacgacatagaaggtatatataacatagaaaaaaatataacagatgaaaaatttaaaaaatggtgtggtatgttatctactaaaagtatagacttgtatatgccaaagtttaaagtggaaatgacagaaccgtataatctggtaccgattttagaaaatttaggacttactaatatattcggatattatgcagattttagcaagatgtgtaatgaaactatcactgtagaaaaatttctacatacgacgtttatagatgttaatgaggagtatacagaagcatcggccgttacaggagtatttatgactaacttttcgatggtatatcgtacgaaggtctacataaaccatccattcatgtacatgattaaagacaacacaggacgtatactttttatagggaaatactgctatccgcaataaatataaacaaatagacttttatcacgtttatctatgtctaaatattacaaatagtaatagtataaactaaagctgataatacttaaaaaaataataatatcatttacaattaatagtataaactaaaaattaaacaaatcgttattataagtaatatcaaaatgatgatatacggattaatagcgtgtcttatattcgtgacttcatccatcgctagtccactttatattcccgttattccacccattacggaagataaatcgttcaatagtgtagaggtattagtttccttgtttagagatgaccaaaaagactatacggtaacttctcagttcaataactacactatcgataccaaagactggactatcggcgtactatccacacctgatggtttggatataccattgactaatataacttattggtcacggtttactataggtcgtgcattgttcaaatcagagtctgaggatattttccaaaagaaaatgagtattctaggtgtttctatagaatgtaagaagtcgtcgacattacttacttttttgaccgtgcgtaaaatgactcgagtatttaataaatttccagatatggcttattatcgaggagactgtttaaaagccgtttatgtaacaatgacttataaaaatactaaaactggagagactgattacacgtacctctctaatggggggttgcctgcatactatcgtaatggggtcgatggttgattattgattagtatattccttattcacacaaaaagaacatttttataaacatgaaaccactgtctaaatgtaattatgatcttgatttatagatgaagatcagcctttagaggattttaaccagtatgtttaatatgaaaaaaataaacataacatattttgagattaagcgctattgtgcttaattattttgctctataaactgaatatatagccacaattattgacgggcttgtttatgaccggcaatcatgaatttacagaaattatctctggctatatatcttactgcgacatgttcgtggtgttatgaaacatgcataagaaaaactgcgttgtatcatgacattcaattggagcatgtagaagacaataaagatagtgtagcgtcgctaccgtacaagtagtcaatcaaagagaacgtagtagattgttggctacatttaattggacagatatagctgagggtgttagaaatgagttcattaaaatatgtgatatcaacggaacatatttatataattatactattgctgttagtataattattgattccacggaagaactaccaacagttactccaattacaacaacatatgaaccttctacatataattatactatcgatgatagcactgttattactactgaagaactacaagtgactcctcatatggatctccatcgatgatacatgtattaaaatactttccgaataagtcttttaaatattgtattaattatgaaaaactatgctatgcgagtatgatgcaaagatgtttaatgatacgatactagattttatctctagcgagagatgtcgttagaatcatttatcataactacgtttaataataattcatcaacgaatatcgataacatgtgtcatttatacgttaaagtctgtccgtcttctctattgtttagactgtttgtagaatgctgtgatataaacaaactagtagaaggtacgactccgttacactgttatctaatgaatgaaggatttgaatcatctgttttaaaaaacctattaaaggagtatgtcatgaatacgtttaatgttcatgacatccattacacaaatatttaactcatgatgaagttgagaatgatatgctttctgatagtatagatagctttagctaatataaaaatatattaatccactatatattctagacttgatttaaaaccgataaactactactacgtactgtataagttgttaaaaaaaggagcagaccctaattatgtagatgatagaggtaatacttttcttcattacttctgcatctatatgtccacttatgagaaaacgtcatttaataagatgcatcgtgaaaagaaatttattaaagagttggtaaaatatgaaaccgaaagtaaataatataggaaatacacctctacataactacgtatctcaatatgatatcactctcattcctcatccacaacccattaaaaaaatggaaattaaagccctctattagcataaacggctacaggtctacctttacaatggcctctccttgtgcccagttcagaccctgtcattgccacgctactaaggactccctgaataccgtggccgacgtcagacattgtctgactgaatacatcctgtgggtttctcatagatggacccatagagaaagcgcagggtctctctacaggcttctcatctctttcagaactgatgcaacggagctctttggtggtgagttgaaggattcacttccgtgggacaatatcgacaattgcgtggagatcattaaatgtttcatcagaaatgactccatgaaaaccgccgaagaacttcgtgcaatcattggactttgtactcaatcagctatcgtctctggaagagtcttcaacgataagtatatcgacatactacttatgctgcgaaagattctgaacgagaacgactatctcaccctcttggatcatatccgcactgctaaatactaaatctccttcatgctctctcactacactttttatcatcttatgaggaatgattgccttcatcatttttcgtgaaataggaataattagcaccagaatagctatggattgcacatgtattctatgtcgtctactggatgaagatgtgacgtacaaaaaaataaaactagaaattgaaacgtgtcacaacttatcaaaacatatagatagacgaggaaacaatgcgctacattgttacgtcttcaataaatgcgatacagacattaagattgttcgactgttactctctcgcggagtcgagagactttgtagaaacaacgaaggattaactccgctaggagcatacagtaagcatagatacgtaaaatctcaaattgtgcatctactgatatccagctattcgaattcctctaacgaactcaagtcgaatataaatgatttcgatctgtattcgtatatgtcttcggataatatcgacttacgtctgctaaaatacctaattgtggataaacggatacgtccgtccaagaatacgaattatgcaatcaatggtctcggattggtggatatatacgtaacgacgcctaatccgagaccagaagtattgctatggcttcttaaatcagaatgttacagcaccggttacgtatttcgtacctgtatgtacgacagtgatatgtgtaagaactctcttcattactatatatcgtctcatagagaatctcaatctctatccaaggatgtaattaaatgtttgatcaataacaatgtttccatccatggcagagacgaaggaggatctttacccatccaatactactggtcttgctcaaccatagatatagagattgttaaattattaataaaggatgtggacacgtgtagagtatacgacgtcagccctatattagaggcggattatctaaacaagcgatttagagtaaccccatataatgtagacatggaaatcgttaatcttcttattgagagacgtcatactcttgtcgacgtaatgcgtagtattacttcttacgattccagagactataaccactacatcatcgataacattctaaagagatttagacaacaggatgaatccatcgtacaagccatgttgataaactacttacattacggcgatatggtcgttcgatgcatgttagataacggacaacaactatcctctgcacgactactttgttaataataatctcgtcgatgtaaacgtcgtaaggtttatcgtggaaaataatggacacatggctgtaaatcacgtatcgaacaatggccgtctatgtatgtacggtctgatattatcgagatttaataattgcgggtatcactgttatgaaaccatactaatagatgtatttgatatactaagcaagtacatggataatatagatatgatcgataatgagaataaaactctactatattacgcggtcgatgtcaataatatacaatttgcaaagcggttattggaatatggagcgagtgttacaacatcacgctcgataatcaatacggccatccagaaaagtagttacagaagagaaaacaaaacgaggatagttgatttattacttagctaccatcccactctagagactatgattgacgcatttaatagagatatacgctatctatatcctgaaccattattcgcctgtatcagatacgccttaatcctagatgatgattttccttctaaagtaagtatgatatctccggtcgtcataaggaactaaagcgctatagagtagacattaatagaatgaagaatgcctacatatcaggcgtctccatgtttgatatattatttaaacgaagcaaacgccacagattgagatacgcaaagaatccgacatcaaatggtacaaaaaagaactaacgtccatcattacagaaactgtaaagaacaatgagaggatcgactccatagtggacaacattaatacagacgataacttgatttcgaaattacccatggagatactttattactccattaaataatttatcatggagcgataatgtcctgtttcatttgtttccatgacatattacaaaatcgattccgtccaagatgataaaaacatttaccggcatcataaacacggagtttattttatatgtctcgcataaacattactaaaaaaatatattgttcggttttctttcacatctttaattatgaaaaagtaaatcattatgagatggacgagattgtacgcatcgttcgcgacagtatgtggtacatacctaacgtatttatggacgacggtaagaatgaaggtcacgtttctgtcaacaatgtttgtcatatgtattttacgttctttgatgtggatacatcgtctcatctgtttaagctagttattaaacactgcgatctgaataaacgaggtaactctccattacattgctatacgatgaatacacgatttaatccatctgtattaaagatattgttacaccacggcatgcgtaactttgatagcaaggatgaaaaaggacatattcctctacaccactatctgattcattcactatcaatcgataacaagatctttgatatactaacggacaccattgatgactttagtaaatcatccgatctattgctgtgttatcttagatataaattcaatgggagcttaaactattacgttctgtacaaaggatccgaccctaattgcgtcgacgaggatggactcacttctcttcattactactgtaaacacatatccacgttctacaaaagcaattattacaagttaagtcacactaagatgcgagccgagaagcgattcatctacgcgataatagattatggagcaaacattaacgcggttacacacttaccttcaacagtataccaaacatagtcctcgtgtggtgtatgctcttttatctcgaggagccgatacgaggatacgtaataatcttgattgtacacccatcatggaacgattgtgcaacaggtcatattctcataatgttactcaattggcacgaacaaaaggaagaaggacaacatctactttatctattcataaaacataatcaaggatacactctcaatatactacggtatctactagataggttcgacattcagaaagacgaatactataataccgcctttcaaaattgtaacaacaatgttgcctcatacatcggatacgacatcaaccttccgactaaagacggtattcgacttggtgtttgaaaacagaaacatcatatacaaggcggatgttgtgaatgacatcatccaccacagactgaaagtatctctacctatgattaaatcgttgttctacaagatgtcagaattctctccctacgacgattactacgtaaaaaagatactagcctactgcctattaagggacgagtcattcgcggaactacatagtaaattctgtttaaacgaggactataaaagtgtatttatgaaaaatatatcattcgataagatagattccatcatcgtgacataagtcgccttaaagagattcgaatctccgacaccgacctgtatacggtatcacagctatcttaaagccatacattcggacagacacatttcatttcccatgtacgacgatctcatagaacagtgccatctatcgatggagcataaaagtaaactcgtcgacaaagcactcaataaattagagtctaccatcggtcaatctagactatcgtatttgcctccggaaattatgcgcaatatcatctaaacagtatgttgtacggaaagaaccattacaaatattatccatgatagaaagaaaatatctatatgattggagaagtaggaaacaggaacaagacgacgattactacattattaaatcatgaagtccgtattatactcgtatatattgtttctctcatgtataataataaacggaagagatatagcaccgcatgcaccatccgatggaaagtgtaaagacaacgaatacaaacgccataatttgtgtccgggaacatacgcttccagattatgcgatagcaagactaacacacgatgtacaccctgtggttcgggtaccttcacatctcgcaataatcatttacccgcttgtctaagttgtaacggaagacgcgatcgtgtaacacgactcacaatagaatctgtgaatgctctcccggatattattgtcttctcaaaggatcatccggatgcaaggcatgtgtttcccaaacaaaatgtggaataggatacggagtatccggagacgtcatctgttctccgtgtggtctcggaacatattctcacaccgtctcttccgcagataaatgcgaacccgtacccagtaatacctttaactatatcgatgtggaaattaatctgtatcccgtcaacgacacgtcgtgtactcggacgaccactaccggtctcagtgaatccatctcaacgtcggaactaactattactatgaatcataaagactgtaatcccgtatttcgtgaggaatacttctctgtccttaataaggtagcaacttcaggtttctttacaggagaaaggtgtgcactctgaatttcgagattaaatgcaataacaaagattcttcctccaaacagttaacgaaagcaaagaatgatgacggtatcatgccgcattcggagacagtaactctagtgggcgactgtatatctagcgtcgacatctatatactatatagtaataccaatactcaagactacgaaactgatacaatctcttatcatgtgggtaatgttctcgatgtcgatagccatatgcccggtagttgcgatatacataaactgatcactaattccaaacccacccgctttttatagtaagtttttcacccataaataataaatacaataattaatttctcgtaaaagtagaaaatatattctaatttattgcatggtaaggaagtagaatcataaagaacagtactcaatcaatagcaattatgaaacaatatatcgtcctggcatgcatgtgcctgccagtcttcagcaatcatcctcatcctcatcctcgtgtacggaagaagaaaacaaacatcatatgggaatcgatgttattatcaaagtcacaaagcaagaccaaacaccgaccaatgataagatttgccaatccgtaacggaaattacagagtccgagtcagatccaaatcccgaggtggaatcagaagatgattccacatcagtcgaggatgtagatcctcctaccacttattactccatcatcggtggaggtctgagaatgaactttggattcaccaaatgtcctcagattaaatccatctcagaatccgctgatggaaacacagtgaatgctagattgtccagcgtgtccccaggacaaggtaaggactctcccgcgatcactcatgaagaagctcttgctatgatcaaagactgtgaggtgtctatcgacatcagatgtagcgaagaagagaaagacagcgacatcaagacccatccagtactcgggtctaacatctctcataagaaagtgagttacgaagatatcatcggttcaacgatcgtcgatacaaaatgtgtcaagaatctagagtttagcgttcgtatcggagacatgtgcaaggaatcatctgaacttgaggtcaaggatggattcaagtatgtcgacggatcggcatctgaaggtgcaaccgatgatacttcactcatcgattcaacaaaactcaaagcgtgtgtctgaatcgataactctattcatctgaaattggatgagtagggttaatcgaacgattcaggcacaccacgaattaaaaaagtgtaccggacactatattccggtttgcaaaacaaaaatgttcttaactacattcacaaaaagttacctctcgcgacttcttctttttctgtctcaatagtgtgatacgattatgacactattcctattcctattcctatttcctttcagggtatcacaaaaatattaaacctctttctgatggtctcataaaaaaagttttacaaaaatatttttattctctttctctctttgatggtctcataaaaaaagttttacaaaaatatttttattctctttctctctttgat

SEQ ID NO: 12 - DNA, 194715 bp, Vaccinia virus
  source 1..194715: mol_type = other DNA
  misc_feature 1..194715: note = VIR52
atcaaagagagaaagagaataaaaatatttttgtaaaactttttttatgagaccatcaaagagagaaagagaataaaaatatttttgtaaaactttttttatgagaccatcagaaagaggtttaatatttttgtgataccctgaaaggaaataggaataggaataggaatagtgtcataatcgtatcacactattgagacagaaaaagaagaagtcgcgagaggtaactttttgtgaatgtagttaagaacatttttgttttgcaaaccggaatatagtgtccggtacacttttttaattcgtggtgtgcctgaatcgttcgattaaccctactcatccaatttcagatgaatagagttatcgattcagacacacgctttgagttttgttgaatcgatgagtgaagtatcatcggttgcaccttcagatgccgatccgtcgacatacttgaatccatccttgacctcaagttcagatgattccttgcacatgtctccgatacgaacgctaaactctagattcttgacacattttgtatcgacgatcgttgaaccgatgatatcttcgtaactcactttcttatgagagatgttagacccgagtactggatgggtcttgatgtcgctgtctttctcttcttcgctacatctgatgtcgatagacacctcacagtctttgatcatagcaagagcttcttcatgagtgatcgcgggagagtccttaccttgtcctggggacacgctggacaatctagcattcactgtgtttccatcagcggattctgagatggatttaatctgaggacatttggtgaatccaaagttcattctcagacctccaccgatgatggagtaataagtggtaggaggatctacatcctcgactgatgtggaatcatcttctgattccacctcgggatttggatctgactcggactctgtaatttccgttacggattggcaaatcttatcattggtcggtgtttggtcttgctttgtgactttgataataacatcgattcccatatgatgtttgttttcttcttccgtacacgaggatgaggatgaggatgattgctgaagactggcaggcacatgcatgccaggacgatatattgtttcataattgctattgattgagtactgttctttatgattctacttccttaccatgcaataaattagaatatattttctacttttacgagaaattaattattgtatttattatttatgggtgaaaaacttactataaaaagcgggtgggtttggaattagtgatcagtttatgtatatcgcaactaccgggcatatggctatcgacatcgagaacattacccacatgataagagattgtatcagtttcgtagtcttgagtattggtattactatatagtatatagatgtcgacgctagatatacagtcgcccactagagttactgtctccgaatgcggcatgataccgtcatcattctttgctttcgttaactgtttggaggaagaatctttgttattgcatttaatctcgaaattcagagtgcacacctttctcctgtaaagaaacctgaagttgctaccttattaaggacagagaagtattcctcacgaaatacgggattacagtctttatgattcatagtaatagttagttccgacgttgagatggattcactgagaccggtagtggtcgtccgagtacacgacgtgtcgttgacgggatacagattaatttccacatcgatatagttaaaggtattactgggtacgggttcgcatttatctgcggaagagacggtgtgagaatatgttccgagaccacacggagaacagatgacgtctccggatactccgtatcctattccacattttgtttgggaaacacatgccttgcatccggatgatcctttgagaagacaataatatccgggagagcattcacagattctattgtgagtcgtgttacacgatcgcgtcttccgttacaacttagacaagcgggtaaatgattattgcgagatgtgaaggtacccgaaccacagggtgtacatcgtgtgttagtcttgctatcgcataatctggaagcgtatgttcccggacacaaattatggcgtttgtattcgttgtctttacactttccatcggatggtgcatgcggtgctatatctcttccgtttattattatacatgagagaaacaatatatacgagtataatacggacttcatgatttaataatgtagtaatcgtcgtcttgttcctgtttcctacttctccaatcatatagatattttctttctatcatggataatatttgtaatggttctttccgtacaacatactgtttagatgatattgcgcataatttccggaggcaaatacgatagtctagattgaccgatggtagactctaatttattgagtgctttgtcgacgagtttacttttatgctccatcgatagatggcactgttctatgagatcgtcgtacatgggaaatgaaatgtgtctgtccgaatgtatggctttaagatagctgtgataccgtatacaggtcggtgtcggagattcgaatctctttaaggcgacttatgtcacgatgatggaatctatcttatcgaatgatatatttttcataaatacacttttatagtcctcgtttaaacagaatttactatgtagttccgcgaatgactcgtcccttaataggcagtaggctagtatcttttttacgtagtaatcgtcgtagggagagaattctgacatcttgtagaacaacgatttaatcataggtagagatactttcagtctgtggtggatgatgtcattcacaacatccgccttgtatatgatgtttctgttttcaaacaccaagtcgaataccgtctttagtcggaaggttgatgtcgtatccgatgtatgaggcaacattgttgttacaattttgaaaggcggtattatagtattcgtctttctgaatgtcgaacctatctagtagataccgtagtatattgagagtgtatccttgattatgttttatgaatagataaagtagatgttgtccttcttccttttgttcgtgccaattgagtaacattatgagaatatgacctgttgcacaatcgttccatgatgggtgtacaatcaagattattacgtatcctcgtatcggctcctcgagataaaagagcatacaccacacgaggactatgtttggtatactgttgaaggtaagtgtgtaaccgcgttaatgtttgctccataatctattatcgcgtagatgaatcgcttctcggctcgcatcttagtgtgacttaacttgtaataattgcttttgtagaacgtggatatgtgtttacagtagtaatgaagagaagtgagtccatcctcgtcgacgcaattagggtcggatcctttgtacagaacgtaatagtttaagctcccattgaatttatatctaagataacacagcaatagatcggatgatttactaaagtcatcaatggtgtccgttagtatatcaaagatcttgttatcgattgatagtgaatgaatcagatagtggtgtagaggaatatgtcctttttcatccttgctatcaaagttacgcatgccgtggtgtaacaatatctttaatacagatggattaaatcgtgtattcatcgtatagcaatgtaatggagagttacctcgtttattcagatcgcagtgtttaataactagcttaaacagatgagacgatgtatccacatcaaagaacgtaaaatacatatgacaaacattgttgacagaaacgtgaccttcattcttaccgtcgtccataaatacgttaggtatgtaccacatactgtcgcgaacgatgcgtacaatctcgtccatctcataatgatttactttttcataattaaagatgtgaaagaaaaccgaacaatatatttttttagtaatgtttatgcgagacatataaaataaactccgtgtttatgatgccggtaaatgtttttatcatcttggacggaatcgattttgtaatatgtcatggaaacaaatgaaacaggacattatcgctccatgataaattatttaatggagtaataaagtatctccatgggtaatttcgaaatcaagttatcgtctgtattaatgttgtccactatggagtcgatcctctcattgttctttacagtttctgtaatgatggacgttagttcttttttgtaccatttgatgtcggattctttgcgtatctcaatctgtggcgtttgcttcgtttaaataatatatcaaacatggagacgcctgatatgtaggcattcttcattctattaatgtctactctatagcgctttagttccttatgacgaccggagatatcatacttactttagaaggaaaatcatcatctaggattaaggcgtatctgatacaggcgaataatggttcaggatatagatagcgtatatctctattaaatgcgtcaatcatagtctctagagtgggatggtagctaagtaataaatcaactatcctcgttttgttttctcttctgtaactacttttctggatggccgtattgattatcgagcgtgatgttgtaacactcgctccatattccaataaccgctttgcaaattgtatattattgacatcgaccgcgtaatatagtagagttttattctcattatcgatcatatctatattatccatgtacttgcttagtatatcaaatacatctattagtatggtttcataacagtgatacccgcaattattaaatctcgataatatcagaccgtacatacatagacggccattgttcgatacgtgatttacagccatgtgtccattattttccacgataaaccttacgacgtttacatcgacgagattattattaacaaagtagtcgtgcagaggatagttgttgtccgttatctaacatgcatcgaacgaccatatcgccgtaatgtaagtagtttatcaacatggcttgtacgatggattcatcctgttgtctaaatctctttagaatgttatcgatgatgtagtggttatagtctctggaatcgtaagaagtaatactacgcattacgtcgacaagagtatgacgtctctcaataagaagattaacgatttccatgtctacattatatggggttactctaaatcgcttgtttagataatccgcctctaatatagggctgacgtcgtatactctacacgtgtccacatcctttattaataatttaacaatctctatatctatggttgagcaagaccagtagtattggatgggtaaagatcctccttcgtctctgccatggatggaaacattgttattgatcaaacatttaattacatccttggatagagattgagattctctatgagacgatatatagtaatgaagagagttcttacacatatcactgtcgtacatacaggtacgaaatacgtaaccggtgctgtaacattctgatttaagaagccatagcaatacttctggtctcggattaggcgtcgttacgtatatatccaccaatccgagaccattgattgcataattcgtattcttggacggacgtatccgtttatccacaattaggtattttagcagacgtaagtcgatattatccgaagacatatacgaatacagatcgaaatcatttatattcgacttgagttcgttagaggaattcgaatagctggatatcagtagatgcacaatttgagattttacgtatctatgcttactgtatgctcctagcggagttaatccttcgttgtttctacaaagtctctcgactccgcgagagagtaacagtcgaacaatcttaatgtctgtatcgcatttattgaagacgtaacaatgtagcgcattgtttcctcgtctatctatatgttttgataagttgtgacacgtttcaatttctagttttatttttttgtacgtcacatcttcatccagtagacgacatagaatacatgtgcaatccatagctattctggtgctaattattcctatttcacgaaaaatgatgaaggcaatcattcctcataagatgataaaaagtgtagtgagagagcatgaaggagatttagtatttagcagtgcggatatgatccaagagggtgagatagtcgttctcgttcagaatctttcgcagcataagtagtatgtcgatatacttatcgttgaagactcttccagagacgatagctgattgagtacaaagtccaatgattgcacgaagttcttcggcggttttcatggagtcatttctgatgaaacatttaatgatctccacgcaattgtcgatattgtcccacggaagtgaatccttcaactcaccaccaaagagctccgttgcatcagttctgaaagagatgagaagcctgtagagagaccctgcgctttctctatgggtccatctatgagaaacccacaggatgtattcagtcagacaatgtctgacgtcggccacggtattcagggagtccttagtagcgtggcaatgacagggtctgaactgggcacaaggagaggccattgtaaaggtagacctgtagccgtttatgctaatagagggctttaatttccatttttttaatgggttgtggatgaggaatgagagtgatatcatattgagatacgtagttatgtagaggtgtatttcctatattatttactttcggtttcatattttaccaactctttaataaatttcttttcacgatgcatcttattaaatgacgttttctcataagtggacatatagatgcagaagtaatgaagaaaagtattacctctatcatctacataattagggtctgctcctttttttaacaacttatacagtacgtagtagtagtttatcggttttaaatcaagtctagaatatatagtggattaatatatttttatattagctaaagctatctatactatcagaaagcatatcattctcaacttcatcatgagttaaatatttgtgtaatggatgtcatgaacattaaacgtattcatgacatactcctttaataggttttttaaaacagatgattcaaatccttcattcattagataacagtgtaacggagtcgtaccttctactagtttgtttatatcacagcattctacaaacagtctaaacaatagagaagacggacagactttaacgtataaatgacacatgttatcgatattcgttgatgaattattattaaacgtagttatgataaatgattctaacgacatctctcgctagagataaaatctagtatcgtatcattaaacatctttgcatcatactcgcatagcatagtttttcataattaatacaatatttaaaagacttattcggaaagtattttaatacatgtatcatcgatggagatccatatgaggagtcacttgtagttcttcagtagtaataacagtgctatcatcgatagtataattatatgtagaaggttcatatgttgttgtaattggagtaactgttggtagttcttccgtggaatcaataattatactaacagcaatagtataattatataaatatgttccgttgatatcacatattttaatgaactcatttctaacaccctcagctatatctgtccaattaaatgtagccaacaatctactacgttctctttgattgactacttgtacggtagcgacgctacactatctttattgtcttctacatgctccaattgaatgtcatgatacaacgcagtttttcttatgcatgtttcataacaccacgaacatgtcgcagtaagatatatagccagagataatttctgtaaattcatgattgccggtcataaacaagcccgtcaataattgtggctatatattcagtttatagagcaaaataattaagcacaatagcgcttaatctcaaaatatgttatgtttatttttttcatattaaacatactggttaaaatcctctaaaggctgatcttcatctataaatcaagatcataattacatttagacagtggtttcatgtttataaaaatgttctttttgtgtgaataaggaatatactaatcaataatcaaccatcgaccccattacgatagtatgcaggcaaccccccattagagaggtacgtgtaatcagtctctccagttttagtatttttataagtcattgttacataaacggcttttaaacagtctcctcgataataagccatatctggaaatttattaaatactcgagtcattttacgcacggtcaaaaaagtaagtaatgtcgacgacttcttacattctatagaaacacctagaatactcattttcttttggaaaatatcctcagactctgatttgaacaatgcacgacctatagtaaaccgtgaccaataagttatattagtcaatggtatatccaaaccatcaggtgtggatagtacgccgatagtccagtctttggtatcgatagtgtagttattgaactgagaagttaccgtatagtctttttggtcatctctaaacaaggaaactaatacctctacactattgaacgatttatcttccgtaatgggtggaataacgggaatataaagtggactagcgatggatgaagtcacgaatataagacacgctattaatccgtatatcatcattttgatattacttataataacgatttgtttaatttttagtttatactattaattgtaaatgatattattatttttttaagtattatcagctttagtttatactattactatttgtaatatttagacatagataaacgtgataaaagtctatttgtttatatttattgcggatagcagtatttccctataaaaagtatacgtcctgtgttgtctttaatcatgtacatgaatggatggtttatgtagaccttcgtacgatataccatcgaaaagttagtcataaatactcctgtaacggccgatgcttctgtatactcctcattaacatctataaacgtcgtatgtagaaatttttctacagtgatagtttcattacacatcttgctaaaatctgcataatatccgaatatattagtaagtcctaaattttctaaaatcggtaccagattatacggttctgtcatttccactttaaactttggcatatacaagtctatacttttagtagataacataccacaccattttttaaatttttcatctgttatatttttttctatgttatatataccttctatgtcgtccggtagtataattaccatactagagtttccctcgtatggaatatcgataatagagaatcctccgaataattcattaatatgtacatattgcaagttattctcggtacccaccatcatatcaacactggtaactatattcttagaaatataaaacttgtctgtatatgtaagatgtttagaaaatggatatttccacattgctttaaaatggacggcgctaacaactgtcatacgagtattaatggatagcggactagtcaataaggaattaattttaccatttgtcatcgtcttaacccattcgttgattagttcctttgtttggttagcattattaaagtttacagtttgaaaatcgtcttttattttttgtaggaaggaggcgtggaactcgatactatcgctaccgtatattttatttgcggtagctagtgtcgcacaatacggaatatctacgtccatgtcattattgtcatccttcttatcatcgggtgtattctcattcatattctctatatattttgatagttgttcagctgtagaaccagctgctccatgatttagaatagataaagtagataaaatagaaactggagaaatcaaaacattttcatcagggtgttttaagattagttctttaaagatatccatggtatagaccaaacaataacgataacgatatatatcataaataaataatgttaaatttcagtttatgtttgtaccccgtattcatacttaacaaattggtattgcgtacacaatcaatcatattacataccattaataatgcaagcataaaaaatcgttagtagatgtttctaaatataggttccgtaagcaaagaatataagaatgaagcggtaatgataaaatcaatcgttatctaaaatgatcatactcatttattttattctattatattaacacatacatttttaacagcaacacattcaatattgtattgttatttttatattatttacacaattaacaatatattattagtttatattactgaattaataatataaaattcccaatcttgtcataaacacacactgagaaacagcataaacacaaaatccatcaaaaatgtcgatgaaatatctgatgttgttgttcgctgctatgataatcagatcattcgccgatagtggtaacgctatcgaaacgacattgccagaaattacaaacgctacaacagatattccagctatcagattatgcggtccagagggagatggatattgtttacacggtgactgtatccacgctagagatatcgacggtatgtattgtagatgctctcatggttatacaggcattagatgtcagcatgtagtattagtagactatcaacgttcagaaaaaccaaacactacaacgtcatatatcccatctcccggtattgtgcttgtattagtaggcattattattatgtgttgtctattatctgtttataggttcactcgaagaactaataaactacctctacaagatatggttgtgccataatttttataaatttttttatgagtatttttacaaaaaaaatgtataaagtgtatgtcttatgtatatttataaaaatgctaagtatgcgatgtatctatgttatttgtatttatctaaacaatacctctacctctagatattatacaaaaattttttatttcggcatattaaagtaaaatctagttaccttgaaaatgaatacagtgggtggttccgtatcaccagtaagaacataatagtcgaatacagtatccgattgagattttgcatacaatactagtctagaaagaaatttgtaatcattttctgtgacgggagtccatatatctgtatcatcgtctagtttatcagtgtcccatgctatatttctgttatcatcattagttaatgaaaataactctcgtgcttcagaaaagtcaaatattgtatccatacatacatctccaaaactatcgcttatacgtttatctttaacgatacctatacctagatggttatttactaacagacattttccagatctattgactataactcctatagtttccacatcaaccaagtaatgatcatctattgttatataacaataacataactcttttccatttttatcagtatgtatatctatatcaacgtcgtcgttgtagtgaatagtagtcattgatctattatatgaaacggatatgtctagaacggcaattgtcttacgtccagttaacactttcgttgatttaaagtctagagtctttgcaaacataatatccttatccgactttatatttcctgtagggtggtataattttattttgcctccacatatcggtgtttccaaatatattactagacaatattccatatagttattagttaagggtacccaattagaacacgtacgcttattatcatcatttggatcgtatttcataaaagttattgtactatcgatgtcaacacattctacattttttaatcgtctatatagtatttttctgatattttctataatatcagaattgtcttccatcggaagttgtatactatcggaatcagttacatgtttaaataattctctgatgtcattccttatacaatcaaattcattattaaacagtttaatagtctgtagacctttatcgtcgtaaatatccattgtcttattagttacgcttatttttatgtgttttacgttgctttattatattttataagaatgattgtttgacgaatcacgagaactattaagacacattattaggtatatattataaaaaagtttttgattacgatgttataagaggaaagaggacacattaacatcatacatcaattaactacattcttataacatcgtaatcaaaagaattgcaattttgatgtataacaactgtcaatgggttatggaattgtatattacatattatacggtatgttggtaacgacaaataccgatcggtaatcgtttgccggtgtaatagaattatatatatctatctattacaccggctgagtatacataataataagttgtggtagtatgatctccatatttataatttaggactttgtattcagtatttttggaatcataaaaaataaaaaaaagttttactaatttaaaatttaaaaagtatttacatttttttcactgtttagtcgcggatatggaattcgatcctgccaaaatcaatacatcatctatagatcatgtaacaatattacaatacatagatgaaccaaatgatataagactaacagtatgcattatccgaaatattaataacattacatattatatcaatatcacaaaaataaatacacatttggctaatcaatttcgggcttggaaaaaacgtatcgccggaagggactatatgactaacttatctagagatacaggaatacaacaatcaaaacttactgaaactatacgtaactgtcaaaaaaatagaaacatatatggtctatatatacactacaatttagttattaatgtggttattgattggataaccgatgtgattgttcaatcaatattaagagggttggtaaattggtacatagctaataatacctatactccaaatacacccaataatacaacaaccatttctgagttggatatcatcaaaatactaaataaatacgaggacgtgtatagagtaagtaaagaaaaagaatgtggaatttgctatgaagttgtttactcaaaacgattagaaaacgatagatactttggtttattggattcgtgtactcatatattttgcataacatgcatcaatatatggcataaaacacgaagagaaaccggtgcgtcggataattgtcctatatgtcgtacccgttttagaaacataacaatgagcaagttctataagctagttaactaataaataaaaagtttaatttgttgacgacgtatgtcgttattttttctcgtataaaagattaatttgattctaatataatctttagtattggataaatatcaattcaaattaattccattagattatatcataaataaaaatagtagcacgcactacttcagccaaatattcttttttgaaacgccatctatcgtagtgaggacacaagtgaacctataatgagcaaatttattagtatcggttacatgaaggactttacgtagagtggtgattccactatctgtggtacgaacggtttcatcttctttgatgccatcacccagatgttctataaacttggtatcctcgtccgatttcatatcctttgccaaccaatacatatagctaaactcaggcatatgttccacacatcctgaacaatgaaattctccagaagatgttacaatgtctagatttggacatttggtttcaaccgcgttaacatatgagtgaacacacccatacatgaaagcgatgagaaataggattttcatcttgccaaaatatcactagaaaaaatttatttatcaattttaaaggtataaaaaatacttattgttgctcgaatattttgtatttgatggtatacggaagattagaaatgtaggtattatcatcaactgattctatggttttatgtattctatcatgtttcactattgcgttggaaataatatcatatgcttccacatatattttattttgttttaactcataatactcacgtaattctggattattggcatatctgtgaataattttagctccatgatcagtaaatattaatgagaacatagtattaccacctaccattatttttttcatttcgttcaattcttgattgcaaagatctatataatcattatagcgttgacttatggactctggaatcttagacgatgtacagtcatctataatcatggcatatttaatacattgttttatagcatagtagttatctacgatgttagatatttctctcaatgaatcaatcacacaatctaatgtaggtttatgacataatagcattttcagcagttcaatgtttctagattcgttgatggcaatggctatacatgtatatccgttatttgatctaatgttgacatctgaaccggattctagcagtaaagatactagagattgtttattatatctaacagccttgtgaagaagtgtttctcctcgtttgtcaatcatgttaatgtctttaagataaggtaggcaaatgtttatagtactaagaattgggcaagcataagacatgtcacaaagaccctttttgtatgtataagtgtagaaattataacatccatagttggatttacataggtgtccaatcgggatctctccatcatcgagatgattgacggcatctcccccttccttttttagtagatatttcatcgtgtaagaatcaatattaatatttctaaagtatccgtgtatagcctctttatttaccacagctccatattccaacatgcattccactaaagggatatcgatatcgccgaatgtcatatactcaattagtatatgttggaggacatccgagttcattgttttcaatatcaaagagatggtttccttatcatttctccatagtggtacaatactacacattattccgtgaggctttccattctccaaaaacaatttgaccaaatctacatctttattgtatctataatcactatttagataatcagccataattcctcgagtgcaacatgttagatcgtctatatatgaataagccgtgttatctattcctttcattaacaatttaacgatgtctatatctatatgagatgacttaatataatattgaagagctgtacaatagtttttatctatagaagacggcttgattccgtgattaattagacatttaacaacttccggacgcacatatgctctcgtatccgactctgaatacagatgagagatgatatacagatgcaatacggtaccgcaatttcgtagttgataatcatcatacgcgtatccgtactcgtcctcataaagaacactgcagccattttctatgaacaaatcaataattttaggaacaggatcattgtcattacataattttctataactgaacgatggttttcacatttaacactcaagtcaaatccatgttctaccaacacctttatcaagtcaacgtctacatttttggatttcatatagctgaatatattaaagtcatttatgttgctaaatccagtggcttctagtagagccatcgctatatcctttaactttaacatgtctactatttgtgtattcttctaatggggtagctgtctccaatttttgcgtaatggattagtgccactgtctagtagtagtttgacgacctcgacattattacaatgctcattaaaaaggtatgcgtgtaaagcattattcttgaattggttcctggtatcattaggatctctgtctctcaacatctgtttaagttcatcgagagccacctcctcattttccaaatagtcaaacattttgactgaatagaagtgaatgagctactgtgaactctatacacccacacaactaatgtcattaaatattatttttttgaatgtatttataccatgtcaaaaacttgtacaattattaataaaaataatttagtgtttaaattttaccagttccagattttacacctccgttaaccccactttttacaccactggacgaccctcctccccacattccaccgccaccagatgtataagttttagatcctttattactaccatcatgtccatggataaagacactccacatgccgccactaccccctttagaagacatattaataagacttaagagttaaggacaagtttaacaataaaattaatcacgagtaccctactaccaacctacactattatatgattatagtttctatttttacagtaccttaactaaagtttctagtcacaagagcaatactaccaacctacactattatatgattatagtttctatttttataggaacgcgtacgagaaaatcaaatgtctaatttctaacggtagtgttgataaacgattatcgtcaatggatacctcctctatcatgtcgtctattttcttactttgttctattaacttattagcattatatattatttgattataaaacttatattgcttattagcccaatctgtaaatatcggattattaacatatcgtttctttgtaggtttatttaacttgtacatcactgtaagcatgtccgtaccatttattttaatttgacgcatatccgcaatttctttttcgcagtcggttataaattctatatatgatggatacatgctacatgtgtacttataatcgactaatatgaagtacttgatacatattttcagtaacgatttattattaccacctatgaataagtacctgtgatcgtctaggtaatcaactgttttcttaatacattcgatggttggtaatttactcagaataatttccaatatcttaatatataattctgctatttctggaatatatttatctgccagtataacacaaatagtaatacatgtaaacccatattttgttattatattaatgtctgcgccattatctattaaccattctactaggctgacactatgcgacttaatacaatgataaagtatactacatccatgtttatctattttgtttatatcatcaatatacggcttacaaagttttagtatcgataacacatccaactcacgcatagagaaggtagggaataatggcataatatttattaggttatcatcattgtcattatctacaactaagtttccattttttaaaatatactcgacaactttaggatctctattgccaaatttttgaaaatatttatttatatgcttaaatctatataatgtagctccttcatcaatcatacatttaataacattgatgtatactgtatgataagatacatattctaacaatagatcttgtatagaatctgtatatcttttaagaattgtggatattaggatattattacgtaaactattacacaattctaaaatataaaacgtatcacggtcgaataatagttgatcaactatataattatcgattttgtgatttttcttcctaaactgtttacgtaaatagttagatagaatattcattagttcatgaccactatagttactatcgaataacgcgtcaaatatttcccgtttaatatcgcatttgtcaagataataatagagtgtggtatgttcacgataagtataataacgcatctctttttcgtgtgaaattaaatagtttatcacgtccaaagatgtagcataaccatcttgtgacctagtaataatataataatagagaactgttttacccattctatcatcataatcagtggtgtagtcgtaatcgtaatcgtctaattcatcatcccaattataatattcaccagcacgtctaatctgttctattttgatcttgtatccatactgtatgttgctacatgtaggtattcctttatccaataatagtttaaacacatctacattgggatttgatgttgtagcgtatttctctacaatattaataccatttttgatactatttatttctatacctttcgaaattagtaatttcaataagtctatatcgatgttatcagaacatagatattcgaatatatcaaaatcattgatatttttatagtcgactgacgacaataacaaaatcacaacatcgtttttgatattattatttttcttggtaacgtatgcctttaatggagtttcaccatcatactcatataatggatttgcaccactttctatcaatgattgtgcactgctggcatcgatgttaaatgttttacaactatcatagagtatcttatcgttaaccatgattggttgttgatgctatcgcattttttggtttctttcatttcagttatgtatggatttagcacgtttgggaagcataagctcatatgatttcagtactgtagtgtcagtactattagtttcgatcagatcaatgtctagatctatagaatcaaaacacgataggtcagaagataatgaatatctgtaggcttcttgttgtactgtaacttctcgttttgttagatggttgcatcgtgctttaacatcaatggtacaaattttatcctcgctttgtgtatcatattcgtccctactataaaattgtatattcagattatcatgagatgtgtatacgctaacggtatcaataaacggagcacaccatttagtcataaccgtaatccaaaaatttttaaagtatatcttaacgaaagaagttgtgtcattgtctacggtgtatggtactagatcctcataagtgtatatatctagagtaatgtttaatttatcaaatggttgataatatggatcctcatggcaatttcctaagacgaaaataagacataaacacgcaataaatctaattgcggacatggttactccttaaaaaaatactaataatcaccttggctatttagtaagtgtcatttaacactatactcatattaatccatggactcataatctctatacgggattaacggatgttctatatacggggatgagtagttctcttctttaactttatactttttactaatcatatttagactgatgtatgggtaatagtgtttgaagagctcgttctcatcatcagaataaatcaatatctctgtttttttgttatacagatgtattacagcctcatatattacgtaatagaacgtgtcatctaccttattaactttcaccgcatagttgtttgcaaatacggttaatcctttgacctcgtcgatttccgaccaatctgggcgtataatgaatctaaactttaatttcttgtaatcattcgaaataatttttagtttgcatccgtagttatcccctttatgtaactgtaaatttctcaacgcgatatctccattaataatgatgtcgaattcgtgctgtatacccatactgaatggatgaacgaataccgacggcgttaatagtaatttactttttcatctttacatattgggtactagttttactatcataagtttataaattccacaagctactatggaataagccaaccatcttagtataacacacatgtcttaaagtttattaattaattacatgttgttttatatatcgctacgaatttaaacagagaaatcagtttaggaaaaaaaattatctatctacatcatcacgtctctgtattctacgatagagtgctactttaagatgagacatatccgtgtcatcaaaaatatactccattaaaatgattattccggcagcgaacttgatattggatatatcacaacctttgttaatatctacgacaatagacagcagtcccatggttccataaacagtgagtttatctttctttgaagagatattttgtagagatcttataaaactgtcgaatgacatcgcatttatatctttagctaaatcgtatatgttaccatcgtaatatctaaccgcgtctatcttaaacgtttccatcgctttaaagacgtttccgatagatggtctcatttcatcagtcatactgagccaacaaatataatcgtgtataacatctttgatagaatcagactctaaagaaaacgaatcggctttattatacgcattcatgataaacttaatgaaaaatgtttttcgttgtttaagttggatgaatagtatgtcttaataattgttattatttcattaattaatatttagtaacgagtacactctataaaaacgagaatgacataactaatcataactagttatcaaagtgtctaggacgcgtaattttcatatggtatagatcctgtaagcattgtctgtattctggagctattttctctatcgcattagtgagttcagaatatgttataaatttaaatcgaataacgaacataactttagtaaagtcgtctatattaactcttttattttctagccatcgtaataccatgtttaagatagtatattctctagttactacgatctcatcgttgtctagaatatcacatactgaatctacatccaattttagaaattggtctgtgttacatatctcttctatattattgttgatgtattgtcgtagaaaactattacgtagaccattttctttataaaacgaatatatagtactccaattatctttaccgatatatttgcacacataatccattctctcaatcactacatctttaagattttcgttgttaagatatttggctaaactatataattctattagatcatcaacagaatcagtatatatttttctagatccaaagacgaactctttggcgtcctctataatattcccagaaaagatattttcgtgttttagtttatcgagatctgatctgttcatatacgccatgattgtacggtacgttatgataaccgcataaaataaaaatccattttcatttttaaccaatactattcataattgagattgatgtaatactttgttactttgaacgtaaagacagtacacggatccgtatctccaacaagcacgtagtaatcaaatttggtgttgttaaacttcgcaatatttatcaatttagatagaaacttatactcatcatctgttttaggaatccatgtattattaccactttccaacttatcattatcccaggctatgtttcgtccatcatcgttgcgcagagtgaataattcttttgtattcggtagttcaaatatataatccatgcatagatcggtaaagctattgtagatgtgatttttcctaaatctaatataaaactcgtttactagcaaacactttcctgatttatcgaccaagacacatatggtttctaaatctatcaagtggtggggatccatagttatgacgcagtaacatagattattaccttcttaactgtcgctaatatctatatatttattgttatcgtattggattctgcatatagatggcttgtatgtcaaagatatagaacacataaccaatttatagtcgcgctttacattctcgaatctaaagttaagagatttagaaaacattatatcctcggatgatgttatcactgtttctggagtaggatatattaaagtctttacagatttcgtccgattcaaataaatcactaaataatatcccacattatcatctgttagagtagtatcattaaatctattatattttatgaaagatatatcactgctcacctctatatttcgtacatttttaaactgtttgtataatatctctctgatacaatcagatatatctattgtgtcggtagacgataccgttacatttgaattaatggtgttccattttacaacttttaacaagttgaccaattcatttctaatagtatcaaacgctccatgattaaatattttaatagtatccattttatatcactacggacacaaagtagctgacataaaccattgtataatttttatgttttatgtttattagcgtacacattttggaagttccggcttccatgtatttcctggagagcaagtagatgatgaggaaccagataggttatatccgtacttgcacttaaagtttacattgtcgttgtatgagtatgatcttttaaacccgctagacaagtatccgtttgatattgtaggatgtggacatttaacaatctgacacgtgggtggatcggaccattctcctcctgaacacaggacaccagagttaccaatcaacgaatatccactattgcaactataagttacaacgcttccatcggtataaaaatcctcgtatccgttatgtcttccgttggatatagatggaggggattggcatttaacagattcacaaataggtgcctcgggattccataccatagatccagtagatcctaattcacaatacgatttagattcaccgatcaaatgatatccgctattacaagagtacgttatactagagccaaagtctactccgccaatatcaagttggccattatcgatatctcgaggcgatgggcatctccgtttaatacattgattaaagagtgtccatccagtacctgtacatttagcatatataggtcccattttttgctttctgtatccaggtagacatagatattctatagtgtctcctatgttgtaattagcattagcatcagtctccacactattcttaaatttcatattaatgggtcgtgacggaatagtacagcatgatagaacgcatcctattcccaacaatgtcaggaacgtcacgctctccaccttcatatttatttatccgtaaaaatgttatcctggacatcgtacaaataataaaaagcccatatatgttcgctattgtagaaattgtttttcacagttgctcaaaaacgatggcagtgacttatgagttacgttacactttggagtctcatctttagtaaacatatcataatattcgatattacgagttgacatatcgaacaaattccaagtatttgattttggataatattcgtattttgcatctgctataattaagatataatcaccgcaagaacacacgaacatctttcctacatggttaaagtacatgtacaattctatccatttgtcttccttaactatatatttgtatagataattacgagtctcgtgagtaattccagtaattacatagatgtcgccgtcgtactctacagcataaactatactatgatgtctaggcatgggagacttttttatccaacgatttttagtgaaacattccacatcgtttaatactacatatttttcatacgtggtataaactccacccattacatatatatcatcgtttacgaataccgacgcgcctgaatatctaggagtaattaagtttggaagtcttatccatttcgaagtgccgtgtttcaaatattctgccacacccgttgaaatagaaaattctaatcctcctattacatataactttccattgttaacacaagtactaacttctgattttaacgacgacatattagtaaccgttttccattttttcgtttcaagatctacccgcgatacggaataaacatgtctattgttaatcatgccgccaataatgtatagacaattatgtaaaacatttgcattatagaattgtctatctgtattaccgactatcgtccaatattctgttctaggagagtaatgggttattgtggatatataatcagagtttttaatgactactatattatgttttataccatttcgtgtcactggctttgtagatttggatatagttaatcccaacaatgatatagcattgcgcatagtattagtcataaacttgggatgtaaaatgttgatgatatctacatcgtttggatttttatgtatccactttaataatatcatagctgtaacatcctcatgatttacgttaacgtcttcgtgggataagatagttgtcagttcatcctttgataattttccaaattctggatcggatgtcaccgcagtaatattgttgattatttctgacatcgacgcattatatagttttttaattccatatcttttagaaaagttaaacatccttatacaatttgtggaattaatattatgaatcatagtttttacacatagatctactacaggcggaacatcaattattatggcagcaactagtatcatttctacattgtttatggtgatgtttatcttcttccagcgcatatagtctaatagcgattcaaacgcgtgatagtttataccattcaatataatcgcttcatcctttagatggtgatcctgaatgcgtttaaaaaaattatacggagatgccgtaataatttccttattcacttgtataatttccccattgatagaaaatatcacgctttccattcttgaagtactataagtaattatagtataatgtaaaggtttatatattcaatattttttataaaaaaatcatttcgacattaattcctttttaaatttccgtctatcatctatagaaacatattctatgaatttataaaatgcttttacgtgtcctatcgtaggcgatagaaccgctaaaaagcctattgaatttctacaaaagaatctattatatggtatagggagagtataaaacattaaatgcccgtacttattaaagtattcagtagccaatcctaactctttcgaatacttattaatggctcttgttctgtacgaatctatttttttgaacaacggacctagtggtatatcttgttctatgtatctaaaataatgtctgactagatccgttagtttaatatcctcagtcatcttgtctagaatggcaaatctaactgcgggtttaggctttagtttagtttttatatctacatctatgtctttatctaacaccaaaaatataatagctaatattttattacaatcatccggatattcttctacgatctcactaactaatgtttctttggttatactagtatagtcactatcggacaaataaagaaaatcagatgatcgatgaataatacatttaaattcatcatctgtaagatttttgagatgtctcattaaaatattattagggtcagtactcattatcattaggcagctattacttattttattatttttcaccatatagatcaatcattagatcatcaaaatatgtttcaatcatcctaaagagtatggtgaatgactcttcccatctaatttctgaacgttcaccaatgtctctagccactttggcactaatagcgatcattcgcttagcgtcttctatattattaactggttgattcaatctatctagcaatggaccgtcggacagcgtcattctcatgttcttaatcaatgtacatacatcgccgtcatctaccaattcatccaacaacataagctttttaaaatcatcattataataggtttgatcgttgtcatttctccaaagaatatatctaataagtagagtcctcatgcttagtaatttaactattttagttaacaactattttttatgttaaatcaattagtacaccgctatgtttaatacttattcatattttagtttttaggattgagaatcaatacaaaaattaatgcatcattaattttagaaatacttagtttccacgtagttaatgaaacatttgaactcatcgtacaagacgttctcgtacaggacgtaactataaaccggtttatatttgttcaagatagatacaaatccgataactttttttacgaattctacgggatccactttaaaagtgtcataccgggttctttttatttttttaaacagatcaatggtgtgatgttgattaggtcttttacgaatttgatatagaatagcgtttacatattctccataatggtcaatcgccatttgttcgtatgtcataaattctttaattatatgacactgtgtattgtttagttcatccttgttcattgttaggaatctatccaaaatggcaattatactagaactataggtgcgttgtatacacatattgatgtgtctgtttatacaatccatgatatttggatccatgctactaccttcgggtaaaattgtagcatcatataccatttctagtactttaggttcattattatccattgcagaggacgtcatgatcgcatcctaaaaaaatatattatttttatgttattttgttaaaaataatcatcgaatacttcgtaagatactccttcatgaacataatcagttacaaaacgtttatatgaagtaaagtatctacgatttttacaaaagtccggatgcataagtacaaagtacgcgataaacggaataataatagatttatctagtctatctttttctatagctttcatagttagatacatggtctcagaagtaggattatgtaacatcagcttcgataaaatgactgggttatttagtcttacacattcgctcatacatgtatgaccgttaactacagagtctacactaaaatgattgaacaatagatagtctaccattgtttcgtattcagatagtacagcgtagtacatggcatcttcacaaattatatcattgtctaatagatatttgacgcatcttatggatcccacttcaacagccatcttaaaatcggtaaaatcatattgctttcctttatcattaataatttctaaaacatcatctctatcataaaagatacaaatattaactgtttgatccgtaataacattgctagtcgatagcaatttgttaataagatgcgctgggctcaatgtcttaataagaagtgtaagaggactatctccgaatttgttttgtttattaacatccgttgatggaagtaaaagatctataatgtctacattcttgactgttttagagcatacaatatggagaggtgtatttccatcatgatctggttttgagggactaattcctagtttcatcatccatgagattgtagaagcttttggattgtctgacataagatgtctatgaatatgatttttgccaaatttatccactatcctggcttcgaatccgatggacattatttttttaaacactctttctgaaggatctgtacacgccaacaacggaccacatccttcttcatcaaccgagttgttaatcttggctccatactgtaccaataaatttattctctctatgacttcatcatctgttcccgagagataatatagaggcgttttatgctgtttatcacacgcgtttggatctgcgccgtgcgtcagcagcatcgcgactattctattattattaattttagaagctatatgcaatggataatttccatcatcatccgtctcatttggagagtatcctctatgaagaagttcttcgacaaatcgttcatctagtcctttaattccacaatacgcatgtagaatgtgataattatttccagaaggttcgatagcttgtagcatattcctaaatacatctaaatttttactattatatttggcataaagagatagataatactcggccgacataatgttgtccattgtagtataaaaattaatatttctatttctatttctgtatatttgcaacaatttactctctataacaaatatcataacttagttcttttatgtcaagaaggcactggtttagttcatctataaatgtcacgccataactaccacgcatgctatactcagaattatgataaagatatttatccttggggtgtaggtaatggggattaatctttgttggatcagtctctaagttaacacatgtcacacatgatccatttatagttatatcacacgatgatgatttatgaattgattccggaagatcgctatcgtattttgtggttccacaattcatttccatacatgttattgtcacactaatattatgatgaactttatctagccgctgagtggtaaacaacagaacagatagtttattatctttaccaacaccctcagccgctgccacaaatctctgatccgtatccatgatggtcatgtttatttctagtccgtatccagtcaacactatgttagcatttctgtcgatatagctttcactcatatgacactcaccaataatagtagaattaatgtcgtaatttacaccaatagtgagttcggcggcaaagtaccaataccggtaatcttgtcgaggaggacatatagtattcttgtattctaccgaatacccgagagatgcgatacaaaagagcaagactaatttgtaaaccatcttactcaaaatatgtaacaatagtacgatgcaatgagtaagacaataggaaatctatcttatatacacataattattctatcaattttaccaattagttagtgtaatgttaacaaaaatgtgggagaatctaattagtttttctttacacaattgacgtacatgagtctgagttccttgtttttgctaattatttcatccaatttattattcttgactatatcgagatcttttgtataggagtcagacttgtattcaacatgcttttctataatcattttagctatttcggcatcatccaatagtacattttccagattagcagaatagatattaatgtcgtatttgaacagagcctgtaacatctcaatgtctttattatctatagccaatttaatgtccggaatgaagagaagggaattattggtgtttgtcgacgtcatatagtcgagcaagagaatcatcatatccacgtgtccattttttatagtggtgtgaatacaactaaggagaatagccagatcaaaagtagatggtatttctgaaagaaagtatgatacaatacttacatcattaagcatgacggcatgataaaatgaagttttccatccagttttcccatagaacatcagtctccaatttttcttaacaaacagttttaccgtttgcatgttaccactatcaaccgcataatacaatgcagtgtttcccttgtcatcaaattgtgaatcatccagtccactgaatagcaaaatctttactattttggtatcttccaatgtggctgcctgatgtaatggaaattcattctctagaagatttttcaatgctccagcgttcaacaacgtacatactagacgcacgttattatcagctattgcataatacaaggcactatgtccatggacatccgccttaaatgtatctttactagagagaaagcttttcagctgcttagacttccaagtattaattcgtgacagatccatgtctgaaacgagacgctaattagtgtatattttttcattttttataattttgtcatattgcaccagaattaataatatctctaatagatctgattagtagatacatggctatcgcaaaacaacatatacacatttaataaaaataatatttattaagaaaattcagatttcacgtacccatcaatataaataaaataatgattccttacaccgtacccatattaaggagattccaccttacccataaacaatataaatccagtaatatcatgtctaatgatgaacacaaatggtgtattaaattccagtttttcaggagatgatctcgccgtagctaccataatagtagatgcctctgctacagttccttgttcgtcgacatctatctttgcattctgaaacattttataaatatataatgggtccctagtcatatgtttaaacgacgcattatctggattaaacatactaggagccatcatttcggctatcgacttaatatccctcttattttcgatagaaaatttagggagtttaagattgtacactttattccctaattgaaacgaccaatagtctaattttgcagccgtaatagaatctgtgaaatgggtcatattatcacctattgccaggtacatactaatattagcatccttatacggaaggcgtaccatgtcatattctttgtcatcgattgtgattgtatttccttgcaatttagtaactacgttcatcatgggaaccgttttcgtaccgtacttattagtaaaactagcattgcgtgttttagtgatatcaaacggatattgccatgtacctttaaaatatatagtattaatgattgcccatagagtattattgtcgagcatattagaatctactacattagacataccggatctacgttctactatagaattaattttattaaccgcatctcgtctaaagtttaatctatataggccgaatctatgatattgttgataatacgacggtttaatacacacagtattatctacgaaactttgataagttagatcagtgtacgtatatttagatgttttcagcttagctaatcctgatattaattctgtaaatgctggacccagatctctttttctcaaatccatagtcttcaataattctattctagtattacctgatgcaggcaatagcgacataaacatagaaaacgaatagccaaacggcgagaagacaatattatcatcttgaatatttttatacgctactataccggcattggtaaatccttgcagacgataggtagacgctgaacacgttaacgatagtatcaataacgcaatcatgattttatggtattaataattaaccttatttttatgttcggtataaaaaaattattgatgtctacacatccttttgtaattgacatctatatatccttttgtataatcaactctaatcactttaacttttacagttttccctaccagtttatccctatattcaacatatctatccatatgcatcttaacactctctgccaagatagcttcagagtgaggatagtcaaaaagataaatatatagagcataatccttctcgtatactctgccctttattacatcgcccgcattgggcaacgaataacaaaatgcaagcatcttgttaacgggctcgtaaattgggataaaaattatgtttttatatctattttattcaagagaatattcaggaatttctttttccggttgtatctcgtcgcagtatatatcatttgtacattgtttcatattttttaatagtttacaccttttagtaggactagtatcgtacaattcatagctgtattttgaattccaatcacgcataaaaatatcttccaattgttgacgaagacctaatccatcatccggtgtaatattaatagatgctccacatgtatccgtaaagtaatttcctgtccaatttgaggtacctatataggccgttttatcggttaccatatatttggcatggtttaccctagaatacggaatgggaggatcagcatctggtacaataaatagctttacttctatatctatgtttttagattttagcatagcgatagatcttaaaaagtttctcatgataaacgaagatcgttgccagcaactaatcaatagcttaacggatacttgtctgtctatagcggatcttcttaattcatcttctatataaggccaaaacaaaattttacccgccttcgaataaataatagggataaagttcataacagatacataaacgaatttactcgcatttctaatacatgacaataaagcggttaaatcattggttctttccatagtacatagttgttgcggcgcagaagcaataaatacagagtgtggaacaccacttacgttaatactaagaggatgatctgtattataatacgacggataaaagtttttccaattatatggtagattgttaactccaagataccagtatacctcaaaaatttgagtgagatccgctgccaagttcctattattgaagatcgcaatacccaattctttgacctgagttagtgatctccaatccatgttagcgcttcctaaataaatatgtgtattatcagatatccaaaattttgtatgaagaactcctcctaggatatttgtaatatctatgtatcgtacttcaactccggccatttgtagtctttcaacatcctttaatggtttgttagatttattgacggctactctaactcttactcctcttttgggtaattgtacaatctcgtttaatattatcgtgccgaaattcgtacccacttcatccgataaactccaataaaaagatgatatatctagtgtttttgtggtattggatagaatttccctccacatgttaaatgtagacaaatatactttatcaaattgcatacctataggaatagtctctgtaatcactgcgattgtattatccggattcattttatttgttaaaaaataatcctatatcacttcactctattaaaaatccaagtttctatttctttcatgactgattttttaacttcatccgtttccttatgaagatgatgtttggcaccttcataaatttttatttctctattacaatttgcatgttgcatgaaataatatgcacctaaaacatcgctaatctcattgtttgttccctggagtatgagagtcgggggggtgttaatcttggaaattatttttctaaccttgttggtagccttcaagacctgactagcaaatccagccttaattttttcatgattgattaatgggtcgtattggtatttataaactttatccatatctctagatactgattctggacatagctttccgactggcgcatttggtgtgatggttcccataagtttggcagctagcagattcagttttgaaacagcatctgcattaactagaggagacattagaatcattgctgtaaacaagtttggattatcgtaagaggctagtatagaaattgttgctcccatggaatgacccaataagtagatttaatagttaccacgtgctgtaccaaagtcatcaatcatcattttttcaccattacttcttccatgtccaatatgatcatgtgagaatactaaaattcctaacgatgatatgttttcagctagttcgtcataacgtccagaatgtttaccagctccatgacttatgaatactaatgccttaggatatgtaataggtttccaatatttacaatatatgtaatcattgtccagattgaacatacagtttgcactcatgattcacgttatataactatcaatattaacagttcgtttgatgatcatattatttttatgttttattgataattgtaaaaacatacaattaaatcaatatagaggaaggagacggatactgtcttttgtgagatagtcatggcgactaaatcagattatgaggatgctgttttttactttgtggatgatgataaaatatgtagtcgcgactccatcatcgatctaatagatgaatatatcacgtggagaaatcatgttatagtgtttaacaaagatattaccagttgtggaagactgtacaaggaattgatgaagttcgatgatgccgctatacagtactatggtattgataaaattaatgagattgtcgaagctatgagcgaaggagaccactacatcaattttacaaaagtccatgatcaggaaagtttattcgctaccataggaatatgtgctaaaatcactgaacattggggatacaaaaagatttcagaatctagattccaatcattgggaaacattacagatctgatgaccgacgataatataaacatcttgatactttttctagaaaaaaaattgaattgatgatataggggtcttcataacgcataattattacgttagcattctatatccgtgttaaaaaaaattatcctatcatgtatttgagagttttatatgtagcaaacatgatagctgtgatgccaataagctttagatattcacgcgtgctagtgttagggatggtattatctggtggtgaaatgtccgttatataatctacaaaacaatcatcgcatatagtatgcgatagtagagtaaacatttttatcgtttctactgggttcatacatcgtctacccaattcggttatgaatgaaattgtcgccaatcttacacccaaacccttgttatccattagcatagtattaacttcgttatttatgtcataaactgtaaatgattctgtagatgccatatcatacatgatattcatgtccctattataatcattactaactttatcacaatatatgttgataatatctatatatgatctagtctttgtgggcaactgtctatacaagtcgtctaaacgttgtttactcatatagtatcgaacagccatcattacatggtcccgttccgttgatagataatcgagtatgttagtggacttgtcaaatctatataccatattttctggaagtggatatacatagtcgtgatcaacattattgctagcctcatcttctatatcctgtactataccattatctatatcatctacataatctacgatattattatacataaacatcgacaacatactattgtcaattatctaagtcctgttgatccaaacccttgatctcctctatctgtactatctagagattgtacttcttccagttctggataatatatacgttgatagattagctgggctattctatcccccgtatttacattaaacgtacattttccattattaataagaataactcctatgtttcccctataatcttcgtctattacaccgcctcctatatcaatgccttttagggacagaccagacctaggagctattctaccatagcagaacttaggcatggacatactaatatctgtcttaattaactgtcgttctccaggagggatagtataatcgtaagcgctatataaatcatatccggcggcgtaaggtgattgcctagtaggagatttagctctgttagtttccttaacaaatctaactggtgagttaatattcatgttgaacataaaactaatattttatttcaaaattatttaccatcccatatattccatgaataagtgtgatgattgtacacttctatagtatctatatacgattcacgataaaatcctcctatcaatagcagtttattatccactatgatcaattctggattatccctcggataaataggatcatctatcagagtccatgtattgctggattcacaataaaattccgcatttctaccaaccaagaataaccttctaccgaacactaacgcgcatgatttataatgaggataataagtggatggtccaaactgccactgatcatgattgggtagcaaatattctgtagttgtatcagtttcagaatgtcctcccattacgtatataacattgtttatagatgccactgctggattacatctaggtttcagaagactcggcatattaacccaagcagcatccccgtggaaccaacgctcaacagatgtgggatttggtagacctcctactacgtataatttattgttagcgggtatcccgctagcatacagtctggggctattcatcggaggaattggaatccaattgtttgatatataatttacagctatagcattgttatgtatttcattgttcatccatccaccgatgagatatactacttctccaacatgagtacttgtacacatatggaatatatctataatttgatccatgttcataggatactctatgaatggatacttgtatgatttgcgtggttgtttatcacaatgaaatattttggtacagtctagtatccattttacattatttatacctctgggagaaagataatttgacctgattacatttttgataaggagtagcagatttcctaatttatttcttcgctttatataccacttaatgacaaaatcaactacataatcctcatctggaacatttagttcatcgctttctagaataagtttcatagatagataatcaaaattgtctatgatgtcatcttccagttccaaaaagtgtttggcaataaagtttttagtatgacataagagattggatagtccgtattctatacccatcatgtaacactcgacacaatattcctttctaaaatctcgtaagataaagtttatacaagtgtagatgataaattctacagaggttaatatagaagcacgtaataaattgacgacgttatgactatctatatatacctttccagtatatgagtaaataactatagaagttaaactgtgaatgtcaaggtctagacaaacccttgtaactggatctttatttttcgtgtatttttgacgtaaatgtgtgcgaaagtaaggagataactttttcaatatcgtagaattgactattatattgccacctatagcatcaataattgttttgaatttcttagtcatagacaatgctaatatattcttacagtacacagtattaacaaatatcggcatttatgtttctttaaaagtcaacatctagagaaaaatgattatctttttgagacataactcccattttttggtattcacccacacgtttttcgaaaaaattagtttttccttccaatgatatattttccatgaaatcaaacggattggtaacattataaatttttttaaatcccaattcagaaatcaatctatccgcgacgaattctatatatgttttcatcatttcacaattcattcctataagtttaactggaagagccgcagtaagaaattcttgttcaatggatactgcatctgttataatagatctaacggtttcttcactcggtggatacaataaatgtttaaacatcaaacatgcgaagtcgcagtgtagaccctcgtctctactaattagttcgttggaaaacgtgagtccgggcattaggccacgctttttaagccaaaatatggaagcgaatgatccggaaaagaagattccttctactgcagcaaaggcaataagtctctctccataaccggcgctgtcatgtatccacttttgagcccaatcggccttcttttttacacaaggcattgtttctatggcattaaagagatagtttttttcattactatctttaacataagtatcgatcaaaagactatacatttccgaatgaatgttttcaatggccatctgaaatccgtagaaacatctagcctcggtaatctgtacttctgtacaaaatcgttccgccaaattttcattcactattccgtcactggctgcaaaaaacgccaatacatgttttataaaatatttttcgtctggtgttagtttattccaatcattgatatctttagatatatctacttcttccactgtccaaaatgatgcctctgcctttttatacatgttccagatgtcatgatattggattgggaaaataacaaatctatttggatttggtgcaaggatgggttccataactaaattaacaatatcaataaattttttttcagttatctatatgcctgtacttggattttttgtacatcgatatcgccgcaatcactacaataattacaagtattattgatagcattgttattagtactatcataattaaattatcgacattcatgggtgctgaataatcgttattatcatcattatcattttgtaattgtgacatcatactaaataaatcgtttgcgagattgttgtgggaagcgggcatggaggatgcattatcattattatttaacgccttccatttggattcacaaatatggcgcgcgttcaacattttatggaaactataattttgtgaaaacagataacaagaaaactcgtcatcgttcaaatttttaacgatagtaaaccgattaaacgtcgagctaatttctaacgctagcgactctgttggatatgggtttccagatatatatcttttcagttcccctacgtatctataatcatctgtaggaaatggaagatatttccatttatctactgttcctaatatcatatgtggtggtgtagtagaaccattaagcgcgaaagatgttatttcgcatcgtattttaacttcgcaataatttctggttagataacgcactctaccagtcaagtcaatgatattagcctttacagatatattcatagtagtcgtaacgatgactccatcttttagatgcgatactcctttgtatgtaccagaatcttcgtacctcaaactcgatatatttaaacaagttaatgagatattaacgcgttttatgaatgatgatatataaccagaagttttatcctcggtggctagcgctataaccttatcattataataccaactagtgtgattaatatgtgacacgtcagtgtgggtacaaatatgtacattatcgtctacgtcgtattcgatacatccgcatacagccaacaaatataaaatgacaaatactctaacgccgttcgtacccatcttgatgcggtttaataaatgttttgatttcaatttattgtaaaaaaagattcggttttatactgttcgatattctcattgcttatattctcatctatcatctccacacagtcaaatccgtggttagcatgcacctcatcaaccggtaaaagactatcggactcttctatcattataactctagaatatttaatttggtcattattaatcaagtcaattatcttatttttaacaaacgtgagtattttactcattttttataaaaacttttagaaatatacagactctatcgtgtgtctatatcttctttttatatccaatgtatttatgtctgatttttcttcatttatcatatataatggtccaaattctacacgtgcttcggattcatccagatcattaaggttcttataattgtaacatccttctcttccctcttctacatcttccttcttattcttattcttagcgtcacagaatctaccacagcaggatcccatgacgagcgtcatattaaactaatccattttcaattataatatatgattagtaatgaccattaaaataaaaaatattcttcataaccggcaagaaagtgaaaagttcacattgaaactatgtcagtagtatacatcatgaaatgatgatatatatatactctattttggtggaggattatatgatataattcgtggataatcattcttaagacacatttcttcattcgtaaatcttttcacgttaaatgagtgtccatattttgcaatttcttcatatgatggcggtgtacgtggacgaggctgctcctgttcttgttgtggtcgccgactgtcgtgtttgcgtttatccctccattatcgcgattgcgtagatggagtactattatataccttgtaattaaatttttttattaattaaacgtataaaaacgttccgtatctgtatttaagagccagatttcgtctaatagaacaaatagctacagtaaaaataactagaataattgctacacccactagaaaccacggatcgtaatacggcaatcggttttcgataataggtggaacgtatattttatttaaggacttaacaattgtctgtaaaccacaatttgcttccgcggatcctgtattaactatctgtaaaagcatatgttggccgggcggagccgaacattctccgatatccaatttctgtatatctataatattattaacctccgcatacgcattacagttcttttctagcttggataccgcactaggtacatcgtctagatctattcctatttcctcagcgatagctcttctatccttttccggaagcaatgaaatcacttcaataaatgattcaaccatgagtgtgaaactaagtcgagaattactcatgcatttgttagttattcggagcgcgcaatttttaaactgtcctataacctctcctatatgaatagcacaagtgacattagtagggatagaatgttgagctaatttttgtaaataactatctataaaaagattatacaaagttttaaactctttagtttccgccatttatccagtctgagaaaatgtctctcataataaatttttccaagaaactaattgggtgaagaatggaaacctttaatctatatttatcacagtctgttttggtacacatgatgaattcttctaatgccgtactaaattcgatatctttttcgatttctggatatgtttttaataaagtatgaacaaagaaatggaaatcgtaataccagttatgtttaactttgaaattgttttttattttcttgttaatgattccagccacttgggaaaagtcaaagtcgtttaatgccgatttaatacgttcattaaaaacaaactttttatcctttagatgaattattattggttcattggaatcaaaaagtaagatattatcgggtttaagatctgcgtgtaaaaagttgtcgcagcatggtagttcgtagattttaatgtataacagagccatctgtaaaaagataaactttatgtattgtaccaaagatttaaatcctaatttgatagctaactcggtatctactttatctgccgaatacagtgctaggggaaaaattataatgtttcctctttcgtattcgtagttagttctcttttcatgttcgaaaaagtgaaacatgcggttaaaatagtttataacattaatattactgttaataactgccgggtaaaagtgggatagtaatttcacgaatttgatactgtcctttctctcgttaaacgcctttagaaaaactttagaagaatatctcaatgatagttcctgaccatccatagtttgtatcaataatagcaacatatgaagaacacgtttatacagagtatgtaaaaatgttaatttatagtttaatcccatggcccacgcacacacgattaattttttttcatctccctttagattgttgtatagaaatttgggtactgtgaactccgccgtagtttccatgggactatataattttgtggcctcgaatacaaattttactacatagttatctatcttaaaaactataccatatcctcctgtagatatgtgataaaaatcgtcgtttataggataaaatcgtttatccttttgttggaaaaaggatgaattaatgtaatcattctcttctatctttagtagtgtttccttattaaaattcttaaaataatttaacaatctaactgacggagcccaattttggtgtaaatctaattgggacattatattgttaaaatacaaacagtctcctaatataacagtatctgataatctatggggagacatccattgatattcaggggatgaatcattggcaacacccatttattgtacaaaaagccccaatttacaaacgaaagtccaggtttgatagagacaaactattaactattttgtctctgtttttaacacctccacagtttttaatttctttagtaatgaaattattcacaatatcagtatcttctttatctaccagagattttactaacttgataaccttggctgtctcattcaatagggtagtaatatttgtatgtgtgatattgatatctttttgaattgtttcttttagaagtgattctttgatggtgccagcatacgaattacaataatgcagaaactcggttaacatgcaggaattatagtaagccaattccaattgttgcctgtgttgtattagagtgtcaatatgagcaatggtgtccttgcgtttctctgatagaatgcgagcagcgattttggcgttatcatttgacgatatttctggaatgacgaatcctgtttctactaactttttggtaggacaaagtgaaacaatcaagaagatagcttctcctcctatttgtggaagaaattgaactcctctagatgatctactgacgatagtatctccttgacagatattggaccgaattacagaagtacctggaatgtaaagccctgaaaccccctcattttttaagcagattgttgccgtaaatcctgcactgtgaccaagatagagagctcctttggtgaatccatctctatgtttcagtttaaccaagaaacagtcagctggtctaaaatttccatctctatctaatacagcatctaacttgatgtcaggaactatgaccggtttaatgttatatgtaacattgagtaaatccttaagttcataatcatcactgtcatcagttatgtacgatccaaacaatgtttctactggcatagtggatacgaagatgctatccatcagaatgtttccctgattagtattttctatatagctattcttctttaaacgattttccaaatcagtaactatgttcatttttttaggagtaggacgcctagccagtatggaagaggattttctagatcctctcttcaacatctttgatctcaatggaatgcaaaaccccatagtgaaacaaccaacgataaaaataatattgtttttcactttttataattttaccatctgactcatggattcattaatatctttataagagctactaacgtataattctttataactgaactgagatatatacaccggatctatggtttccataattgagtaaatgaatgctcggcaataactaatggcaaatgtataaaacaacgaaattatactagagttgttaaagttaatattttctatgagctgttccaataaattatttgttgtgactgcgttcaagtcataaatcatcttgatactatccagtaaacagtctttaagttctggaatattatcatcccattgtaaagcccctaattcgactatcgaatatcctgctctgatagcagtttcaatatcgacggacgtcaatactgtaataaaggtggtagtattgtcatcatcgtgataaactacgggaatatggtcgttagtaggtacggtgactttacacaacgcgatatataactttccttttgtaccatttttaacgtagttgggacgtcctgcagggtattgttttgaagaaatgatatcgagaacagatttgatacgatatttgttggattcctgattattcactataatataatctagacagatagatgattcgataaatagagaaggtatatcgttggtaggataatacatccccattccagtattctcggatactctattgatgacactagttaagaacatgtcttctattctagaaaacgaaaacatcctacatggactcattaaaacttctaacgctcctgattgtgtctcgaatgcctcgtacaaggatttcaaggatgccatagattctttgaccaacgatttagaattgcgtttagcatctgatttttttattaaatcgaatggtcggctctctggtttgctaccccaatgataacaatagtcttgtaaagataaaccgcaagaaaatttatacgcatccatccaaataaccctagcaccatcggatgatattaatgtattattatagattttccatccacaattattgggccagtatactgttagcaacggtatatcgaatagattactcatgtaacctactagaatgatagttcgtgtactagtcataatatctttaatccaatctaagaaatttaaaattagattttttacactgttaaagttaacaaaggtattacccggatacgtggatatcatatatggcattggtccattatcagtaatagctccataaactgatacggcgatggtttttatatgtgtttgatctaacgaggaagaaattcgcgcccacaattcatctctagatatgtatttaatatcaaacggtaacacatcaatttcgggacgcgtatatgtttctaaatttttaatccaaatataatgatgacctatatgccctattatcatactgtcaactatagtacacctagagaacttacgatacatctgtttcctataatcgttaaattttacaaatctataacatgctaaaccttttgacgacaaccattcattaatttctgatatggaatctgtattctcgataccgtattgttctaaagccagtgctatatctccctgttcgtgggaacgctttcgtataatatcgatcaacggataatctgaagtttttggagaataatatgactcatgatctatttcgtccataaacaatctagacataggaattggaggcgatgatcttaattttgtgcaatgagtcgtcaatcctataacttctaatattgtaatattcatcatcgacataacactatctatgttatcatcgtatattagtataccacggccttcttcatttcgtgccaaaataatatacagtcttaaataattacgcaatatctcaatagtttcataattgttagctgttttcatcaaggtttgtatcctgtttaacatgatggcgttctataacgtctctattttctatttttaattttttaaatttttaacgatttactgtggctagatacccaatctctctcaaatatttttttagcctcgcttacaagctgtttatctatactattaaaactgacgaatccgtgattttggtaatgggttccgtcgaaatttgccgaagtgatatgaacatattcgtcgtcgactatcaacaattttgtattattctgaatagtgaaaaccttcacagatagatcattttgaacacacaacgcgtctagacttctggcggttgccatagaatatacgtcgttcttatcccaattaccaactagaagtctgatcttaactcctctattaatggctgcttctataatggagttgtaaatgtcaggccaatagtagctattaccgtcgacacgtgtagtgggaactatggccaaatgttcaatatctatactagtcttagccgacttgagtttatcaataactacatcagtgtctagatctctagaatatcccaataggtgttctggagaatcagtaaagaacactccacctataggattcttaatatgatacgcagtgctaactggcagacaacaagccgcagagcataaattcaaccatgaattttttgcgctattaaaggctttaaaagtatcaaatcttctacgaagatctgtggccagcgggggataatcagaatatacacctaacgttttaatcgtatgtatagatcctccagtaaatgacgcgtttcctacataacatctttcatcatctgacacccaaaaacaaccgagtagtagtcccacattattttttttatctatattaacggttataaaatttatatccgggcagtgactttgtagctctcccagatttcttttccctcgttcatctagcaaaactattattttaatccctttttcagatgcctcttttagtttatcaaaaataagcgcgcccctagtcgtactcagaggattacaacaaaaagatgctatgtatatatatttcttagctagagtgataatttcgttaaaacattcaaatgttgttaaatgatcggatctaaaatccatattttctggtagtgtttctaccagcctacattttgctcccgcaggtaccggtgcaaatggccacatttagttaacataaaaacttatacatcctgttctatcaacgattctagaatatcatcggctatatcgctaaaattttcatcaaagtcgacatcacaacctaactcagtcaatatattaagaagttccatgatgtcatcttcgtttatttctatatccgtatccattgtagattgttgaccgattatcgagtttaaatcattactaatactcaatccttcagaatacaatctgtgtttcattgtaaatttataggcggtgtatttaagttggtagattttcaattatgtatcaatatagcaacagtagttcttgctcctccttgattctagcatcctcttcattattttcttctacgtacataagcatgtccaatacgttagacaacacaccgacgatggcggccgccacagacacgaatatgactagaccgatgaccatttaaaaacccctctctagctttcacttaaactgtatcgattattcttttagaacatgtataatataaaaacattattctatttcgaatttaggcttccaaaaatttttcatccgtaaaccgataataatatatatagacttgttaatagtcggaataaatagattaatgcttaaactatcatcatctccacgattagagatacaatatttacattctttttgctgtttcgaaactttatcaatacacgttaatacaaacccaggaaggagatattgaaactgaggctgttgaaaatgaaacggtgaatacaataattcagataatgtaaaatcatgattccgtattctgatgatattagaactgctaatggatgtcgatggtatgtatctaggagtatctattttaacaaagcatcgatttgctaatatacaattatcattttgattaattgttattttattcatattcttaaaaggtttcatatttatcaattcttctacattaaaaatttccatttttaatttatgtagccccgcaatactcctcattacgtttcattttttgtctataatatccattttgttcatctcggtacatagattatccaattgagaagcgcatttagtagttttgtacattttaagtttattgacgaatcgtcgaaaactagttatagttaacattttattatttgataccctgatattaatacccctgccgttactattatttataactgatgtaacccacgtaacattagaattaattatcgatagtaatgcatcgacgcttccaaaattgtctattataaactcaccgataatttttttattgcatgttttcatattcattaggattatcaaatctttaatcttattacgattgtatgcgttgatattacaagacgtcattctaaaagacggaggatctccatcaaatgccagacaatcacgtacaaagtacatggaaataggttttgttctattgcgcatcatagattcatatagaacacccatagaaatactaatttgttttactctataaaatactaatgcatctatttcatcgttttgtataacgtctttccaagtgccaaattccaaatttttttcattgatagtaccaaattcttctatctctttaactacttgcatagataggtaattacagtgatgcctacatgccgttttttgaaactgaatagatgcgtctagaagcgatgctacactagtcacaatcaccactttcatatttagaatatatgtatgtaaaaatatagtagaatttcattttgtttttttctatgctataaatgaattctcattttgcatctgctcatactccgttttatatcaataccaaagaaggaagatatctggttctaaaagccgttaaagtatgcgatgttagaactgtagaatgcgaaggaagtaaagcttcctgcgtactcaaagtagataaaccctcatcgcccgcgtgtgagagaagaccttcgtccccgtccagatgcgagagaatgaataaccctggaaaacaagtcccgtttatgaggacggacatgctacaaaatatgttcgcggctaatcgcgataatgtagcttctagacttttgtcctaaaatactattatatccttttcgatattaataaatccgtgtcgtccaggttttttatctctttcagtatgtgaatagataggtattttatctctattcatcatcgaatttaagagatccgataaacattgtttgtattctccagatgtcagcatctgatacaacaatatatgtgcacataaacctctggcacttatttcatgtaccttccccttatcactaaggagaatagtatttgagaaatatgtatacatgatattatcatgaattagatatacagaatttgtaacactctcgaaatcacacgatgtgtcggcgttaagatctaatatatcactcgataacacattttcatctagatacactagacattttttaaagctaaaatagtctttagtagtgacagtaactatgcgattattttcatcgatgatacatttcatcggcatattattacgcttaccatcaaagactataccatgtgtatatctaacgtattctagcatggttgccatacgtgcattaaacttttcaggatctttggatagatcttccaatctatctatttgagaaaacatttttatcatgttcaatagttgaaacgtcggatccactatatagatattatctataaagattttaggaactacgttcatggtatcctggcgaatattaaaactatcaatgatatgattatcgttttcatcttttatcaccatatagtttctaagatatgggattttacttaatataatattatttcccgtgataaattttattagaaaggccaaatctataagaaaagtcctagaattagtctgaagaatatctatatcgccgtaccgtatatttggattaattagatatagagaatatgatccgtaacatatacaacttttattatggcgtctaagatattcttccatcaacttattaacatttttgactagggaagatacattatgacgtcccattacttttgccttgtctattactgcgacgttcatagaatttagcatatctcttgccaattcttccattgatgttacattataagaaattttagatgaaattacatttggagctttaatagtaagaactcctaatatgtccgtgtatgtggtcactaatacagattgtagttctataatcgtaaataatttacctatattatatgtttgagtctgtttagaaaagtagctaagtatacgatcttttatttctgatgcagatgtatcaacatcggaaaaaaatctttttttattcttttttactaaagatacaaatatgtctttgttaaaaacagttattttctgaatatttctagcttgtaattttaacatatgatattcgttcacactaggtactctgcctaaataggtttctataatctttaatgtaatattaggaagagtattctgatcaggattcctattcattttgaggatttaaaactctgattattgtctaatatggtctcaacacaaactttttcacagagcgatagagtttttgataactcgtttttcttaagaaatataaaactactgtttccagagctcgctctatcttttattttatctaattcgatacaaactcctgatactggttcagaaagtaattcattaattttcagtcctttatagaagatatttaatatagataatacaaaattttcagttcttgatatcgatctgattgatcctagaactagatatattaataacgtgctcattaggcagtttatggcagcttgataattagatatagtatattccagttcatatttattagataccgcattgcccagattttgatattctatgaattcctctgaaaataaatccaaaataactagacattctattttttgtggattagtgtactctcttccctctatcatgttcactactggtgtccacgatgataaatatctagagggaatataatatagtccataggatgccaatctagcaatgtcgaataactgtaatttgattcttcgttcttcattatgaattgattcttgaggtataaacctaacacaaattatattattagacttttcgtatgtaatgtctttcatgttataagtttttaatcctggaatagaatctattttaatgaggcttttaaacgcagagttctccaacgagtcaaagcataatactctgttgtttttcttatatacgatgttacgattttcttctttgaatggaataggtttttgaattagtttataattacaacataatagataaggaagtgtgcaaatagtacgcggaaaaaacataatagctcccctgttttcatccatggttttaagtaaatgatcactggcttctttagtcaatggatattcgaacattaaccgtttcatcatcattggacagaatccatatttcttaatgtaaagagtgatcaaatcattgtgtttattgtaccatcttgttgtaaatgtgtattcggttatcggatctgctcctttttctattaaagtatcgatgtcgatctcgtctaagaattcaactatatcgacatatttcatttgtatacacataaccattactaacgtagaatgtataggaagagatgtaacgggaacagggtttgttgattcgcaaactattctaatacataattcttctgttaatacgtcttgcacgtaatctattatagatgccaagatatctatataattattttgtaagatgatgttaactatgtgatctatataagtagtgtaataattcatgtatttcgatatatgttccaactctgtctttgtgatgtctagtttcgtaatatctatagcatcctcaaaaaatatattcgcatatattcccaagtcttcagttctatcttctaaaaaatcttcaacgtatggaatataataatctattttacctcttctgatatcattaatgatatagtttttgacactatcttctgtcaattgattcttattcactatatctaagaaacggatagcgtccctaggacgaactactgccattaatatctctattatagcttctggacataattcatctattataccagaattaatgggaactattccgtatctatctaacatagttttaagaaagtcagaatctaagacctgatgttcatatattggttcatacatgaaatgatctctattgatgatagtgactatttcattctctgaaaattggtaactcattctatatatgctttccttgttgatgaaggatagaatatactcaatagaatttgtaccaacaaactgttctcttatgaatcgtatatcatcatctgaaataatcatgtaaggcatacatttaacaattagagacttgtctcctgttatcaatatactattcttgtgataatttatgtgtgaggcaaatttgtccacgttctttaattttgttatagtagatatcaaatccaatggagctacagttcttggcttaaacagatatagtttttctggaacgaattctacaacattattataaaggactttgggtagataagtgggatgaaatcctattttaattaatgcgatagccttgtcctcgtgcagatatccaaacgcttttgtgatagtatggcattcattgtctagaaacgctctacgaatatctgtgacagatatcatctttagagaatatactagtcgcgttaatagtactacaatttgtattttttaatctatctcaataaaaaaattaatatgtatgattcaatgtataactaaactactaactgttattgataactagaatcagaatctaatgatgacgtaaccaagaagtttatctactgccaatttagctgcattatttttagcatctcgtttagattttccatctgccttatcgaatactcttccgtcgatgtctacacaggcataaaatgtaggagagttactaggccccactgattcaatacgaaaagaccaatctctcctagtaatttggcagtactcattaataacggtgacagggttagcacctttccaatcaataatttttttagccggaataacatcatcaaaagacttatgatcctctctcattgatttttcgcgggatacatcatctattatggcgtcagccataacatcagcatccggcttatccgcctccgttgtcataaaccaacgaggaggaatatcgtcggagctgtacaccatagcactacgttgaagatcgtacagagctttattaacttctcgcttctccatattaagttgtctagttagttgtgcagcagtagctccttcgattccaatggttttaatagcctcacacacaatctctgcgttagaacgttcgtcgatatagattttagacatttttagagagaactaacacaaccagcaataaaactgaacctactttatcatttttttattcatcatcctctggtggttcgtcgttcctatcgaatgtggatctgattaacccgtcatctataggtgatgctggttctggagattctggaggagatggattattatctggaagaatctctgttatttccttgttttcatgtatcgattgcgttgtaacattaagattgcgaaatgctctaaatttgggaggcttaaagtgttgtttgcaatctctacacgcatgtctaactagtggaggttcgtcagcggctctagtttgaatcatcatcggcgtagtattcctacttttacagttaggacacggtgtattgtatttctcgtcgagaacgttaaaataatcgttgtaactcacatcctttattttatctatattgtattctactcctttcttaatgcattttataccgaataagagatagcgaaggaattctttttcggtgccgctagtacccttaatcatatcacatagtgttttatattccaaatttgtggcaatagacggtttatttctatacgatagtttgtttctggaatcctttgagtattctataccaatattattctttgattcgaatttagtttcttcgatattagattttgtattacctatattcttgatgtagtactttgatgatttttccatggcccattctattaagtcttccaagttggcatcatccacatattgtgatagtaattctcggatatcagtagcggctaccgccattgatgtttgttcattggatgagtaactactaatgtatacattttccatttataacacttatgtattaactttgttcatttatattttttcattattatgttgatattaacaaaagtgaatatatatgttaataattgtattgtggttatacggctacaatttcataatgagtggaagtcagtgtccgatgatcaatgacgatagctttactctgaaaagaaagtatcaaatcgatagtgcggagtcaacaataaaaatggataagaagaggataaagtttcagaatagagccaaaatggtaaaagaaataaatcagacaataagagcagcacaaactcattacgagacattgaaactaggatacataaaatttaagagaatgattaggactactactctagaagatatagcaccatctattccaaataatcagaaaacttataaactattctcggacatttcagccatcggcaaagcatcacagaatccgagtaagatggtatatgctctgctgctttacatgtttcccaatttgtttggagatgaccatagattcattcgttatagaatgcatccaatgagtaaaatcaaacacaagatcttctctcctttcaaacttaatcttattagaatattagtggaagaaagattctataataatgaatgcagatctaataaatggagaataattggaacacaagttgataaaatgttgatagctgaatctgataaatatacaatagatgcaaggtataacctaaaacccatgtatagaatcaagggaaaatctgaagaagataccctcttcatcaaacagatggtagaacaatgtgtgacatcccaggaattggtggaaaaagtgttgaagatactgtttagagatttgttcaagagtggagaatacaaagcatacagatacgatgatgatgtagaaaatggatttattggattggatacactaaaattaaacattgttcatgatatagttgaaccatgtatgcctgttcgtaggccagtggctaagatactgtgtaaagaaatggtaaataaatactttgagaatccgctacatattattggtaaaaatcttcaagagtgcattgactttgttagtgaataggcatttcatctttctccaatactaattcaaattgttaaattaataatggatagtataaatagttattagtgataaaatagtaaaaataattattagaataagagtgtagtatcatagataactctcttctataaaaatggattttattcgtagaaagtatcttatatacacagtagaaaataatatagattttttaaaggatgatacattaagtaaagtaaacaattttaccctcaatcatgtactagctctcaagtatctagttagcaattttcctcaacacgttattactaaggatgtattagctaataccaatttttttgttttcatacatatggtacgatgttgtaaagtgtacgaagcggttttacgacacgcatttgatgcacccacgttgtacgttaaagcattgactaagaattatttatcgtttagtaacgcaatacaatcgtacaaggaaaccgtgcataaactaacacaagatgaaaaatttttagaggttgccgaatacatggacgaattaggagaacttataggcgtaaattatgacttagttcttaatccattatttcacggaggggaacccatcaaagatatggaaatcatttttttaaaactgtttaagaaaacagacttcaaagttgttaaaaaattaagtgttataagattacttatttgggcatacctaagcaagaaagatacaggcatagagtttgcggataatgatagacaagatatatatactctatttcaacaaactggtagaatcgtccatagcaatctaacagaaacgtttagagattatatctttcccggagataagactagctattgggtgtggttaaacgaaagtatagctaatgatgcggatatcgttcttaatagacacgccattaccatgtatgataaaattcttagttatatatactctgagataaaacaaggacgcgttaataaaaacatgcttaagttagtttatatctttgagcctgaaaaagatatcagagaacttctgctagaaatcatatatgatattcctggagatatcctatctattattgatgcaaaaaacgacgattggaaaaaatattttattagtttttataaagctaattttattaacggtaatacatttattagtgatagaacgtttaacgaggacttattcagagttgttgttcaaatagatcccgaatatttcgataatgaacgaattatgtctttattctctacgagtgctgcggacattaaacgatttgatgagttagatattaataacagttatatatctaatataatttatgaggtgaacgatatcacattagatacaatggatgatatgaagaagtgtcaaatctttaacgaggatacgtcgtattatgttaaggaatacaatacatacctgtttttgcacgagtcggatcccatggtcatagagaacggaatactaaagaaactgtcatctataaaatccaagagtagacggctgaacttgtttagcaaaaacattttaaaatattatttagacggacaattggctcgtctaggtcttgtgttagatgattataaaggagacttgttagttaaaatgataaaccatcttaagtctgtggaggatgtatccgcattcgttcgattttctacagataaaaaccctagtattcttccatcgctaatcaaaactattttagctagttataatatttccatcatcgtcttatttcaaaggtttttgagagataatctatatcatgtagaagaattcttggataaaagcatccatctaaccaagacggataagaaatatatacttcaattgataagacacggtagatcatagaacagaccaaatatattattaataatttgtatatacatagatataattatcacatattaaaaattcacacatttttgataaatgggaactgctgcaacaattcagactcccaccaaattaatgaataaagaaaatgcagaaatgattttggaaaaaattgttgatcatatagttatgtatattagtgacgaatcaagtgattcagaaaataatcctgaatatattgattttcgtaacagatacgaagactatagatctctcattataaaaagtgatcacgagtttgtaaagctatgtaaaaatcatgcagagaaaagttctccagaaacgcaacaaatgattatcaaacacatatacgaacaatatcttattccagtatctgaagtactattaaaacctataatgtccatgggtgacataattacatataacggatgtaaagacaatgaatggatgctagaacaactctctaccctaaactttaacaatctccgcacatggaactcatgtagcataggcaatgtaacgcgtctgttttatacattttttagttatctgatgaaagataaactaaatatataagtataatcccattctaatactttaacctgatgtattacctgcatcttattagaatattaacctaactaaaagacataacataaaaactcattacatagttgataaaaagcggtaggatataaatattatggctgccaccgttccgcgttttgacgacgtgtacaaaaatgcacaaagaagaattctagatcaagaaacattttttagtagaggtctaagtagaccgttaatgaaaaacacatatctatttgataattacgcgtatggatggataccagaaactgcaatttggagtagtagatacgcaaacttagatgcaagtgactattatcccatttcgttgggattacttaaaaagttcgagtttctcatgtctctatataaaggtcctattccagtatacgaagaaaaagtaaatactgaattcatagccaatggatcgttctctggtagatacgtatcatatcttcgaaagttttctgctcttccaacaaacgagtttattagttttttgttactgacttccattccaatctataatatcttgttctggtttaaaaatactcagtttgatattactaaacacacattattcagatacgtctatacagataatgccaaacacctggcgttggctaggtatatgcatcaaacaggagactataagcctttgtttagtcgtctcaaagagaattatatatttaccggtcccgttccaataggtatcaaagatatagatcaccctaatcttagtagagcaagaagtccatccgattatgagacattagctaatattagtactatattgtactttaccaagtatgatccggtattaatgtttttattgttttacgtacctgggtattcaattactacaaaaattactccagccgtagaatatctaatggataaactgaatctaacaaagagcgacgtacaactgttgtaaattattttatgcttcgtaaaatgtaggttttgaaccaaacattctttcaaagaatgagatgcataaaactttattatccaatagattgactatttcggacgtcaatcgtttaaagtaaacttcgtaaaatattctttgatcactgccgagtttaaaacttctatcgataattgtctcatatgttttaatatttacaagttttttggtccatggtacattagccggacaaatatatgcaaaataatatcgttctccaagttctatagtttctggattatttttattatattcagtaaccaaatacatattagggttatctgcggatttataatttgagtgatgcattcgactcaacataaataattctagaggagacgatctactatcaaattcggatcgtaaatctgtttctaaagaacggagaatatctatacatacctgattagaattcatccgtccttcagacaacatctcagacagtctggttttgtacatcttaatcatattcttatgaaacttggaaacatctcttctagtttcactagtacctttattaattctctcaggtacagattttgaattcgacgatgccgagtatttcatcgttgtatatttcttcttcgattgcataatcagattcttatataccgcctcaaactctattttaaaattattaaacaatactctactattaatcagtcgttctaactctttcgctatttctatagacttatctacatcttgactgtctatctctgtaaacacggagtcggtatctccatacacgctacgaaaacgaaatctgtaatctataggcaacgatgttttcacaatcggattaatatctctatcgtccatataaaatggattacttaatggattggcaaaccgtaacataccgttagataactctgctccatttagtaccgattctagatacaagatcattctacgtcctatggatgtgcaactcttagccgaagcgtatgagtatagagcactatttctaaatcccatcagaccatatactgagttggctactatcttgtacgtatattgcatggaatcataaatggccttttcagttgaactggtagcctgttttaacatctttttatatctggctctctctgccaaaaatgttcttaatagtctaggaatggttccttctatcgatctatcgaaaattgctatttcagagatgaggttcggtagtctaggttcacaatgaaccgtaatatatctaggaggtggatatttctgaagcaatagctgattatttatttcttcttccaatctattggtactaacaacgacaccgactaatgtttccggagatagatttccaaagatacacacattaggatacagactgttataatcaaagattaatacattattactaaacattttttgttttggagcaaataccttaccgccttcataaggaaacttttgttttgtttctgatctaactaagatagttttagtttccaacaatagctttaacagtggacccttgatgactgtactcgctctatattcgaataccatggattgaggaagcacatatgttgacgcacccgcgtctgtttttgtttctactccataatactcccacaaatactgacacaaacaagcatcatgaatacagtatctagccatatctaaagctatgtttagattataatccttatacatctgagctaaatcaacgtcatcctttccgaaagataatttatatgtatcattaggtaaagtaggacataatagtacgactttaaatccattttcccaaatatctttacgaattactttacatataatatcctcatcaacagtcacataattacctgtggttaaaacctttgcaaatgcagcggctttgcctttcgcgtccgtagtatcgtcaccgatgaacgtcatttctctaactcctctatttaatactttacccatgcaactgaacgcgttcttggatatagaatccaatttgtacgaatccaatttttcagatttttgaatgaatgaatatagatcgaaaaatatagttccattattgttattaacgtgaaacgtagtattggccatgccgcctactcccttatgactagactgatttctctcataaatacagagatgtacagcttcctttttgtccggagatctaaagataatcttctctcctgttaataactctagacgattagtaatatatctcagatcaaagttatgtccgttaaaggtaacgacgtagtcgaacgttagttccaacaattgtttagctattcgtaacaaaactatttcagaacatagaactagttctcgttcgtaatccatttccattagtgactgtatcctcaaacatcctctatcgacggcttcttgtatttcctgttccgttaacatctcttcattaatgagcgtaaacaataatcgtttaccacttaaatcgatataacagtaacttgtatgcgagattgggttaataaatacagaaggaaacttcttatcgaagtgacactctatatctagaaataagtacgatcttgggatatcgaatctaggtatttttttagcgaaacagttacgtggatcgtcacaatgataacatccattgttaatctttgtcaaatattgctcgtccaacgagtaacatccgtctggagatatcccgttagaaatataaaaccaactaatattgagaaattcatccatggtggcattttgtatgctgcgtttctttggctcttctatcaaccacatatctgcgacggagcattttctatctttaatatctagattataacttattgtctcgtcaatgtctatagttctcatctttcccaacggcctcgcattaaatggaggaggagacaatgactgatatatttcgtccgtcactacgtaataaaagtaatgaggaaatcgtataaatacggtctcaccatttcgacatctggatttcagatataaaaatctgttttcaccgtgactttcaaaccaattaatgcaccgaacatccatttatagaatttagaaatatattttcatttaaatgaatcccaaacattggggaagagccgtatggaccattatttttatagtactttcgcaagcgggtttagacggcaacatagaagcgtgtaaacgaaaactatatactatagtcagcactcttccatgtcctgcatgtagacggcacgcgactatcgctatagaggacaataatgtcatgtctagcgatgatctgaattatatttattattttttcatcagattatttaacaatttggcatctgatcccaaatacgcgatcgatgtgacaaaggttaaccctttataaacttaacccattataaaacttatgattagtcacaactgaaataaccgcgtgattattttttggtataattctacacggcatggtttctgtaactatgaattcaacccccgttacattagtgaaatctttaacaaacagcaagggttcgtcaaagacataaaactcattgtttacaatcgaaatagaccccctatcacacttaaaataaaaaatatccttatcctttaccaccaaataaaattctgattggtcaatgtgaatgtattcacttaacagttccacaaatttatttattaactccgaggcacatacatcgtcggtattttttatggcaaactttactcttccagcatccgtttctaaaaaaatattaacgagttccatttatatcatccaatattattgaaatgacgttgatggacagatgatacaaataagaaggtacggtacctttgtccaccatctcctccaattcatgctctattttgtcattaactttaatgtatgaaaacagtacgccacatgcttccatgacagtgtgtaacactttggatacaaaatgtttgacattagtataattgttcaagactgtcaatctataatagatagtagctataatatattctatgatggtattgaagaagatgacaaccttggcatattgatcatttaacacagacatggtatcaacagatagcttgaatgaaagagaatcagtaattggaataagcgtcttctcgatagagtgtccgtataccaacatgtctgatattttgatgtattccattaaattatttagttttttctttttattttcgttaaacagcatttctgtcaacggaccccaacatcgttgaccgattaagttttgattgatttttccgtgtaatgcgtatctagtcagatcgtatagcctatccaataatccatcatctgtgcgtagatcacatcgtacactttttaattctctatagaagagcgacagacatctggagcaattacagacagcaatttctttattctctacagatgtaagatacttgaagacattcctatgatgatgcagaattttggataacacggtattgatggtatctgttaccataattcctttgatggctgatagtgtcagagcacaagatttccaatctttgacaatttttagcaccattatctttgttttgatatctatatcagacagcatggtgcgtctgacaacacagggattaagacggaaagatgaaatgattctctcaacatcttcaatggataccttgctattttttctggcattatctatatgtgcgagaatatcctctagagaatcagtatcctttttgatgatagtggatctcaatgacatgggacgtctaaaccttcttattttatcaccagattgcatggtgatttgtcttctttcttttatcataatgtaatctctaaattcatcggcaaattgtctatatctaaaatcataatatgagatgtttacctctacaaatatctgttcgtccaatgttagagtatctacatcagttttgtattccaaattaaacatggcaacggatttaattttatattcctctattaagtcctcgtcgataataacagaatgtagataatcatttaatccatcgtacatggttggaagatgcttgttgacaaaatctttaattgtcttgatgaaggtgggactatatctaacatcttgattaataaaatttataacattgtccataggatactttgtaactagttttatacacatctcttcatcggtaagtttagacagaatatcgtgaacaggtggtatattatattcatcagatatacgaagaacaatgtccaaatctatattgtttaatatattatatagatgtagcgtagctcctacaggaatatctttaactaagtcaatgatttcatcaaccgttagatctattttaaagttaatcatataggcattgatttttaaaaggtatgtagccttgactacattctcattaattaaccattccaagtcactgtgtgtaagaagattatattctatcataagcttgactacatttggtcccgataccattaaagaattcttatgatataaggaaacagcttttaggtactcatctactctacaagaattttggagagccttaacgatatcagtgacgtttattatttcaggaggaaaaaacctaacattgagaatgtcggagttaatagcttccagatacagtgattttggcaatagtccgtgtaatccataatccagtaacacgagctggtgcttgctagacaccttttcaatgtttaatttttttgaaataagctttgataaagccttcctcgcaaattccggatacatgaacatgtcggcgacatgattaagtattgttttttcattatttttatattttctcaacaagttctcaataccccaatagatgatagaatatcacccaatgcgtccatgttgtctatttccaacaggtcgctatatccaccaatagaagtttttccaaaaaagattctaggaacagttctaccaccagtaatttgttcaaaatagtcacgcaattcattttcgggtttaaattctttaatatcgacaatttcatacgctcctcttttgaaactaaacttatttagaatatccagtgcatttctacaaaaaggacatgtatacttgacaaaaattgtcactttgttattggccaacctttgttgtacaaattcctcggccattttaatatttaagtgatataaaactatctcgacttatttaactctttagtcgagatatatggacgcagatagctatatgatagccaactacagaaggcaaacgctataaaaaacataattacgacgagcatatttataaatatttttattcagcattacttgatatagtaatattaggcacagtcaaacattcaaccactctcgatacattaactctctcattttctttaacaaattctgcaatatcttcgtaaaaagattcttgaaactttttagaatatctatcgactctagatgaaatagcgttcgtcaacatactatgttttgtatacataaaggcgcccattttaacagtttctagtgacaaaatgctagcgatcctaggatcctttagaatcacatagattgacgattcgtctctcttagtaactctagtaaaataatcatacaatctagtacgcgaaataatattatccttgacttgaggagatctaaacaatctagttttgagaacatcgataagttcatcgggaatgacatacatactatctttaatagaactcttttcatccagttgaatggattcgtccttaaccaactgattaatgagatcttctattttatcattttccagatgatatgtatgtccattaaagttaaattgtgtagcgcttctttttagtctagcagccaatactttaacatcactaatatcgatatacaaaggagatgatttatctatggtattaagaattcgtttttcgacatctgtcaaaaccaattcctttttgcctgtatcatccagttttccatcctttgtaaagaaattattttctactagactattaataagactgataaggattcctccataattgcacaatccaaactttttaacaaaactagactttacaagatctacaggaatgcgtacttcaggtttcttagcttgtgattttttcttttgtggacattttcttgtgaccaactcatctaccatttcattgattttagcagtgaaataagctttcaatgcacgggcactgatactattgaaaacgagttgatcttcaaattccgccatttaagttcaccaaacaacttttaaatacaaatatatcaatagtagtagaataagaactataaaaaaaataataattaaccaataccaaccccaacaaccggtattattagttgatgtgactgttttctcatcacttagaacagatttaacaatttctataaagtctgtcaaatcatcttccggagaccccataaatacaccaaatatagcggcgtacaacttatccatttatacattgaatattggcttttctttatcgctatcttcatcatattcatcatcaatatcaacaagtcccagattacgagccagatcttcttctacattttcagtcattgatacacgttcactatctccagagagtccgataacgttagccaccacttctctatcaatgattagtttcttgagtgcgaatgtaatttttgtttccgttccggatctatagaaaactacaggtgtgataattgccttggccaattgtctttctcttttactgagtgattctagttcaccttctatagatctgagaatggatgattctccagtcgaaacatattctaccatggatccgtttaatttgttgatgaagatggattcatccttaaatgttttctctgtaatagtttccaccgaaagactatgcaaagaatttggaatgcgttccttgtgcttaatgtttccatagacggcttctagaagttgatacaacataggactagccgcggtaacttttatttttagaaagtatccatcgcttctatcttgtttagatttatttttataaagtttagtctctccttccaacataataaaagtggaagtcatttgactagataaactatcagtaagttttatagagatagacgaacaattagcgtattgagaagcatttagtgtaacgtattcgatacattttgcattagatttactaatcgattttgcatactctataacacccgcacaagtctgtagagaatcgctagatgcagtaggtcttggtgaagtttcaactctcttcttgattaccttactcatgattaaacctaaataattgtactttgtaatataatgatatatattttcactttatctcatttgagaataaaaatgtttttgtttaaccactgcatgatgtacagatttcggaatcgcaaaccaccagtggttttattttatccttgtccaatgtgaattgaatgggagcggatgcgggtttcgtacgtagatagtacattcccgtttttagaccgagactccatccgtaaaaatgcatactcgttagtttggaataactcggatctgctatatggatattcatagattgactttgatcgatgaaggctcccctgtctgcagccatttttatgatcgtcttttgtggaatttcccaaatagttttataaactcgcttaatatcttctggaaggtttgtattctgaatggatccaccatctgccataatcctattcttgatctcatcattccataattttctctcggttaaaactctaaggagatgcggattaactacttgaaattctccagacaatactctccgagtgtaaatattactggtatacggttccaccgactcattatttcccaaaatttgagcagttgatgcagtcggcataggtgccaccaataaactatttctaagaccgtatgttctgattttatcttttagaggttcccaattccaaagatccgacggtacaacattccaaagatcatattgtagaataccgttactggcgtacgatcctacatatgtatcgtatggtccttccttctcagctagttcacaactcgcctctaatgcaccgtaataaatggtttcgaagatcttcttatttagatcttgtgcttccaggctatcaaatggataatttaagagaataaacgcgtccgctaatccttgaacaccaataccgataggtctatgtctcttattagagatttcagcttctggaataggataataattaatatctataattttattgagatttctgacaattactttgaccacatccttcagtttgagaaaatcaaatcgcccatctattacaaacatgttcaaggcaacagatgccagattacaaacggctacctcattagcatccgcatattgtattatctcagtgcaaagattactacacttgatagttcctaaattttgttgattactctttttgttacacgcatccttataaagaatgaatggagtaccagtttcaatctgagattctataatcgctttccagacgactcgagcctttattatagatttgtatctcctttctctttcgtatagtgtatacaatcgttcgaactcgtctccccaaacattgtccaatccaggacattcatccggacacatcaacgaccactctccgtcatccttcactcgtttcataaagagatcaggaatccaaagagctataaatagatctctggttctatgttcctcgtttcctgtattctttttaagatcgaggaacgccataatatcagaatgccacggttccaagtatatggccataactccaggccgtttgtttcctccctgatctatgtatctagcggtgttattataaactctcaacattggaataataccgtttgatataccattggtaccggagatatagcttccactggcacgaatattactaattgatagacctattccccctgccattttagagattaatgcgcatcgttttaacgtgtcatagataccctctatgctatcatcgatcatgttaagtagaaaacagctagacatttggtgacgactagttcccgcattaaataaggtaggagaagcgtgcgtaaaccatttttcagaaagtagattgtacgtctcaatagctgagtctatatcccattgatgaattcctactgcgacacgcattaacatgtgctgaggtctttcaacgatcttgttgtttattttcaacaagtaggatttttccaaagttttaaaaccaaaatagttgtatgaaaagtctcgttcgtaaataataaccgagttgagtttatccttatatttgttaactatatccatggtgatacttgaaataatcggagaatgtttcccatttttaggattaacatagttgaataaatcctccatcacttcactaaatagtttttttgtttccttgtgtagatttgatacggctattctggcggctagaatggcataatccggatgttgtgtagtacaagtggctgctatttcggctgccagagtgtccaattctaccgttgttactccattatatattccttgaataaccttcatagctattttaataggatctatatgatccgtgtttaagccataacataattttctaatacgagacgtgattttatcaaacatgacattttccttgtatccatttcgtttaatgacaaacatttttgttggtgtaataaaaaaattatttaacttttcattaatagggatttgacgtatgtagcgtacaaaattatcgttcctggtatatagataaagagtcctatatatttgaaaatcgttacggctcgattaaactttaatgattgcatagtgaatatatcattaggatttaactccttgactatcagggcggcaccagaaattaccatcaaaagcattaatacagttatgccgatcgcagttagaacggttatagcatccaccatttatatctaaaaattagatcaaagaatatgtgacaaagtcctagttgtatactgagaattgacgaaacaatgtttcttacatatttttttcttattagtaactgacttaatagtaggaactggaaagctagacttgattattctataagtatagatacccttccaaataatattctctttgataaaagttccagaaaatgtagaattttttaaaaagttatcttttgctattaccaagattgtgtttagacgcttattattaatatgagtgatgaaatccacaccgcctctagatatcgcttttatttccacattagatggtaaatccaatagtgaaactatctttttaggaatgtatggactcgcgtttagaggagtgaacgtcttaggcgtcggaaaggatgattcatcaaacgaataaacaatttcacaaatggatgttaatgtattagtaggaaattttttgacgctagtggaattgaagattctaatggatgatgttctacctatttcatccgataacatgttaatttccgacaccaacggttttaatatttcgatgatatacggtagtctctctttcggacttatatagcttattccacaatacgagtcattatatactccaaaaaacaaaataactagtataaaatctgtatcgaatgggaaaaacgaaattatcgacataggtatagaatctggaacattgaacgtattaatacttaattctttttctgtggtaagtaccgataggttattgacattgtatggttttaaatattctataacttgagacttgatagatattagtgatgaattgaaaattatttttatcaccacgtgtgtttcaggatcatcgtcgacgcccgtcaaccaaccgaatggagtaaaataaatatcattaatatatgctctagatattagtatttttatcaatcctttgattatcatcttctcgtaggcgaatgattccatgatcaagagtgatttaagaacatcctccggagtattaatgggcttagtaaacagtccatcgttgcaataataaaagttatccaagttaaaggatattatgcattcgtttaaagatatcacctcatctgacggagacaattttttggtaggttttagagactttgaagctacttgtttaacaaagttattcatcgtcgtttactattctatttaattttgtagttaatttatcacatatcacattaattgactttttggtccatttttccatacgtttatattcttttaatcctgcgttatccgtttccgttatatccagggatagatcttgcaagttaaatagaatgctcttaaataatgtcatttttttatccgctaaaaatttaaagaatgtataaacttttttcaaagatttaaaacttttaggtggagttctagtacacaatatcataaacaaactaataaacatcccgcattcagattccaacagctgattaacttccacattaatacagcctattttcgctccaaatgtacattcgaaaaatctgaataaaacatcgatgtcacaatttgtattatccaatacagaatgtctgtgattcgtgttaaaaccatcggagaaggaatagaaataaaaattattatagtggtggaattcagttggaatattgcctccggagtcataaaaggatactaaacattgttttttatcataaattacacatttccaatgagacaaataacaaaatccaaacattacaaatctagaggtagaacttttaattttgtctttaagtatatacgataagatatgtttattcataaacgcgtcaaatttttcatgaatcgctaaggagtttaagaatctcatgtcaaattgtcctatataatccacttcggatccataagcaaactgagagactaagttcttaatacttcgattgctcatccaggctcctctctcaggctctattttcatcttgacgacctttggattttcaccagtatgtattcctttacgtgataaatcatcgattttcaaatccatttgtgagaagtctatcgccttagatactttttcccgtagtcgaggtttaaagaaatacgctaacggtatactagtaggtaactcaaagacatcatatatagaatggtaacgcgtctttaactcgtcggttaactctttcttttgatcgagttcgtcgctactattgggtctgctcaggtgccccgactctactagttccaacatcataccgataggaatacaagacactttgccagcggttgtagatttatcatatttctccactacatatccgttacaatttgttaaaaatttagatacatctatattgctacataatccagctagtgaatatatatgacataataaattggtaaatcctagttctggtattttactaattactaaatctgtatatctttccatttatcatggaaaagaatttaccagatatcttcttttttccaaactgcgttaatgtattctcttacaaatattcacaagatgaattcagtaatatgagtaaaacggaacgtgatagtttctcattggcggtgtttccagttataaaacatagatggcataacgcacacgttgtaaaacataaaggaatatacaaagttagtacagaagcacgtggaaaaaaagtatctcctccatcactaggaaaacccgcacacataaacctaaccgcgaagcaatatatatacagtgaacacacaataagctttgaatgttatagttttctaaaatgtataacaaatacagaaatcaattcgttcgatgagtatatattaagaggactattagaagctggtaatagtttacagatattttccaattccgtaggtaaacgaacagatactataggtgtactagggaataagtatccatttagcaaaattccattggcctcattaactcctaaagcacaacgagagatattttcagcgtggatttctcatagacctgtagttttaactggaggaactggagtgggtaagacgtcacaggtacccaagttattgctttggtttaattatttatttggtggattctctactctagataaaatcactgactttcacgaaagaccagtcattctatctcttcctaggatagctttagttagattgcatagcaataccattttaaaatcattgggatttaaggtactagatggatctcctatttctttacggtacggatctataccggaagaattaataaacaaacaaccaaaaaaatatggaattgtattttctacccataagttatctctaacaaaactatttagttatggcactcttattatagacgaagttcatgagcatgatcaaataggagatattattatagcagtagcgagaaagcatcatacgaaaatagattctatgtttttaatgactgccacgttagaggatgacagggaacggctaaaagtatttttacctaatcccgcatttatacatattcctggagatacactgtttaaaattagcgaggtatttattcataataagataaatccatcttccagaatggcatacatagaagaagaaaagagaaatttagttactgctatacagatgtatactcctcctgatggatcatccggtatagtctttgtggcatccgttgcacagtgtcacgaatataaatcatatttagaaaaaagattaccgtatgatatgtatattattcatggtaaggtcttagatatagacgaaatattagaaaaagtgtattcatcacctaatgtatcgataattatttctactccttatttggaatccagcgttactatacacaatgttacacacatttatgatatgggtagagtttttgtccccgctccttttggaggatcgcaacaatttatttctaaatctatgagagatcaacgaaaaggaagagtaggaagagttaatcctggtacatacgtctatttctatgatctgtcttatatgaagtctatacagcgaatagattcagaatttctacataattatatattgtacgctaataagtttaatctaacactccccgaagatttgtttataatccctacaaatttggatattctatggcgtacaaaggaatatatagactcgttcgatattagtacagaaacatggaataaattattatccaattattatatgaagatgatagagtatgctaaactttatgtactaagtcctattctcgctgaggagttggataactttgagaggacgggagaattaactagtattgtacgagaagccattttatctctaaatttacgaattaagattttaaattttaaacataaagatgatgatacgtatatacacttttgtaaaatattattcggtgtctataacggaacaaacgctactatatattatcatagacctctaacgggatatatgaatatgatttcagatactatatttgttcctgtagataataactaaaaatcaaactctaatgaccacatctttttttagagatgaaaaattttctacatctccttttgtagacacgactaaacattttgcagaaaaaagtttattagtgtttagataatcgtatacttcatcagtgtagatagtaaatgtgaacagataaaaggtattcttgctcaatagattggtaaattccatagaatatattaatcctttcttcttgagatcccacatcatttcaaccagagacgttttatccaatgatttacctcgtactataccacatacaaaactagattttgcagtgacgtcgtacctggtattcctaccaaacaaaattttacttttagttcttttagaaaattctaaggtagaatctctatttgccaatatgtcatctatggaattaccactagcaaaaaatgatagaaatatatattgatacatcgcagctggttttgatctactatactttaaaaacgaatcagattccataattgcctgtatatcatcagctgaaaaactatgttttacacgtattccttcggcatttctttttaatgatatatcttgtttagacaatgataaagttatcatgtccatgagagacgcgtctccgtatcgtataaatatttcattagatgttagacgcttcattaggggtatacttctataaggtttcttaatcagtccatcattggttgcgtcaagaactactatcggatgttgttgggtatctctagtgttacacatggccttactaaagtttgggtaaataactatgatatctctattaattatagatgcatatatttcattcgtcaaggatattagtatcgacttgctatcgtcattaatacgtgtaatgtaatcatataaatcatgcgatagccaaggaaaatttaaatagatgttcatcatataatcgtcgctataattcatattaatacgttgacattgactaatttgtaatatagcctcgccacgaagaaagctctcgtattcagtttcatcgataaaggataccgttaaatataactggttgccgatagtctcatagtctattaagtggtaagtttcgtacaaatacagaatccctaaaatattatctaatgttggattaatctttaccataactgtataaaatggagacggagtcataactattttaccgtttgtacttactggaatagatgaaggaataatctccggacatgctggtaaagacccaaatgtctgtttgaagaaatccaatgttccaggtcctaatctcttaacaaaaattacgatattcgatcccgatatcctttgcattctatttaccagcatatcacgaactatattaagattatctatcatgtctattctcccaccgttatataaatcgcctccgctaagaaacgttagtatatccatacaatggaatacttcatttctaaaatagtattcgttttctaattctttaatgtgaaatcgtatactagaaagggaaaaattatctttgagttttccgttagaaaagaaccacgaaactaatgttctgattgcgtccgattccgttgctgaattaatggatttacaccaaaaactcatataacttctagatgtagaagcattcgctaaaaaattagtagaatcaaaggatataagtagatgttccaacaagtgagcaattcccaagatttcatctatatcattctcgaatccgaaattagaaattcccaagtagatatcctttttcatccgatcgttgatgaaaatacgaactttattcggtaagacaatcatttactaaggagtaaaataggaagtaatgttcgtatgtcgttatcatcgtataaattaaaggtgtgttttttaccattaagtgacattataattttaccaatattggaattataatataggtgtatttgcgcactcgcgacggttgatgcatcggtaaatatagctgtatctaatgttctagtcggtatttcatcatttcgctgtctaataatagcgttttctctatctgtttccattacagctgcctgaagtttattggtcggataatatgtaaaataataagaaatacatacgaataacaaaaataaaataagatataataaagatgccatttagagatctaattttgttcaacttgtccaaattcctacttacagaagatgaggaatcgttggagatagtgtcttccttatgtagaggatttgaaatatcttatgatgacttgataacttactttccagataggaaataccataaatatatttataaagtatttgaacatgtagatttatcggaggaattaagtatggaattccatgatacaactttgcgagatttagtttatcttagattgtacaagtattccaagtgtatacggccgtgttataaattaggagataatctaaaaggcatagttgttataaaggacaggaatatttatattagggaagcaaatgatgacttgatagaatatctcctcaaggaatacactcctcagatttatacatattctaatgagcgcgtccccataactggttcaaaattaattctttgtggattttctcaagttacatttatggcgtatacaacgtcgcatataacaacaaataaaaaggtagatgttctcgtttccaaaaaatgtatagatgaactagtcgatccaataaattatcaaatacttcaaaatttatttgataaaggaagcggaacaataaacaaaatactcaggaagatattttattcggtaaccggtggccaaactccataggtagctttttctatttcggattttagaatttccaaattcaccagcgatttatcggttttggtgaaatccaaggatttattaatgtccacaaatgccatttgttttgtctgtggattgtatttgaaaatggaaacgatgtagttagatagatgcgctgcgaagtttcctattagggttccgcgcttcacgtcacccagcatacttgaatcaccatcctttaaaaaaaatgataagatatcaacatggagtatatcatactcggattttaattcttctactgcatcactgacattttcacaaatactacaatacggtttaccgaaaataatcagtacgttcttcatttatgggtatcaaaaacttaaaatcgttactgctggaaaataaatcactgacgatattagatgataatttatacaaagtatacaatggaatatttgtggatacaatgagtatttatatagccgtcgccaattgtgtcagaaacttagaagagttaactacggtattcataaaatacgtaaacggatgggtaaaaaagggagggcatgtaaccctttttatcgatagaggaagtataaaaattaaacaagacgttagagacaagagacgtaaatattctaaattaaccaaggacagaaaaatgctagaattagaaaagtgtacatccgaaatacaaaatgttaccggatttatggaagaagaaataaaggcaaaaatgcaattaaaaatcgataaacttacatttcaaatatatttatctgattctgataacataaaaatatcattgaatgagatactaacacatttcaacaataatgagaatgttacattattttattgtgatgaacgagacgcagaattcgttatgtgtctcgaggctaaaacacatttctctaccacaggagaatggccgttgataataagtaccgatcaggatactatgctatttgcatctactgataatcatcctaagatgataaaaaacttaactcaactgtttaaatttgttccctcggcagaggataactatttagcaaaattaacggcgttagtgaatggatgtgatttctttcctggactctatggggcatctataacacccaccaacttaaacaaaatacaattgtttagtgattttacaatcgataatatagtcactagtttggcaattaaaaattattatagaaagactaactctaccgtagacgtgcgtaatattgttacgtttataaacgattacgctaatttagacgatgtctactcgtatgttcctccttgtcaatgcactgttcaagaatttatattttccgcattagatgaaaaatggaatgaatttaaatcatcttatttagagaccgttccgttaccctgtcaattaatgtacgcgttagaaccacgtaaggagattgatgtttcagaagttaaaactttatcatcttatatagatttcgaaaatactaaatcagatatcgatgttataaaatctatatcctcgatttttggatattctaacgaaaactgtaacacgatagtattcggcatctataaggataatttactactgagtataaataattcattttactttaacgatagtctgttaataaccaatactaaaagtgataatataataaatataggttactagattaaaaatggtgttccaactcgtgtgctctacatgcggtaaagatatttctcacgaacgatataaattgattatacgaaaaaaatcattaaaggatgtactcgtcagtgtaaagaacgaatgttgtaggttaaaattatctacacaaatagaacctcaacgtaacttaacagtgcaacctctattggatataaactaatatggatccggttaattttatcaagacatatgcgcctagaggttctattatttttattaattataccatgtcattaacaagtcatttgaatccatcgatagaaaaacatgtgggtatttattatggtacgttattatcggaacacttggtagttgaatctacctatagaaaaggagttcgaatagtcccattggatagtttttttgaaggatatcttagtgcaaaagtatacatgttagagaatattcaagttatgaaaatagcagctgatacgtcattaactttattgggtattccgtatggatttggtcatgatagaatgtattgttttaaattggtagctgactgttataaaaatgccggtgttgaaacatcgtctaaacgaatattaggtaaagatatttttctgagccaaaacttcacagacgataatagatggataaagatatatgattctaataatttaacattttggcaaattgattaccttaaagggtgagttaatatgcataactactcctccgttgttttttccctcgttctttttcttaacgttgtttgccatcactctcataatgtaaagatattctaaaatggtaaacttttgcatatcggacgcagaaattggtataaatgttgtaattgtattatttcccgtcaatggactagtcacagctccatcagttttatatcctttagagtatttctcactcgtgtctaacattctagagcattccatgatctgtttatcgttgatattggccggaaagatagattttttattttttattatattactattggcaattgtagatataacttctggtaaatatttttctaccttttcaatctcttctattttcaagccggctatatattctgctatattgttgctagtatcaataccttttcttgctaagaagtcatatgtggtattcactatatcagttttaactggtagttccattagcctttccacttctgcagaataatcagaaattggttctttaccagaaaatccagctactataataggctcaccgatgatcattggcaaaatcctatattgtaccagattaatgagagcatatttcatttccaataattctgctagttcttgagacattgatttatttgatgaatctagttggttctctagatactctaccatttctgccgcatacaataacttgttagataaaatcagggttatcaaagtgtttagcgtggctagaatagtgggcttgcatgtattaaagaatgcggtagtatgagtaaaccgttttaacgaattatatagtctccagaaatctgtggcgttacatacatgagccgaatgacatcgaagattgtccaatatttttaatagctgctctttgtccattatttctatatttgactcgcaacaattgtagataccattaatcactgattcctttttcgatgccggacaatagcacaattgtttagctttggactctatgtattcagaattaatagatatatctcttaatacagattgcactatacattttgaaactatgtcaaaaattgtagaacgacgctgttctgcagccatttaactttaaataatttacaaaaatttaaaatgagcatccgtataaaaatcgataaactgcgccaaattgtggcatatttttcagagttcagtgaagaagtgtctataaatgtagactcgacggatgagttaatgtatatttttgccgccttgggcggatctgtaaacatttgggccattatacctctcagtgcatcagtgttctaccgcggagccgaaaatattgtgtttaatcttccggtgtccaaggtaaaatcgtgtttgtgtagttttcacaatgatgccatcatagatatagaacctgatctggaaaataatctagtaaaactttctagttatcatgtagtaagtgtcgattgtaacaaggaactgatgcctattaggacagatactactatttgtctaagtatagatcaaaagaaatcttacgtgtttaattttcacaagtatgaagaaaaatgttgtggtagaaccgtcattcatttagaatggttgttgggctttatcaagtgtattagtcagcatcagcatttggctattatgtttaaagatgacaatattattatgaagactcctggtaatactgatgcgttttccagggaatattctatgactgaatgttctcaagaactacaaaagttttctttcaaaatagctatctcgtctctcaacaaactacgaggattcaaaaagagagtcaatgtttttgaaactagaatcgtaatggataatgacgataacattctaggaatgttgttttcggatagagttcaatcctttaagatcaacatctttatggcgtttttagattaatactttcaatgagataaatatgggtggcggagtaagtgttgagctccctaaacgggatccgcctccgggagtacccactgatgagatgttattaaacgtggataaaatgcatgacgtgatagctcccgctaagcttttagaatatgtgcatataggaccactagcaaaagataaagaggataaagtaaagaaaagatatccagagtttagattagtcaacacaggacccggtggtctttcggcattgttaagacaatcgtataatggaaccgcacccaattgctgtcgcacttttaatcgtactcattattggaagaaggatggaaagatatcagataagtatgaagagggtgcagtattagaatcgtgttggccagacgttcacgacactggaaaatgcgatgttgatttattcgactggtgtcagggggatacgttcgatagaaacatatgccatcagtggatcggttcagcctttaataggagtgatagaactgtagagggtcaacaatcgttaataaatctgtataataagatgcaaacattatgtagtaaagatgctagtgtaccaatatgtgaatcatttttgcatcatttacgcgcacacaatacagaagatagcaaagagatgatcgattatattctaagacaacagtctgcggactttaaacagaaatatatgagatgtagttatcccactagagataagttagaagagtcattaaaatatgcggaacctcgagaatgttgggatccagagtgttcgaatgccaatgttaatttcttactaacacgtaattataataatttaggactttgcaatattgtacgatgtaatactagcgtgaacaacttacagatggataaaacttcctcattaagattgtcatgtggattaagcaatagtgatagattttctactgttcccgtcaatagagcaaaagtagttcaacataatattaaacattcgttcgacctaaaattgcatttgatcagtttattatctctcttggtaatatggatactaattgtagctatttaaatgggtgccgcggcaagcatacagacgacggtgaatacactcagcgaacgtatctcgtctaaattagaacaagaagcgaacgctagtgctcaaacaaaatgtgatatagaaatcggaaatttttatatccgacaaaaccatggatgtaacctcactgttaaaaatatgtgctctgcggacgcggatgctcagttggatgctgtgttatcagccgctacagaaacatatagtggattaacaccggaacaaaaagcatacgtgccagctatgtttactgctgcgttaaacattcagacaagtgtaaacactgttgttagagattttgaaaattatgtgaaacagacttgtaattctagcgcggtcgtcgataacaaattaaagatacaaaacgtaatcatagatgaatgttacggagccccaggatctccaacaaatttggaatttattaatacaggatctagcaaaggaaattgtgccattaaagcgttgatgcaattgacgactaaggccactactcaaatagcacctagacaagttgctggtacaggagttcagttttatatgattgttatcggtgttataatattggcagcgttgtttatgtactatgccaagcgtatgctgttcacatccaccaatgataaaatcaaacttattttagccaataaggaaaacgtccattggactacttacatggacacattctttagaacttctccgatggttattgctaccacggatatacaaaactgaaaatatattgataatattttaatagattaacatggaagttatcgctgatcgtctagacgatatagtgaaacaaaatatagcggatgaaaaatttgtagattttgttatacacggtctagagcatcaatgtcctgctatacttcgaccattaattaggttgtttattgatatactattatttgttatagtaatttatatttttacggtacgtctagtaagtagaaattatcaaatgttgttggtggcgctagtcatcacattaactattttttattactttatactataatagtactagactgacttctaacaaacatctcacctgccataaataaatgcttgatattaaagtcttctatttctaacactattccatctgtggaaaataatactctgacattatcgctaattgacacatcggtgagtgatatgcctataaagtaataatcttctttgggcacatataccagtgtaccaggttctaacaacctatttactggtgctcctgtagcatactttttctttaccttgagaatatccatcgtttgcttggtcaatagcgatatgtgattttttatcaaccactcgaaaaagtaattggagtgttcatatcctctacgggctattgtctcatggccgtgtatgaaatttaagtaacacgactgtggtagatttgttctatagagccggttgccgcaaatagatagaactaccaatatgtctgtacaaatgttaaacattaattgattaacagaaaaaacaatgttcgttctgggaatagaaaccagatcaaaacaaaattcgttagaatatatgccacgtttatacattgaatataaaataactacagtttgaaaaataacagtatcatttaaacatttaacttgcggggttaatctcacaactttactgtttttaaactgttcaaaatatagcatcgatccatgagaaatacgtttagccgcctttaatagaggaaatcccaccgcctttctggatctcaccaacgacgatagttctgaccagcaactcatttcttcatcatccacctgttttaacatataataggcaggagatagatatccgtcattgcaatattccttctcgtaggcacacaatctaatattgataaaatctccattctcttctctgcatttattatcttgtttcggtggctgattaggctgtagtcttggtttaggctttggtatatcgttgttgaatctattttggtcattaaatctttcatttcttcctggtatatttttatcacctcgtttggttggatttttgtctatattatcgtttgtaacatcggtacgggtattcatttatcacaaaaaaaacttctctaaatgagtctactgctagaaaacctcatcgaagaagataccatattttttgcaggaagtatatctgagtatgatgatttacaaatggttattgccggcgcaaaatccaaatttccaagatctatgctttctatttttaatatagtacctagaacgatgtcaaaatatgagttggagttgattcataacgaaaatatcacaggagcaatgtttaccacaatgtataatataagaaacaatttgggtctaggagatgataaactaactattgaagccattgaaaactatttcttggatcctaacaatgaagttatgcctcttattattaataatacggatatgactgccgtcattcctaaaaaaagtggtaggagaaagaataagaacatggttattttccgtcaaggatcatcacctatcttgtgtattttcgaaactcgtaaaaagattaatatttataaagaaaatatggaatccgcatcgactgagtatacacctatcggagacaacaaggctttgatatctaaatatgcgggaattaatatcctaaatgtgtattctccttccacatccataagattgaatgccatttacggattcaccaataaaaataaactagagaaacttagtactaataaggaactagaatcgtatagttctagccctcttcaagaacccattaggttaaatgattttctgggactattggaatgtgttaaaaagaatattcctctaacagatattccgacaaaggattgattactataaatggagaatgttcctaatgtatactttaatcctgtgtttatagagcccacgtttaaacattctttattaagtgtttataaacacagattaatagttttatttgaagtattcgttgtattcattctaatatatgtattttttagatctgaattaaatatgttcttcatgcctaaacgaaaaatacccgatcctattgatagattacgacgtgctaatctagcgtgtgaagacgataaattaatgatctatggattaccatggatgacaactcaaacatctgcgttatcaataaatagtaaaccgatagtgtataaagattgtgcaaagcttttgcgatcaataaatggatcacaaccagtatctcttaacgatgttcttcgcagatgatgattcattttttaagtatttggctagtcaagatgatgaatcttcattatctgatatattgcaaatcactcaatatctagactttctgttattattattgatccaatcaaaaaataaattagaagccgtgggtcattgttatgaatctctttcagaggaatacagacaattgacaaaattcacagactttcaagattttaaaaaactgtttaacaaggtccctattgttacagatggaagggtcaaacttaataaaggatatttgttcgactttgtgattagtttgatgcgattcaaaaaagaatcctctctagctaccaccgcaatagatcctattagatacatagatcctcgtcgcgatatcgcattttctaacgtgatggatatattaaagtcgaataaagtgaacaataattaattctttattgtcatcatgaacggcggacatattcagttgataatcggccccatgttttcaggtaaaagtacagaattaattagacgagttggtacctgcagcggccgctcgagagctcggaggtaatgatatgtatcaatcggtgtgtagaaagtgttacatcgactcataatattatattttttatctaaaaaactaaaaataaacattgattaaattttaatataatacttaaaaatggatgttgtgtcgttagataaaccgtttatgtattttgaggaaattgataatgagttagattacgaaccagaaagtgcaaatgaggtcgcaaaaaaactaccgtatcaaggacagttaaaactattactaggagaattattttttcttagtaagttacagcgacacggtatattagatggtgccaccgtagtgtatataggatcggctcctggtacacatatacgttatttgagagatcatttctataatttaggagtgatcatcaaatggatgctaattgacggccgccatcatgatcctattttaaatggattgcgtgatgtgactctagtgactcggttcgttgatgaggaatatctacgatccatcaaaaaacaactgcatccttctaagattattttaatttctgatgtaagatccaaacgaggaggaaatgaacctagtacggcggatttactaagtaattacgctctacaaaatgtcatgattagtattttaaaccccgtggcatctagtcttaaatggagatgcccgtttccagatcaatggatcaaggacttttatatcccacacggtaataaaatgttacaaccttttgctccttcatattcagctgaaatgagattattaagtatttataccggtgagaacatgagactgactcgagttaccaaattagacgctgtaaattatgaaaaaaagatgtactaccttaataagatcgtccgtaacaaagtagttgttaactttgattatcctaatcaggaatatgactattttcacatgtactttatgctgaggaccgtgtactgcaataaaacatttcctactactaaagcaaaggtactatttctacaacaatctatatttcgtttcttaaatattccaacaacatcaactgaaaaagttagtcatgaaccaatacaacgtaaaatatctagcaaaaattctatgtctaaaaacagaaatagcaagagatccgtacgcggtaataaatagaaacgtgctactgagatatactaccgatatagagtataatgatttagttactttaataaccgttagacataaaattgattctatgaaaactgtgtttcaggtatttaacgaatcatccataaattatactccggttgatgatgattatggagaaccaatcattataacatcgtatcttcaaaaaggtcataacaagtttcctgtaaattttctatacatagatgtggtaatatctgacttatttcctagctttgttagactagatactacagaaactaatatagttaatagtgtactacaaacaggcgatggtaaaaagactcttcgtcttcccaaaatgttagagacggaaatagttgtcaagattctctatcgccctaatataccattaaaaattgttagatttttccgcaataacatggtaactggagtagagatagccgatagatctgttatttcagtcgctgattaatcaattagtagagatgagataagaacattataataatcaataatattatcttatatctcgtttagaaaaatgctaatattaaaatagctaacgctagtaatccaatcggaagccatttgatatctataatagggtatctaatttcctgattcagatagcggacagctatattctcggtagctactcgtttggaatcacaaacattatttacatctaatttactatctgtaatggaaacgtttcccaatgaaatggtacaatccgatacattgcattttgttatatttttttttaaagaggctggtaacaacgcatcgcttcgtttacatggctcgtaccaacaataatagggtaatcttgtatctattcctatccgtactatgcttttatcaggataaatacatttacatcgtatatcgtctttgttagcatcacagaatgcataaatttgttcgtccgtcatgataaaaatttaaagtgtaaatataactattatttttatagttgtaataaaaagggaaatttgattgtatactttcggttctttaaaagaaactgacttgataaaaatggctgtaatctctaaggttacgtatagtctatatgatcaaaaagagattaatgctacagatattatcattagtcatgttaaaaatgacgacgatatcggtaccgttaaagatggtagactaggtgctatggatggggcattatgtaaaacttgtgggaaaacggaattggaatgtttcggtcactggggtaaagtaagtatttataaaactcatatagttaagcctgaatttatttcagaaattattcgtttactgaatcatatatgtattcactgcggattattgcgttcacgagaaccgtattccgacgatattaacctaaaagagttatcgggacacgctcttaggagattaaaggataaaatattatccaagaaaaagtcatgttggaacagcgaatgtatgcaaccgtatcaaaaaattactttttcaaagaaaaaggtttgtttcgtcaacaagttggatgatattaacgttcctaattctctcatctatcaaaagttaatttctattcatgaaaagttttggccattattagaaattcatcaatatccagctaacttattttatacagactactttcccatccctccgctgattattagaccggctattagtttttggatagatagtatacccaaagagaccaatgaattaacttacttattaggtatgatcgttaagaattgtaacttgaatgctgatgaacaggttatccagaaggcggtaatagaatacgatgatattaaaattatttctaataacactaccagtatcaatttatcatatattacatccggcaaaaataatatgattagaagttatatcgtcgcccgacgaaaagatcagaccgctagatctgtaattggtcccagtacatctatcaccgttaatgaggtaggaatgcccgcatatattagaaatacacttacagaaaagatatttgttaatgcctttacagtggataaagttaaacaactattagcgtcaaaccaagttaaattttactttaataaacgattaaaccaattaacaagaatacgccaaggaaagtttatcaaaaataaaatacatttattgcctggtgattgggtagaagtagctgttcaagaatatacaagtattatttttggaagacagccgtctctacatagatacaacgtcatcgcttcatctatcagagctaccgaaggagatactatcaaaatatctcccggaattgccaactctcaaaatgctgatttcgacggagatgaagaatggatgatattggagcaaaatcctaaagccgtaattgaacaaagtattcttatgtatccgacgacgttactcaaacacgatattcatggagcccccgtttatggatctattcaagatgaaatcgtagcagcgtattcattgtttaggatacaagatctttgtttagatgaagtattgaacatcttggggaaatatggaagagagttcgatcctaaaggtaaatgtaaattcagcggtaaagatatctatacttacttgataggtgaaaagattaattatccgggtctcttaaaggatggtgaaattattgcaaacgacgtagatagtaattttgttgtggctatgaggcatctgtcattggctggactcttatccgatcataagtcgaacgtggaaggtatcaactttattatcaagtcatcttatgtttttaagagatatctatctatttacggttttggggtgacattcaaagatctgagaccaaattcgacgttcactaataaattggaggccatcaacgtagaaaaaatagaacttatcaaagaagcatacgccaaatatctcaacgatgtaagagacgggaaaatagttccattatctaaagctttagaggcggactatgtggaatccatgttatccaacttgacaaatcttaatatccgagagatagaagaacatatgagacaaacgctgatagatgatccagataataacctcctgaaaatggccaaagcgggttataaagtaaatcctacagaactaatgtatattctaggtacgtatggacaacaaaggattgatggtgaaccagcagagactcgagtattgggtagagtcttaccttactatcttccagactctaaggatccagaaggaagaggttacattcttaattctttaacaaaaggattaacgggttctcaatattacttttcgatgctggttgccagatctcaatctactgatatcgtctgtgaaacatcacgtaccggaacactggctagaaaaatcattaaaaagatggaggatatggtggtcgacggatacggacaagtagttataggtaatacgctcatcaagtacgccgccaattataccaaaattctaggctcagtatgtaaacctgtagatcttatctatccagatgagtccatgacttggtatttggaaattagtgctctgtggaataaaataaaacagggattcgtttactctcagaaacagaaacttgcaaagaagacattggcgccgtttaatttcctagtattcgtcaaacccaccactgaggataatgctattaaggttaaggatctgtacgatatgattcataacgtcattgatgatgtgagagagaaatacttctttacggtatctaatatagattttatggagtatatattcttgacgcatcttaatccttctagaattagaattacaaaagaaacggctatcactatctttgaaaagttctatgaaaaactcaattatactctaggtggtggaactcctattggaattatttctgcacaggtattgtctgagaagtttacacaacaagccctgtccagttttcacactactgaaaaaagtggtgccgtcaaacaaaaacttggtttcaacgagtttaataacttgactaatttgagtaagaataagaccgaaattatcactctggtatccgatgatatctctaaacttcaatctgttaagattaatttcgaatttgtatgtttgggagaattaaatccagacatcactcttcgaaaagaaacagataaatatgtagtagatataatagttaatagattatacatcaagagagcagaaataaccgaattagttgtcgaatatatgattgaacgatttatctcctttagcgtcattgtaaaggaatggggtatggagacattcattgaggacgaggataatattagatttactgtctacctaaatttcgttgaaccggaagaattgaatcttagtaagtttatgatggttcttccgggtgccgccaacaagggcaagattagtaaattcaagattcctatctctgattatacgggttatgacgacttcaatcaaacaaaaaagctcaataagatgactgtagaactcatgaatctaaaagaattgggttctttcgatttggaaaacgtcaacgtgtatcctggagtatggaatacatacgatatcttcggtatcgaggccgctcgtgaatacttgtgcgaagccatgttaaacacctatggagaagggttcgattatctgtatcagccttgtgatcttctcgctagtttactatgtgctagttacgaaccagaatcagttaataaattcaagttcggtgcagctagtactcttaagagagctacgttcggagacaataaagcattgttaaacgcggctcttcataaaaagtcagaacctattaacgataatagtagctgccacttttttagcaaggtccctaatataggaactggatattacaaatactttatcgacttgggtcttctcatgagaatggaaaggaaactatctgataagatatcttctcaaaagatcaaggaaatggaagaaacagaagacttttaattcttatcaataacatatttttctatgatctgtcttttaaacgatggattttccacaaatgcgcctctcaagtccctcatagaatgatacacgtataaaaaatatagcataggcaatgactccttatttttagacattagatatgccaaaatcatagccccgcttctatttactcccgcagcacaatgaaccaacacgggctcgtttcgttgatcacatttagataaaaaggcggttacgtcgtcaaaatatttactaatatcggtagttgtatcatctaccaacggtatatgaataatattaatattagagttaggtaatgtatatttatccatcgtcaaatttaaaacatatttgaacttaacttcagatgatggtgcatccatagcatttttataatttcccaaatacacattattggttacccttgtcattatagtgggagatttggctttgtgcatatctccagttgaacgtagtagtaagtatttatacaaacttttcttatccatttataacgtacaaatggataaaactactttatcggtaaacgcgtgtaatttagaatacgttagagaaaaggctatagtaggcgtacaagcagccaaaacatcaacacttatattctttgttattatattggcaattagtgcgctattactctggtttcagacgtctgataatccagtctttaatgaattaacgagatatatgcgaattaaaaatacggttaacgattggaaatcattaacggatagcaaaacaaaattagaaagtgatagaggtagacttctagccgctggtaaggatgatatattcgacttcaaatgtgtggatttcggcgcctattttatagctatgcgattggataagaaaacatatctgccgcaagctattaggcgaggtactggagacgcgtggatggttaaaaaggcggcaaaggtcgatccatctgctcaacaattttgtcagtatttgataaaacacaagtctaataatgttattacttgtggtaatgagatgttaaatgaattaggttatagcggttattttatgtcaccgcattggtgttccgattttagtaatatggaatagtgttagataaatgcggtaacgaatgttcctgtaaggaaccataacagtttagatttaacgttaaagatgagcataaacataataaacaaaattacaatcaaacctataacattaatatcaaacaatccaaaaaatgaaatcagtggagtagtaaacgcgtacataactcctggataacgtttagcagctgccgttcctattctagaccaaaaattcggtttcatgttttcgaagcggtgttctgcaacaagtcggggatcgtgttctacatatttggcggcgttatccagtatctgcctattgatcttcatttcgttttcgattctggctatttcaaaataaaatcccgatgatagacctccagactttataatttcatctacgatgttcagcgccgtagtaactctaataatataggctgataagctaacatcataccctcctgtatatgtgaatatggcatgatttttgtccattacaagctcggttttaactttattgcctgtaataatttctctcatctgtaggatatctatttttttgtcatgcattgccttcaagacgggacgaagaaacgtaatatcctcaataacgttatcgttttctacaataactacatattctacctttttattttctaactcggtaaaaaaattagaatcccatagggctaaatgtctagcgatatttcttttcgtttcctctgtacacatagtgttacaaaaccctgaaaagaagtgagtatacttgtcatcatttctaatgtttcctccagtccactgtataaacgcataatccttgtaatgatctggatcatccttgactaccacaacatttcttttttctggcataacttcgttgtcctttacatcatcgaacttctgatcattaatatgctcatgaacattaggaaatgtttctgatggaggtctatcaataactggcacaacaataacaggagttttcaccgccgccatttagttattgaaattaatcatatacaactctttaatacgagttatattttcgtctatccattgtttcacatttacatatttcgacaaaaagatataaaatgcgtattccaatgcttctctgtttaatgaattactaaaatatacaaacacgtcactgtctggcaataaatgatatcttagaatattgtaacaatttattttgtattgcacatgttcgtgatctatgagttcttcttcgaatggcataggatctccgaatctgaaaacgtataaataggagttagaataataatatttgagagtattggtaatatataaactctttagcggtataattagtttttttctctcaatttctatttttagatgtgatggaaaaatgactaattttgtagcattagtatcatgaactctaatcaaaatcttaatatcttcgtcacacgttagctctttgaagtttttaagagatgcatcagttggttctacagatggagtaggtgcaacaattttttgttctacacatgtatgtactggagccattgttttaactataatggtgcttgtatcgaaaaactttaatgcagatagcggaagctcttcgccgcgactttctacatcgtaattgggttctaacgccgatctctgaatggatactagttttctaagttctaatgtgattctctgaaaatgtaaatccaattcctccggcattatagatgtgtatacatcggtaaataaaactatagtatccaacgatcccttctcgcaaattctagtcttaaccaaaaaatcgtatataaccacggagatggcgtatttaagagtggattcttctaccgttttgttcttggatgtcatataggaaactataaagtccgcactactgttaagaatgattactaacgcaactatatagttcaaattaagcattttggaaacataaaataactctgtagacgatacttgactttcgaataagtttgcagacaaacgaagaaagaacagacctctcttaatttcagaagaaaactttttttcgtattcctgacgtctagagtttatatcaataagaaagttaagaattagtcggttaatgttgtatttcattacccaagtttgagatttcataatattatcaaaagacatgataatattaaagataaagcgctgactatgaacgaaatagctatatggttcgctcaagaatatagtcttgttaaacgtggaaacgataactgtatttttaatcacgtcagcggcatctaaattaaatataggtatatttattccacacactctacaatatgccacaccatcttcataataaataaattcgttagcaaaattattaattttagtgaaatagttagcgtcaactttcatagcttccttcaatctaatttgatgctcacacggtgcgaattccactctaacatcccttttccatgcctcaggttcatcgatctctataatatctagtttcttgcgtttcacaaacacgggctcgtctctcgcgatgagatctgtatagtaactatgtaaatgataactagatagaaagatgtagctatatagatgacgatcctttaagagaggtataataactttaccccaatcagataaactattgttatggtcttcggaaaaagaatttttataaatttttccagtattttccaaatatacgtacttgacatctaaaaaatccttaatgataataggaatggataatccgtctattttataaagaaatacatatcgcacattatacttttttttggaaatgggaataccgatgtgtctacataaatatgcaaagtctaaatattttttagagaatcttagttggtccaaattcttttccaagtacggtaatagatttttcatattgaacggtatcttcttaatctctggttctagttccgcattaaatgatgaaactaagtcactatttttataactaacgattacatcacctctaacatcatcatttaccagaatactgatcttcttttgtcgtaaatacatgtctaatgtgttaaaaaaaagatcatacaagttatacgtcatttcatctgtggtattcttgtcattgaaggataaactcgtactaatctcttctttaacagcctgttcaaatttatatcctatatacgaaaaaatagcaaccagtgtttgatcatccgcgtcaatattctgttctatcgtagtgtataacaatcgtatatcttcttctgtgatagtcgatacgttataaaggttgataacgaaaatatttttatttcgtgaaataaagtcatcgtaggattttggacttatattcgcgtctagtagatatgcttttatttttggaatgatctcaattagaatagtctctttagagtccatttaaagttacaaacaactaggaaattggtttatgatgtataatttttttagtttttatagattctttattctatacttaaaaaatgaaaataaatacaaaggttcttgagggttgtgttaaattgaaagcgagaaataatcataaattatttcattatcgcgatatccgttaagtttgtatcgtaatggcgtggtcaattacaaataaagcggatactagtagcttcacaaagatggctgaaatcagagctcatctaaaaaatagcgctgaaaataaagataaaaacgaggatattttcccggaagatgtaataattccatctactaagcccaaaaccaaacgagccactactcctcgtaaaccagcggctactaaaagatcaaccaaaaaggaggaagtggaagaagaagtagttatagaggaatatcatcaaacaactgaaaaaaattctccatctcctggagtcagcgacattgtagaaagcgtggccgctgtagagctcgatgatagcgacggggatgatgaacctatggtacaagttgaagctggtaaagtaaatcatagtgctagaagcgatctttctgacctaaaggtggctaccgacaatatcgttaaagatcttaagaaaattattactagaatctctgcagtatcgacggttctagaggatgttcaagcagctggtatctctagacaatttacttctatgactaaagctattacaacactatctgatctagtcaccgagggaaaatctaaagttgttcgtaaaaaagttaaaacttgtaagaagtaaatgcgtgcacttttttataaagatggtaaactctttaccgataataattttttaaatcctgtatcagacgataatccagcgtatgaggttttgcaacatgttaaaattcctactcatttaacagatgtagtagtatatgaacaaacgtgggaggaggcgttaactagattaatttttgtgggaagcgattcaaaaggacgtagacaatacttttacggaaaaatgcatgtacagaatcgcaacgctaaaagagatcgtatttttgttagagtatataacgttatgaaacgaattaattgttttataaacaaaaatataaagaaatcgtccacagattccaattatcagttggcggtttttatgttaatggaaactatgttttttattagatttggtaaaatgaaatatcttaaggagaatgaaacagtagggttattaacactaaaaaataaacacatagaaataagtcccgatgaaatagttatcaagtttgtaggaaaggacaaagtttcacatgaatttgttgttcataagtctaatagactatataagccgctattgaaactgacggatgattctagtcccgaagaatttctgttcaacaaactaagtgaacgaaaggtatacgaatgtatcaaacagtttggtattagaatcaaggatctccgaacgtatggagtcaattatacgtttttatataatttttggacaaatgtaaagtccatatctcctcttccatcaccaaaaaagttaatagcgttaactatcaaacaaactgctgaagtggtaggtcatactccatcaatttcaaaaagagcttacatggcaacgactattttagaaatggtaaaggataaaaattttttagatgtagtatctaaaactacgttcgatgaattcctatctatagtcgtagatcacgttaaatcatctacggatggatgatatagatctttacacaaataattacaagaccgataaatggaaatggataagcgtatgaaatctctcgcaatgacagctttcttcggagagctaaacacattagatattatggcattgataatgtctatatttaaacgccatccaaacaataccattttttcagtggataaggatggtcagtttatgattgatttcgaatacgataattataaggcttctcaatatttggatctgaccctcactccgatatctggagatgaatgcaagactcacgcatcgagtatagccgaacaattggcgtgtgtggatattattaaagaggatattagcgaatatatcaaaactactccccgtcttaaacgatttataaaaaaataccgcaatagatcagatactcgtatcagtcgagatacagaaaagcttaaaatagctctagctaaaggcatagattacgaatatataaaagacgcttgttaataagtaaatgaaaaaaaactagtcgtttataataaaacacaatatggatgccaacatagtatcatcttctactattgcaacgtatatagacgctttagcaaagaatgcttcagaattagaacagaggtctaccgcatacgaaataaataatgaattggaactagtatttattaagccgccattaattactttgacaaatgtagtgaatatctctacgattcaggaatcgtttattcgatttaccgttactaataaggaaggtgtcaaaattagaactaagattccattatctaaggtacatggtctagatgtaaaaaatgtacagttagtagatgctatagataacatagtttgggaaaagaaatcattagtgacggaaaatcgtcttcacaaagaatgcttgttgagactatcgacagaggaacgtcatatatttttggattacaagaaatatggatcctctatccgactagaattagtcaatcttattcaagcaaaaacaaaaaactttacgatagactttaagctaaaatattttctaggatccggtgcccaatctaaaagttctttgttgcacgctattaatcatccaaagtcaaggcctaatacatctctggaaatagaattcacacctagagacaatgaaaaagttccatatgatgaactaataaaggaattgacgactctatcacgtcatatatttatggcttctccagagaatgtaattctttctccgcctattaacgcacctataaagacttttatgttgcctaaacaagatatagtaggtctggatctggaaaatctatatgccgtaactaagactgacggcattcctataactatcagagttacatcaaacgggttgtattgttattttacacatcttgggtatattattagatatccagttaagagaataatagattccgaagtagtagtctttggtgaggcagttaaggataagaactggaccgtatatctcattaagctaatagagcctgtgaatgcaatcaatgatagactagaagaaagtaagtatgttgaatctaaactagtggatatttgtgatcggatagtattcaagtcaaagaaatatgaaggtccgtttactacaactagtgaagtcgtcgatatgttatctacatatttaccaaagcaaccagaaggtgttattctgttctattcaaagggacctaaatctaacattgattttaaaattaaaaaggaaaatactatagaccaaactgcaaatgtagtatttaggtacatgtccagtgaaccaattatctttggagaatcgtctatctttgtagagtataagaaatttagcaacgataaaggctttcctaaagaatatggttctggtaagattgtgttatataacggcgttaattatctaaataatatctattgtttggaatatattaatacacataatgaagtgggtattaagtccgtggttgtacctattaagtttatagcagaattcttagttaatggagaaatacttaaacctagaatcgataaaaccatgaaatatattaactcagaagattattatggaaatcaacataatatcatagtcgaacatttaagagatcaaagcatcaaaataggagatatctttaacgaggataaactatcggatgtgggacatcaatacgccaataatgataaatttagattaaatccagaagttagttattttacgaataaacgaactagaggaccgttgggaattttatcaaactacgtcaagactcttcttatttctatgtattgttccaaaacatttttagacgattccaacaaacgaaaggtattggcgattgattttggaaacggtgctgacctggaaaaatacttttatggagagattgcgttattggtagcgacggatccggatgctgatgctatagctagaggaaatgaaagatacaacaaattaaactctggaattaaaaccaagtactacaaatttgactacattcaggaaactattcgatccgatacatttgtctctagtgtcagagaagtattctattttggaaagtttaatatcatcgactggcagtttgctatccattattcttttcatccgagacattatgctaccgtcatgaataacttatccgaactaactgcttctggaggcaaggtattaatcactaccatggacggagacaaattatcaaaattaacagataaaaagacttttataattcataagaatttacctagtagcgaaaactatatgtctgtagaaaaaatagctgatgatagaatagtggtatataatccatcaacaatgtctactccaatgactgaatacattatcaaaaagaacgatatagtcagagtgtttaacgaatacggatttgttcttgtagataacgttgatttcgctacaattatagaacgaagtaaaaagtttattaatggcgcatctacaatggaagatagaccgtctacaaaaaactttttcgaactaaatagaggagccattaaatgtgaaggtttagatgtcgaagacttacttagttactatgttgtttatgtcttttctaagcggtaaataataatatggtatgggttctgatatccccgttctaaatgcattaaataattccaatagagcgatttttgttcctataggaccttccaactgtggatactctgtattgttaatagatatattaatacttttgtcgggtaacagaggttctacgtcttctaaaaataaaagtttgataacatctggcctgttcataaataaaaacttggcgattctatatatactcttattatcaaatctagccattgtcttatagatgtgagctactgtaggtgtaccatttgattttctttctaatactatatatttctctcgaagaagttcttgcacatcatctgggaataaaatactactgttgagtaaatcagttattttttttatatcgatattgatggacatttttatagttaaggataataagtatcccaaagtcgataacgacgataacgaagtatttatacttttaggaaatcacaatgactttatcagatcaaaattaacaaaattaaaggagcatgtatttttttctgaatatattgtgactccagatacatatggatctttatgcgtcgaattaaatgggtctagttttcagcacggtggtagatatatagaggtggaggaatttatagatgctggaagacaagttagatggtgttctacatccaatcatatatctgaagatatacccgaagatatacacactgataaatttgtcatttatgatatatacacttttgacgctttcaagaataaacgattggtattcgtacaggtacctccgtcgttaggagatgatagctatttgactaatccgttattgtctccgtattatcgtaattcagtagccagacaaatggtcaatgatatgatttttaatcaagattcatttttaaaatatttattagaacatctgattagaagccactatagagtttctaaacatataacaatagttagatacaaggataccgaagaattaaatctaacgagaatatgttataatagagataagtttaaggcgtttgtattcgcttggtttaacggcgtttcggaaaatgaaaaggtactagatacgtataaaaaggtatctaatttgatataatgaattcagtgactgtatcacacgcgccatatactattacttatcacgatgattgggaaccagtaatgagtcaattggtagagttttataacgaagtagccagttggctgctacgagacgagacgtcgcctattcctgataagttctttatacagttgaaacaaccgcttagaaataaacgagtatgtgtgtgcggtatagatccgtatccgaaagatggaactggtgtaccgttcgaatcaccaaattttacaaaaaaatcaattaaggagatagcttcatctatatctagattaaccggagtaattgattataaaggttataaccttaatataatagacggggttataccctggaattattacttaagttgtaaattaggagaaacaaaaagtcacgcgatctactgggataagatttccaagttactgctgcagcatataactaaacacgttagtgttctttattgtttgggtaaaacagatttctcgaatatacgggcaaagttagaatccccggtaactaccatagtgggatatcatccagcggctagagaccgtcaattcgagaaagatcgatcatttgaaattatcaacgttttactggaattagacaacaaggtacctataaattgggctcaagggtttatttattaatgctttagtgaaattttaacttgtgttctaaatggatgcggctattagaggtaatgatgttatctttgttcttaagactataggtgtcccgtcagcgtgcagacaaaatgaagatccaagatttgtagaagcatttaaatgcgacgagttagaaagatatattgagaataatccagaatgtacactattcgaaagtcttagggatgaggaagcatactctatagtcagaattttcatggatgtagatttagacgcgtgtctagacgaaatagattatttaacggctattcaagattttattatcgaggtgtcaaactgtgtagctagattcgcgtttacagaatgcggcgccattcatgaaaatgtaataaaatccatgagatctaatttttcattgactaagtctacaaatagagataaaacaagttttcatattatctttttagacacgtataccactatggatacattgatagctatgaaacgaacactattagaattaagtagatcatctgaaaatccactaacaagatcgatagacactgccgtatataggagaaaaacaactcttcgggttgtaggtactaggaaaaatccaaattgcgacactattcatgtaatgcaaccacctcatgataatatagaagattacctattcacttacgtggatatgaacaacaatagttattacttttctctacaacgacgattggaggatttagttcctgataagttatgggaaccagggtttatttcattcgaagacgctataaaaagagtttcaaaaatattcattaattctataataaactttaatgatctcgatgaaaataattttacaacggtaccactggtcatagattacgtaacaccttgtgcattatgtaaaaaacgatcgcataaacatccgcatcaactatcgttggaaaatggtgctattagaatttacaaaactggtaatccacatagttgtaaagttaaaattgttccgttggatggtaataaactgtttaatattgcacaaagaattttagacactaactctgttttattaaccgaacgaggagaccatatagtttggattaataattcatggaaatttaacagcgaagaacccttgataacaaaactaattttgtcaataagacatcaactacctaaggaatattcaagcgaattactctgtccaagaaaacgaaagactgtagaagctaacatacgagacatgttagtagattcagtggagaccgatacctatccggataaacttccgtttaaaaatggtgtattggacctggtagacggaatgttttactctggagatgatgctaaaaaatatatgtgtactgtatcaaccggatttaaatttgacgatacaaagttcgtcgaagacagtccagaaatggaagagttaatgaatatcattaacgatatccaaccattaacggatgaaaataagaaaaatagagagctatatgaaaaaacattatctagttgtttatgcggtgctaccaaaggatgtttaacattcttttttggagaaactgcaactggaaagtcgacaaccaaacgtttgttaaagtctgctatcggtgacctgtttgttgagacgggtcaaacaattttaacagatgtattggataaaggacctaatccatttatcgctaacatgcatttgaaaagatctgtattctgtagcgaactacctgattttgcatgtagtgggtcaaagaaaatcagatctgataatattaaaaagttgacagaaccttgtgtcattggaagaccgtgtttctccaataaaattaataatagaaaccatgcgacaatcattatcgatactaattacaaacctgtttttgataggatagataacgcattaatgagaagaattgccgtcgtgcgattcagaacacacttttctcaaccttctggtagagaggctgctgaaaataatgacgcgtacgataaagtcaaactattagacgaggggttagatggtaaaatacaaaataatagatatagattcgcatttctatacttgttggtgaaatggtacagaaaatatcatgttcctattatgaaactatatcctacacccgaagagattcctgactttgcattctatctcaaaataggtactctgttggtatctagctctgtaaagcatattccattaatgacggacctctccaaaaagggatatatattgtacgataatgtggtcactcttccgttgactactttccaacagaaaatatccaagtattttaattctagactatttggacacgatatagagagcttcatcaatagacataagaaatttgccaatgttagtgatgaatatctgcaatatatattcatagaggatatttcatctccgtaaatatatgctcatatatttatagaagatatcacatatctaaatgaataccggaattatagatttatttgataatcatgttgatagtataccaactatattacctcatcagttagctactctagattatctagttagaactatcatagatgagaacagaagcgtgttattgttccatattatgggatcaggtaaaacaataatcgctttgttgttcgccttggtagcttccagatttaaaaaggtttacattctagtgccgaacatcaacatcttaaaaattttcaattataatatgggtgtagctatgaacttgtttaatgacgaattcatagctgagaatatctttattcattccacaacaagtttttattctcttaattataacgataacgtcattaattataacggattatctcgctacaataactctatttttatcgttgatgaggcacataatatctttgggaataatactggagaacttatgaccgtgataaaaaataaaaacaagattccttttctactattgtctggatctcccattactaacacacctaatactctgggtcatattatagatttaatgtccgaagagacgatagattttggtgaaattattagtcgtggtaagaaagtaattcagacacttcttaacgaacgcggtgtgaatgtacttaaggatttgcttaaaggaagaatatcatattacgaaatgcctgataaagatctaccaacgataagatatcacggacgtaagtttctagatactagagtagtatattgtcacatgtctaaacttcaagagagagattatatgattactagacgacagctatgttatcatgaaatgtttgataaaaatatgtataacgtgtcaatggcagtattgggacaacttaatctgatgaataatttagatactttatttcaggaacaggataaggaattgtacccaaatctgaaaataaataatggcgtgttatacggagaagaattggtaacgttaaacattagttccaaatttaaatactttattaatcggatacagacactcaacggaaaacattttatatacttttctaattctacatatggcggattggtaattaaatatatcatgctcagtaatggatattctgaatataatggttctcagggaactaatccacatatgataaacggcaaaccaaaaacatttgctatcgttactagtaaaatgaaatcgtctttagaggatctattagatgtgtataattctcctgaaaacgatgatggtagtcaattgatgtttttgttttcatcaaacattatgtccgaatcctatactctaaaagaggtaaggcatatttggtttatgactatcccagatactttttctcaatacaaccaaattcttggacgatctattagaaaattctcttacgccgatatttctgaaccagttaatgtatatcttttagccgccgtatattccgatttcaatgacgaagtgacgtcattaaacgattacacacaggatgaattaattaatgttttaccatttgacatcaaaaagctgttatatctaaaatttaagacgaaagaaacgaatagaatatactctattcttcaagagatgtctgaaacgtattctcttccaccacatccatcaattgtaaaagttttattgggagaattggtcagacaatttttttataataattctcgtattaagtataacgataccaagttacttaaaatggttacatcagttataaaaaataaagaagacgctaggaattacatagatgatattgtaaacggtcacttctttgtatcgaataaagtatttgataaatctcttttatacaaatacgaaaacgatattattacagtaccgtttagactttcctacgaaccatttgtttggggagttaactttcgtaaagaatataacgtggtatcttctccataaaactgatgagatatataaagaaataaatgtcgagctttgttaccaatggataccttccagttacattggagccacacgagctgacgttagacataaaaactaatattaggaatgccgtatataagacgtatctccatagagaaattagtggtaaaatggccaagaaaatagaaattcgtgaagacgtggaattacctctcggcgaaatagttaataattctgtagttataaacgttccgtgtgtaataacctacgcgtattatcacgttggggatatagttagaggaacattaaacatcgaagatgaatcaaatgtaactattcaatgtggagatttaatctgtaaactaagtagagattcgggtactgtatcatttagcgattcaaagtactgcttttttcgaaatggtaatgcgtatgacaatggcagcgaagtcactgccgttctaatggaggctcaacaaggtatcgaatctagttttgtttttctcgcgaatatcgtcgactcataagaaagagaatagcggtaagtataaacacgaatactatggcaataattgcgaatgttttattcccttcgatatatttttgataatatgaaaaacatgtctctctcaaatcggacaaccatctcataaaatagttatctcgcgctggcgaggtggttgccgctcgtataatctccccagaataatatacttgcgtgtcgtcgttcaatttatacggatttctatagttctctgttatataatgcggttttccatcatgattagacgacgacaatagtgttctaaatttagatagttgatcagaatgaatgtttattggcgttggaaaaattatccatgctgcgtctgcagagtggttgatagttgttcctagatatgtaaaataatccaacgtactaggtagcaaattgtctagataaaatactgaatcaaacggcgcagacgtattagcggatctaatggaatccaattgattgactatcttttgaaaatatacatttttatgatccgatacttgtaagaatatagaaataatgataagtccatcatcgtgtttttttgcctcttcataagaactatattttttcttattccaatgaacaagattaatctctccagagtatttgtacacatctatcaagtgattggatccataatcgtcttcctttccccaatatatatgtagtgatgataacacatattcattggggagaaaccctccacttatatatcctcctttaaaattaatccttactagttttccagtgttctggatagtggttggtttcgactcattataatgtatgtctaacggcttcaatcgcgcgttagaaattgcttttttagtttctatattaataggagatagttgttgcggcatagtaaaaatgaaatgataactgtttaaaaatagctcttagtatgggaattacaatggatgaggaagtgatatttgaaactcctagagaattaatatctattaaacgaataaaagatattccaagatcaaaagacacgcatgtgtttgctgcgtgtataacaagtgacggatatccgttaataggagctagaagaacttcattcgcgttccaggcgatattatctcaacaaaattcagattctatctttagagtatccactaaactattacggtttatgtactacaatgaactaagagaaatctttagacggttgagaaaaggttctatcaacaatatcgatcctcactttgaagagttaatattattgggtggtaaactagataaaaaggaatctattaaagattgtttaagaagagaattaaaagaggaaagtgatgaacgtataacagtaaaagaatttggaaatgtaattctaaaacttacaacacgggataaattatttaataaagtatatataggttattgcatggcgtgttttattaatcaatcgttggaggatttatcgcatactagtatttacaatgtagaaattagaaagattaaatcattaaatgattgtattaacgacgataaatacgaatatctgtcttatatttataatatgctagttaatagtaaatgaacttttacagatctagtataattagtcagattattaagtataatagacgactagctaagtctattatttgcaaggatgactctcaaattattacactcacggcattcgttaaccaatgcctatggtgtcataaacgagtatccgtgtccgctattttattaactactgataacaaaatattagtatgtaacagacgagatagttttctctattctgaaataattagaactagaaacatgtttagaaagaaacgattatttctgaattattccaattatttgtccaaacaggaaagaagtatactatcgtcatttttttctctatatccagctactgctgataatgatagaatagacgctatttatccgggtggcatacccaaaaggggtgagaatgttccagagtgtctatccagggaaatcaaagaagaagttaatatagacaattcttttgtattcatagacactcggttttttattcatggtatcatagaagataccattatcaacaaattttttgaggtaattttctttgtcggaagaatatctctaacgagtgatcaaattattgatacctttaaaagtaatcatgaaatcaaggatctaatatttttagatccgaattcaggtaatggactccaatacgaaattgcaaaatatgctctagatactgcaaaacttaaatgttacggccatagaggatgttattatgaatcattaaaaaaattaactgaggatgattgattagaaaatataaattaatttaccatcgtgtatttttataacgggattgtccggcatatcatgtagatagttaccgtctacatcgtatactcgaccatctacgcctttaaatcctctatttattgacattaatctattagaattggaataccaaatattagtaccctcaattagtttattggtaatattttttttagacgatagatcgatggctcttgaaaccaaggttttccaaccggactcattgtcgatcggtgagaagtctttttcattagcatgaatccattctaatgatgtatgtttaaacactctaaacaattggacaaattcttttgatttgctttgaatgatttcaaataggtcttcgtctacagtaggcataccattagataatctagccattataaagtgcacgtttacatatctacgttctggaggagtaagaacgtgactattgagacgaatggctcttcctactatctgacgaagagacgcctcgttccatgtcatatctaaaatgaagatatcattaattgagaaaaaactaataccctcgcctccactagaagagaatacgcatgttttaatgcattctccgttagtgtttgattcttggttaaactcagccaccgccttgattctagtatcttttgttctagatgagaactctatattagagataccaaagactttgaaatatagtaataagatttctattcctgactgattaacaaatggttcaaagactagacatttaccatgggatgctaatattcccaaacatacatctataaatttgacgcttttctcttttaattcagtaaatagagagatatcagccgcactagcatcccctttcaatagttctccctttttaaaggtatttaatgcggatttagaaaactctctatctcttaatgaatttttaaaatcattatatagtgttgctatctcttgcgcgtattcgccgggatcacgattttgtctttcaggaaagctatcgaacgtaaacgtagtagccatacgtctcagaattctaaatgatgatataccagtttttatttctgcgagtttagccttttgataaatctcttcttgcttttttgacatattaacgtatcgcattaatactgttttcttagcgaatgatgcagacccttctacgttatcaaaaatagaaaactcgttattaactatgtacgaacataggcctcctagtttggagactaattctttttcatcgactagacgtttattctcaaatagtgattggtgttgtaaggatcctggtcgtagtaagttaaccaacatggtgaattcttgcacactattgacgataggtgtagccgataaacaaatcatcttatggttttttaatgcgatggtcttggataaaaaattatatactgaacgagtaggacggatcttaccatcttctttgattaatgatttagaaatgaagttatgacattcatcaataatgacgcatattctactcttggaattaatagttttgatattagtaaaaaatttatttctaaaattttgatcatcgtaattaataaaaatacaatccttcgttatctctggagcgtatctgagtatagtgttcatccaaggatcttctatcaaagcctttttcaccaataagataatagcccaattcgtataaatatccttaagatgtttgagaatatatacagtagtcattgttttaccgacacccgtttcatggaacaataaaagagaatgcatactgtctaatcctaagaaaactcttgctacaaaatgttgataatccttgaggcgtactacgtccgaccccatcatttcaacgggcatattagtagttctgcgtaaggcataatcgatataggccgcgtgtgatttactcatttatgagtgataagtaataactatgttttaaaaatcacagcagtagtttaactagtcttctctgatgtttgttttcgatactttttgaatcagaagtcatactagaataaagcaacgagtgaacgtaatagagagcttcgtatactctattcgaaaactctaagaacttattaatgaattccgtatccactggattgtttaaaatactaaattgaacactgttcacatccttccaagaagaagacttagtgacggacttaacatgagacataaataaatccaaattttttttacaaacatcactagccaccataatggcgctatctttcaaccagctatcgcttacgcattttagcagtctaacatttttaaagagactacaatatattctcatagtatcgattacacctctaccgaataaagttggaagtttaataatacaatatttttcgtttacaaaatcaaataatggtcgaaacacgtcgaaggttaacatcttataatcgctaatgtatagattgttttcagtgagatgattattagatttaatagcatctcgttcacgtttgaacagtttattgcgtgcgctgaggtcggcaactacggcgtccgctttagtactcctcccataatactttacgctattaatctttaaaatttcatagactttatctagatcgctttctggtaacatgatatcatgtgtaaaaagttttaacatgtcggtcggcattctatttagatcattaactctagaaatctgaagaaagtaattagctccgtattccagactaggtaatgggcttttacctagagacagattaagttctggcaatgtttcataaaatggaagaaggacatgcgttccctcccggatattttttacaatttcatccatttacaactctatagtttgttttcattattattagttattatctcccataatcttggtaatacttaccccttgatcgtaagataccttatacaggtcattacatacaactaccaattgtttttgtacataatagattggatggttgacatccatggtggaataaactactcgaacagatagtttatctttccccctagatacattggccgtaatagttgtcggcctaaagaatatctttggtgtaaagttaaaagttagggttcttgttccattattgctttttgtcagtagttcattataaattctcgagatgggtccgttctctgaatatagaacatcatttccaaatctaacttctagtctagaaataatatcggtcttattcttaaaatctattcccttgatgaagggatcgttaatgaacaaatccttggcctttgattcggctgatctattatctccgttatagacgttacgttgactagtccaaagacttacaggaatagatgtatcgatgatgttgatactatgtgatatgtgagcaaagattgttctcttagtggcatcactatatgttccagtaatggcggaaaactttttagaaatgttatatataaaagaattttttcgtgttccaaacattagcagattagtatgaagataaacactcatattatcaggaacattatcaatttttacatacacatcagcatcttgaatagaaacgataccatcttctggaacctcaacaatctcggcagactccggataaccagtcggtggaccatcgctaacaataactagatcatccaacaatctactcacatatgcatctatataatctttttcatcttgtgagtaccctggatacgaaataaatttattatccgtatttccataataaggtttagtataaacagagagcgatgttgccgcatgaacttcagttacagtcgccgttggttggtttatttgacctattactctcctaggtttctctataaacgatggtttaatttgtacattcttaaccatatatccaataaagctcaattcaggaacataaacaaattctttgttgaacgtttcaaagtcgaacgaagagtcacgaataacgatatcggatactggattgaaggttaccgttacggtaatttttgaatcggatagtttaagactgctgaatgtatcttccacatcaaacggagttttaatataaacgtatactgtagatggttctttaatagtgtcattaggagttaggccaatagaaatatcattaagttcactagaatatccagagtgtttcaaagcaattgtattattgatacaattattatataattcttcgccctcaatttcccaaataacaccgttacacgaagagatagatacgtgattaatacatttatatccaacatatggtacgtaaccgaatcttcccatacctttaacttctggaagttccaaactcagaaccaaatgattaagcgcagtaatatactgatccctaatttcgaagctagcgatagcctgattgtctggaccatcgtttgtcataactccggatagagaaatatattgcggcatatataaagttggaatttgactatcgactgcgaagacattagaccgtttaatagagtcatccccaccgatcaaagaattaatgatagtattattcattttctatttaaaatggaaaaagcttacaataaactccgtagagaaatatctataatttgtgagttttccttaaagtaacagcttccgtaaacgccgtctttatctcttagtaagtttattgtatttataaccttttccttatcttcatagaatactaaaggcaacaaagaaatttttggttcttctctaagagctacgtgagacttaaccatagaagccaacgaatccctacatattttagaacagaaataccctacttcaccacccttgtatgtctcaatactaataggtctaaaaaccaaatcttgattacaaaaccaacacttatcaattacactatttgtcttaatagacacatctgccatagatttataatactttggtagtatacaagcgagtgcttcttctttagcgggcttaaagactgctttaggtgctgaaataaccacatctggaaggcttactcgcttagccatttaattacggaactatttttttatacttctaatgagcaagtagaaaacctctcatctacaaaaacatactcgtgtccataatcctctaccatagttacacgttttttagatctcatatgtgctaaaaagttttcccatactaattggttactattatttttcgtataatttttaacagtttgaggttttagatttttagttacagaagtgatatcgaatattttatccaaaaagaatgaataattaattgtcttagaaggagtgttttcttggcaaaagaataccaagtgcttaaatatttctactacttcattaatcttttctgtactcagattcagtttctcatcttttacttgattgattatttcaaagactaacttataatcctttttatttattctctcgttagccttaagaaaactagatacaaaatttgcatctacatcatccgtggatatttgatttttttccatgatatccaagagttccgagataatttctccagaacattgatgagacaataatctccgcaatacatttctcaaatgaataagtttattagacacgtggaagtttgactttttttgtacctttgtacatttttgaaataccgactcgcaaaaaatacaatattcatatccttgttcagatactataccgttgtgtctacaaccgctacataatcgtagattcatgttaacactctacgtatctcgtcgtccaatattttatataaaaacattttatttctagacgttgccagaaaatcctgtaatacttttagttttttgggctgtgaataaagtatcgccctaatatggttaccgtcctccgccaatatagtagttaaattatccgcacatgcaaaagaacaccgcttaggcggattcagtacaatgttatatttttcgtaccaactcatttaaatatcataatctaaaatagttctgtaatatgtctagcgctaatatattgatcataatcctgtgcataaattaagatacaacaatgtctcgaaatcatcgacatggcttcttccatagttagaagatcgtcgtcaaagttagcaacgtgattcatcaacatttgctgttttgaggcagcaaatactgaaccgtcgccattcaaccattcataaaaaccatcgtctgaatccattgataatttcttgtactggtttttgagagctcgcatcaatctagcatttctagctcccggattgaaaacagaaagaggatcgtacatccagggtccattttctgtaaatagaatcgtataatgtcccttcaagaagatatcagacgatccacaatcaaagaattggtctccgagtttgtaacaaactgcggactttaacctatacatgataccgtttagcataatttctggtgatacgtcaatcggagtatcatctattagagatctaaagccggtgtaacattctccaccaaacatattcttattctgacgtcgttctacataaaacatcattgctccattaacgataacaggggaatgaacagcactacccatcacattagttcccaatggatcaatgtgtgtaactccagaacatcttccatagcctatgttaggaggagcgaacaccactcttccactattgccatcgaatgccatagaataaatatccttggaattgatagaaatcggactgtcggatgttgtgatcatcttcataggattaacaacgatgtatggtgccgcctgaagtttcatatcgtaactgatgccgttcataggtctagccacagaaaccaacgtaggtctaaatccaactatagacaaaatagaagccaatatctgttcctcatctgtcataacttgagagcatccagtatgaataatcttcattagatggggatctaccgcatcatcatcgttacaataaaaaattcccattctaatgttcataattgcttttctaatcatggtatgcatgtttgctctctgaatctctgtggaaattagatctgatacacctgtaatcactatcggattatcctccgtaagacgattaaccaacaacatataattataagactttacttttctaaattcataaagttgctggattaggctataggtgtctccatgtacatacgcgttctcgagcgcaggaagtttaataccgaatagtgccatcagaataggatgaatatagtaattagtttctggttttctataaataaaagacaaatcttgtgaactagacatatcggtaaaatgcatggattggaatcgtgtagtcgacagaagaatatgatgattagatggagagtatattttatctaactctttgagttggtcaccgattctaggactagctcgagaatgaataagtactaaaggatgagtacatttcacagaaacactagcattgttcaatgtgctctttacatgggtaaggagttgaaatagctcgtttctatttgttctgacaatatttagtttattcataatgttaagcatatcctgaatagtaaagttagatgtgtcatacttgttagtagttagatatttagcaattgcattcccatcatttctcaatctcgtactccaatcatgcgtggatgctacttcgtcgatggaaaccatacaatcctttttgataggctgttgagattgattatttcctgcacgtttaggtttggtacgttgatttctagcccctgcggatataaagtcatcgtctacaatttgggacaatgaattgcatacactacaagacaaagatttatcagaagtgtgaatatgatcttcatctaccaaagaaagagtttgattagtataactagattttagtcctgcgttagatgttaaaaaaacatcgctattgaccacggcttccattatttatattcgtagtttttactcgaaagcgtgattttaatatccaatcttattacttttggaatcgttcaaaacctttgactagttgtagaatttgatctattgccctacgcgtatactcccttgcatcatatacgttcgtcaccagatcgtttgtttcggcctgaagttggtgcatatctttttcaacactcgacatgagatccttaagggccatatcgtctagattttgttgagatgctgctcctggatttggattttgttgtgctgttgtacatactgtaccaccagtaggtgtaggagtacatacagtggccacaataggaggttgaggaggtgtaaccgttggagtagtacaagaaatatttccatccgattgttgtgtacatgtagttgttggtaacgtctgagaaggttgggtagatggcggtgtcgtcgtcttttgatctttattaaatttagagataatatcctgaacagcattgctcggcgtcaacgctggaaggagtgaactcgccggcgcatcagtatctgcagacagccaatcaaaaagattagacatatcagatgatgtattagtttgttgtcgtggttttggtgtaggagcagtactactaggtagaagaataggagccgatgtaggtgtcggaaccggctgtggagttatatgaatagttggttgtagcggttggataggctgtctgctggcggccatcatattatctctagctagttgttctcgcaactgtctttgataatacgactcttgagactttagtcctatttcaatcgcttcatcctttttcgtatccggatccttttcttcagaataatagattgacgactttggtgtagaggattctgccagcccctgtgagaacttgttaaagaagtccatttaaggctttaaaattgaattgcgattataagattaaatggcagacacagacgatattatcgactatgaatccgatgatctcactgaatacgaggatgatgaagaagaggaagaagatggagagtcactagaaactagtgatatagatcccaaatcttcttataagattgtagaatcagcatccactcatatagaagatgcgcattccaatcttaaacatatagggaatcatatatctgctcttaaacgacgctatactagacgtataagtctatttgaaatagcgggtataatagcagaaagctataacttgcttcaacgaggaagattacctctagtttcagaattttctgacgaaacgatgaagcaaaatatgctacatgtaattatacaagagatagaggagggttcttgtcctatagtcatcgaaaagaacggagaattgttgtcggtaaacgattttgacaaagatggtctaaaattccatctagactatattatcaaaatttggaaacttcaaaaacgatattagaatttatacgaatatcgttctctaaatgtcacaatcaagtctcgcatgttcagcaatttattgtcgtactttatatcgtgttcattaacgatatcttgcaaaatagtaatgattctatcttccttcgatagatattcttcagagattattgtcttatattctttcttgttatcagatatgaatttgataagactttgaacattattgatacccgtctgtttaattttttctacagatattttagttttggcagattctatcgtatctgtcaatagacatccaacatcgacattcgacgtcaattgtctataaatcaacgtataaattttagaaataacattagcgaattgttgtgcattgatgtcgttattctgaaacagtatgattttaggtagcattttcttaacaaagagaacgtatttattgttactcagttgaacagatgatatatccagattactaacgcatctgattccgtataccaaactttcagaagaaatggtatacaattgtttgtattcattcaatgtctctttttcagaaattagtttagagtcgaatactgcaataattttcaagagatagttttcatcagataagattttatttagtgtagatatgataaaactattgttttgttggagaacttgatacgccgcgttctctgtagtcgacgctctcaaatgggaaacgatctccattatttttttggaatcggatactatatcttcggtatcttgacgcagtctagtatacatagagttaagagagattagagtttgtacattaagcaacatgtctctaaatgtggctacaaacttttccttttccacatcatctagtttattatataccgatttcacaacggcaccagatttaaggaaccagaatgaaaaactctgataactacaatatttcatcatagttacgattttatcatcttctatagttggtgtaatagcgcatacctttttctccaagactggaaccaacgtcataaaaatgtttaaatcaaaatccatatcaacatctgatgcgctaagaccagtctcgcgttcaagattatctttactaatggtgacgaactcatcgtatagaactctaagtttgtccattatttatttacagatttagttgtttaatttatttgtgctcttccagagttgggatagtatttttctaacgtcggtattatattattaggatctacgttcatatgtatcataatattaatcatccacgttttgataaatctatctttagcttctgaaataacgtatttaaacaaaggagaaaaatatttagctacggcatcagacgcaataacattttttgtaaatgtaacgtatttagacgacagatcttcgttaaaaagttttccatctatgtagaatccatcagttgttaacaccattcccgcgtcagattgaataggagtttgaatagtttgttttggaaatagatccttcaataacttatagttgggtgggaaaaaatcgattttatcactagactctttcttttttactatcattacctcatgaactatttcttgaatgagtatatgtattttctttcctatatcggacgcgttcattggaaaatataccatgtcgttaactataagaatatttttatcctcgtttacaaactgaataatatcagatgtagttcgtaaacgaactatatcatcaccagcacaacatctaactatatgatatccactagtttcctttagtcgtttattatcttgttccatattagcagtcattccatcatttaagaaggcgtcaaagataatagggagaaatgacattttggattctgttacaactttaccaaaattaaggatatacggacttactatctttttctcaacgtcaatttgatgaacacacgatgaaaatgtacttcgatgagattgatcatgtagaaaacaacaagggatacaatatttccgcatatcatgaaatatattaagaaatcccaccttattatatttccccaaaggatccatgcacgtaaacattatgccgttatcattaataaagacttctttctcatcggatctgtaaaagttgttactgatttttttcattccaggatctagataattaataatgatgggttttctattcttattctttgtattttggcatatcctagaccagtaaacagtttccactttggtaaaatcagcagacttttgaacgctattaaacatggcattaatggcaataactaaaaatgtaaaatatttttctatgttaggaatatggtttttcactttaatagatatatggtttttggccaaaatgatagatatttttttatccgaggatagtaaaatattattagtcgccgtctctataaaaatgaagctagtctcgatatccaattttattctagaattgataggagtcgccaaatgtaccttatacgttatatctcccttgatgcgttccatttgtgtatctatatcggacacaagatctgtaaatagttttacgttattaatcatcacggtatcgccgtcgctagataatgctaatgtaccatccaagtcccaaatggagagatttaactgttcatcgtttagaataaaatgattaccggtcatattaataaagtgttcatcgtatctagataacaacgacttataattaatgtccaagtcttgaactcgctgaatgatcttttttaacccagttagttttagattggtacgaaatatattgttaaactttgattctacagtaatgtccaaatctagttgtggaaatacttccatcaacattgtttcaaacttgataatattattatctacatcttcatacgatccaaattccggaatagatgtatcacatgctcttgccacccagataaccaaaaagtcacacgctccaggatatacattgtataaaaagctatcgtttttaagtagggtttttttctgcgtgtatacgaagggattaaaaatagtattatcaacgtaactatattccaaattattcttatgagaatagataataatatcgtccttaatatctaacaaatttcctaaatatccctttaattgagtcattcgaagcgtcaatagaatatgtctcttaactatttccggctgttgtatatttaaatgacttcgtaaaaaataatatatgggcgacttctcatctatgtaatcatatggagtgagatatagggctcgttctacctcctgccccttacccacctgtaataccaattgcggacttactatatatcgcatatttatatcgtggggtaaagtgaaaatctactaccgatgatgtaagtcttacaatgttcgaaccagtaccagatcttaatttggaggcctccgtagaactaggggaggtaaatatagatcaaacaacacctatgataaaggaaaatagcggttttatatcccgtagtagacgtctattcgcccatagatctaaggatgatgagagaaaactagcactacgattctttttacaaagactttattttttagatcatagagagattcattatttgttcagatgcgttgacgctgtaaaagacgtcactattaccaaaaaaaataacattatcgtggcgccttatatagcacttttaactatcgcatcaaaaggatgcaaacttacagaaacaatgattgaagcattctttccagaactatataatgaacatagtaagaaatttaaattcaactctcaagtatccatcatccaagaaaaactcggataccagtttggaaactatcacgtttatgattttgaaccgtattactctacagtagctctggctattcgagatgaacattcatctggcatttttaatatccgtcaagagagttatctggtaagttcattatctgaaataacatatagattttatctaattaatctaaaatctgatcttgttcaatggagtgctagtacgggcgctgtaattaatcaaatggtaaatactgtattgattacagtgtatgaaaagttacaactggtcatagaaaatgattcacaatttacatgttcattggctgtggaatcagaacttccaataaaattacttaaagatagaaatgaattatttacaaaattcatcaacgagttaaaaaagaccagttcattcaagataagcaaacgcgataaggatacgctactaaaatattttacttaggactggagttagaatttatagacgactcatttcgtttatcattattactaccatcattattagtattcttcttgttatcttgttcagaaatatacagcaatgctatgcctaatactaaatacattatcatgcttgcaatggctctaacaacgacgaaccaaaatgaatttggtcgtagcttttgttcacaaaaatacataaagaaatgtctacataaatctatggcgccattggctacttgaaatagcgccagtcctcctacagattttaatatagctgtataacatgacatttattcatcatcaaaagagacagagtcaccatctgtcatatttagattttttttcatgtgttcaaagtatcctctactcatttcattataatagtttatcatacttagaattttaggacggatcaatgagtaagacttgactagatcgtcagtagtaatttgtgcatcgtctattctgcatccgcttcgtcgaataatgtatagcatcgctttgagattctccatagctatcaagtctttatacaatgacatggaaatatctgtgaatactttatacttctccaacatcgatgccttaacatcatcgcctactttagcattgaaaatacgttctattgtgtagatggatgtagcaagatttttaaacaacaatgccatcttacacgatgattgcctcaagtctccaatcgtttgtttagaacgattagctacagagttcaacgcttggctgactagcatattattatctttagaaattgtattcttcaatgaagcgtttatcatatctgtgatttcgttagtcatattacagtctgactgggttgtaatgttatccaacatatcacctatggatacggtacacgtaccagcatttgtaataatcctatctaagatgttgtatggcattgcgcagaaaatatcttctcctgtaatatctccactctcgataaatctactcagattattcttaaatgccttattctctggagaaaagatatcagtgtccatcatttcattaatagtatacgcagaaaagataccacgagtatcaattctatccaagatacttatcggttccgagtcacagataatggtttcctctccttcgggagatcctgcatagaaatatctaggacaatagtttctatactgtctgtaactctgataatctctaaagtcactaactgataccatgaaattgagaagatcaaacgctgaagtaatcaatttttctgcctcgtttttactacaactagttttcatcaatgtagtgacgatgtattgtttagttactcttggtctaatactgatgatagagatattattacttcccataatggatcttctagtagtcaccttaaagcccattgatgcaaatagcagatagataaagtcttggtatgactcctttctaatatagtacggactacctttgtcacccaactttatacccacataagccataacaacctctttaatagccgtttcatgaggtttatcagccatgagcctgagtagttggaagaatctcatgaatcccgtctcagaaagtcctatatgcatgatagatttatctttcctgggaaactctcgtatagtcatagatgaaatactcttcaaagtttctgaaataagattagtaacagtcttacctccgactactctgggtaacaaacatactctaataggtgttttctctgcggagataatatcagaaaggatagagcaataagtagtattattgtgattataaagaccgaatacataacaggtagaatttataaacatcatgtcctgaaggtttttagacttgtattcctcgtaatccataccgtcccaaaacatggatttggtaactttgatagccgtagatctttgttccttcgccaacaggttaaagaaattaataaagaatttgttgtttctatttatgtccacaaattgcacgtttggaagcgtaactgttacgttcactgcagcattttgaggatcgcgagtatgaagtacgatgttattgtttactggtatatctggaaagaaatctaccagtctaggaataagagattgatatcgcatagaaatagtaaagtttataatctcatcatcgaagagcattttgttaccattgtaataaatatccactctgtcatatgtataaatgaagtactgttcaaacatgatgagatgtttatatgttggcatagtagtgagatcgacgtttggtaatggcaatgtattaagattaactccataatgtctagcagcatctgcgatgttataagtgtcgtcaaagcggggtcgatcttgtgctgttatatattgtctaacacctataagattatcaaaatcttgtctgcttaatacaccgttaacaatttttgccttgaattcttttattggtgcattaataacatccttatagaggatgttaaacaaataagtgttatcaaagttaagatctggatatttcttttctgctagaacatccattgagtcggagccatctggtttaatataaccaccgataaatctagctctgtattctgtatccgtcaatctaatattaagaaggtgttgagtgaaaggtggaagatcgtaaaagctgtgagtattaatgataggattagtttccgaactaatgttaattggggtattaataatatctatatttccagcgttaagtgtaacattaaacagttttaattcacgtgacgtggtatcaattaaataattaatgcccaatttggatatagcagcctgaagctcatcttgtttagttacggatcctaatgagttattaagcaatatatcgaacggatgaacgaaggttgttttaagttggtcacatactttgtaatctagacatagatgcggaagaacggtagaaactatacgaaataaatattcagagtcctctaattgatcaagagtaactattgacttaataggcatcatttatttagtattaaatgacgaccgtaccagtgacggatatacaaaacgatttaattacagagttttcagaagataattatccatctaacaaaaattatgaaataactcttcgtcaaatgtctattctaactcacgttaacaacgtggtagatagagaacataatgccgccgtagtgtcatctccagaggaaatatcctcacaacttaatgaagatctatttccagatgatgattcaccggccactattatcgaacgagtacaacctcatactactattattgacgatactccacctcctacttttcgtagagagttattaatatcggaacaacgtcaacaacgagaaaaaagatttaatattacagtatcgaaaaatgctgaagcaataatggaatctagatctatgataacttctatgccaacacaaacaccatccttgggagtagtttatgataaagataaaagaattcagatgttagaggatgaagtggttaatcttagaaatcaacgatctaatacaaaatcatctgataatttagataattttaccaaaatactatttggtaagactccgtataaatcaacagaagttaataagcgtatagccatcgttaattatgcaaatttgaacgggtcccccttatcagttgaggacttggatgtttgttcggaggatgaaatagatagaatctataaaacgattaaacaatatcacgaaagtagaaaacgaaaaattatcgtcactaacgtgattattattgtcataaacattatcgagcaggcattgctaaaactcggatttgaagaaatcaaaggactgagtaccgatatcacttcagaaattatcgatgtggagatcggagatgactgcgatgctgtagcatctaaactaggaatcggtaacagtccggttcttaatattgtattgtttatactcaagatattcgttaaacgaattaaaattatttaatttaatacattcccatatccagacaacaatcgtctggattaatctgttcctgtcgtctcataccggacgacatattaatctttttattagtaggcatctttttagatggtttctttttcccagcattaactgagtcgatacctagaagatcgtgattgatctctccgaccattccacgaacttctaattggccgtctctgacggtaccataaactattttaccagcattagtaacagcttggacaatctgaccatccattgcgttgaatgatgtagttgctgttgttctacgtttaggagcaccagaagtatttttggagcccttggaggctgatgtagaagaagacgaggattttgatttacatgtaatacattttgtactctttgattttgtatcacatgcgccggcagtcacatttgtttgagaattaagattattgttgcctcctttgacggctgcatctccaccgatttgcgctagtagatttttaagctgtggtgtaatcttattaactgtttcgatataatcatcgtaactgcttctaacggctaaattttttttatccgccatttagaagctaaaaatatttttatttatgcagaagatttaactagattatacaatgaactaatatgatccttttccagattatttacaaacttggtattttttggttctggaggaggcgaatttaaattcggacttggattcggattttgtgagttcttgatcttattatacatcgagtataggatggcgacggtaactgctacgcaaataccgatcaacaaaagaataccaatcatttattgacaataacttcactattgatcaagtatgcaatatatcatcttttcactaaataagtagtaataatgattcaacaatgtcgagatatatggacgataataatttagttcatggaaatatcgctatgattggtatgaatgactccgctaactctgtggggtgcgcagtgctttccccacatagaataaattagcattccgactgtgataataataccaagtataaacgccataatactcaatactttccatgtacgagtgggactggtagacttactaaagtcaataaaggcgaagatacacgaaagaatcaaaagaatgattccagcgattagcacgccggaaaaataatttccaatcataagcatcatgtccatttaactaataaaaattttaaatcgccgaatgaacaaagtggaatataaaccatataaaaacaatagtttgtactgcaaaaataatatctatttttgttttcgaagatatggtaaaattaaatagtagtacacagcatgttataactaacagcagcaacggctcgtaattacttatcatttactagacgaaaaggtggtgggatattttcttgctcaaataatacgaatatatcacccatccattttatgcgatgtttatatactctaatctttaatagatctatagacgacgggtttaccaacaatatagattttatcgattcatctaatttaaacccttccttaaacgtgaatgatctattatctggcataacgatgactctacctgatgaatcggacaatgtactgggccatgtagaataaattatcaacgaattatcgtctacgaacatttatatcatttgttttaattttaggacgcgaataaatggatataaaatagaaaataacagatattacaaccaatgttatggccgcgcccaaccaggtaggcagttttattttatcttttactacaggttctcctggatgtacgtcaccaacggcggacgtagttctagtacaattagacgtaagttctgcttgggaattttttaacgctaaagagttaacgttaatcgtgcacccaacgtatttacatctagttctttgaacatcttgattataatataaccattttctatctctagattcgtcggtgcactcatgtaaccaacataccctaggtcctaaatatttatctccggaattagattttggataattcgcgcaccaacaatttctatttcctttatgatcgttacaaaagacgtataatgccgtatccccaaaagtaaaataatcaggacgaataattctaataaactcagaacaatatctcgcatccatatgtttggagcaaatatcggaataagtagacatagccggtttccgttttgcacgtaaccattctaaacaattggggtttccaggatcgtttctacaaaatccagtcatgaaatcatcacaatgttctgtcttgtaattattattaaatatttttggacagtgtttggtatttgtcttagaacaacattttgccacgctatcactatcgcccaggagataatccttttttataaaatgacatcgttgcccggatgctatataatcagtggcgtgttttaaatccttaatatattcaggagttacctcgttctgataatagattaatgatccaggacgaaatttgaaagaactacatggttctccatgaattaatacatattgtttagcaaattcaggaactataaaactactacaatgatctatcgacataccatctatcaaacaaaacttgggtttaatttctcccggagatgtttcataatagtacgtataactttcttctgcaaacttaacagctctattatattcaggataattaaaacctaattccatatatttgtctcgtatatctgctattcctggtgctattttaattctattaagagtaacggctgcccccattcttaataatcgtcagtatttaaactgttaaatgttggtatatcaacatctaccttatttcccgcagtataaggtttgttgcaggtatactgttcaggaatggttacatttatacttcttctatagtcctgtctttcgatgttcatcacatatgcaaagaacagaataaacaaaataatgtaagaaataatattaaatatctgtgaattcgtaaatacattgattgccataataattacagcagctacaatacatacaatagacattcccacagtgttgccattacctccacgatacatttgagttactaagcaataggtaataactaagctagtaagaggcaatagaaaagatgagataaatatcatcaatatagagattagaggagggctatatagagccaagacgaacaaaatcaaaccgagtaacgttctaacatcattatttttgaagattcccaaataatcattcattcctccataatcgttttgcattatacctccatctttaggcataaacgattgctgctgttcctctgtaaataaatctttatcaagcactccagcacccgcagagaagtcgtcaagcatattgtaatatcttaaataactcatttatatattaaaaaatgtcactattaaagatggagtataatctttatgccgaactaaaaaaaatgacttgtggtcaacccctaagtctttttaacgaagacggggatttcgtagaagttgaaccgggatcatcctttaagtttctgatacctaagggattttacgcctctccttccgtaaagacgagtctagtattcgagacattaacaacgaccgataataaaatcactagtatcaatccaacaaatgcgccaaagttatatcctcttcaacgcaaagtcgtatctgaagtagtttctaatatgaggaaaatgatcgaatcaaaacgtcctctatacattactcttcacttggcgtgtggatttggtaagactattaccacgtgttatcttatggctacacacggtagaaaaaccgtcatttgcgtacccaataaaatgttaatacatcaatggaagacacaggtagaggcagtcggattggaacataagatatctatagatggagtaagtagtctattaaaggaactaaagactcaaagtccggatgtattaatagtagtcagtagacatctgacaaacgatgccttttgtaaatatatcaataagcattatgatttgttcatcttggatgaatcacatacgtataatctgatgaacaatacagcagttacaagatttttagcgtattatcctccgatgatgtgttattttttaactgctacacctagaccagctaaccgaatttattgtaacagtattattaatattgccaagttatccgatctaaaaaaaactatctatgcggtagatagtttttttgagccatattccacagacaatattagacatatggtaaaacgactagatggaccatctaataaatatcatatatatactgagaagttattatctgtagacgagcctagaaatcaacttattcttgataccctggtagaagaattcaagtcaggaactattaatcgaattttagttattactaaactacgtgaacatatggtattcttctacaaacgattattagattttttcggatcagaggttgtatttataggagacgcccaaaatagacgtactccagatatggtcaaatcaatcaaggaactaaatagatttatattcgtatccaccttattttattccggtactggtttagatattcctagtttggattcgttgttcatttgctcggcagtaatcaacaatatgcaaatagagcaattactagggagggtatgtcgagaaacagaactattagataggacggtatatgtatttcctaacacatccatcaaagaaataaagtacatgataggaaatttcatgcaacgaattattagtctgtctgtagataaactaggatttaaacaaaaaagttatcggaaacatcaagaatccgatcccacttctgtatgtacaacatcctccagagaagaacgtgtattaaatagaatatttaactcgcaaaatcgttaagaagtttaagcgacgatccgcatgctgcgcaggccagtgtattacccctcatagtattaatataatccaatgatacttttgtgatgtcggaaatcttaaccaatttagactgacaggcagaacacgtcatgcaatcatcatcgtcatcgataactgtagtcttgggcttctttttgcggctcttcattccggaacgcacattggtgctatccatttaggtagtaaaaaataagtcagaatatgccctatagcacgatcgtgcaaaacctggtatatcgtctctatctttatcacaatatagtgtatcgacatttttattattattgacctcgtttatcttggaacatggaatgggaacatttttgttatcaacggccatctttgccttaattccagatgttgtaaaattataactaaacagtctatcatcgacacaaatgaaattcttgtttagacgtttgtagtttacgtatgcggctcgttcgcgtctcattttttcagatattgcaggtactataatattaaaaataagaatgaaataacataggattaaaaataaagttatcatgacttctagcgctgatttaactaacttaaaagaattacttagtctgtacaaaagtttgaaattttcagattctgcggctatagaaaagtataattctttggtagaatggggaacatctacttactggaaaataggcgtgcaaaaggtagctaatgtcgagacgtcaatatctgattattatgatgaggtaaaaaataaaccgtttaatattgatccgggatattacattttcttaccggtatattttggaagcgtctttatttattcgaagggtaaaaatatggtagaacttggatctggaaactcttttcaaataccagatgatatgcgaagtgcgtgtaacaaagtattagacagcgataacggaatagactttctgagatttgttttgttaaacaatagatggataatggaagatgctatatcaaaatatcagtctccagttaatatatttaaactagctagtgagtacggattaaacatacccaaatatttagaaattgaaatagaggaagacacattatttgacgacgagttatactctattatagaacgctctttcgatgataaatttccaaaaatatccatatcgtatattaagttgggagaacttagacggcaagttgtagactttttcaaattctcgttcatgtatattgagtccatcaaggtagatcgtataggagataatatttttattcctagcgttataacaaaatcaggaaaaaagatattagtaaaagatgtagaccatttaatacgatccaaggttagagaacatacatttgtaaaagtaaaaaagaaaaacacattttccattttatacgactatgatggaaacggaacagaaactagaggagaagtaataaaacgaattatagacactataggacgagactattatgttaacggaaagtatttctctaaggttggtagtgcaggcttaaagcaattgactaataaattagatattaatgagtgcgcaactgtcgatgagttagttgatgagattaataaatccggaactgtaaaacgaaaaataaaaaaccaatcagcatttgatttaagcagagaatgtttgggatatccagaagcggattttataacgttagttaataacatgcggttcaaaatagaaaattgtaaggttgtaaatttcaatattgaaaatactaattgtttaaataacccgagtattgaaactatatatggaaactttaaccagttcgtctcaatctttaatatcgtcaccgatgtcaaaaaaagattattcgagtgaaataatatgcgcctttgatataggtgcaaaaaatcctgccagaactgttttagaagtcaaggataactccgttagggtattggatatatcaaaattagactggagttctgattgggaaaggcgcatagctaaagatttgtcacaatatgaatacactacagttcttctagaacgtcagcctagaaggtcgccgtacgtcaaatttatctattttattaaaggctttttatatcatacatcggctgccaaagttatttgcgtctcgcctgtcatgtctggtaattcatatagagatcgaaaaaagagatcggtcgaagcatttcttgattggatggacacattcggattgcgagactccgttccggatagacgcaaattagacgatgtagcggatagtttcaatttggctatgagatacgtattagataaatggaatactaattatacaccttataataggtgtaaatctagaaattacataaaaaaaatgtaataacgttagtaacgccattatggataatctatttacctttctacatgaaatagaagatagatatgccagaactatttttaactttcatctaataagttgcgatgaaataggagatatatatggtcttatgaaagaacgcatttcctcagaggatatgtttgataatatagtgtataataaagatatacatcatgccattaagaaactagtgtattgcgacatccaacttactaaacacattattaatcagaatacgtatccggtatttaacgattcttcacaagtgaaatgttgtcattatttcgacataaactcagataatagcaatattagctctcgtacagtagagatatttgagagggaaaagtcatctcttgtatcatatattaaaactaccaataagaagagaaaggtcaattacggcgaaataaagaaaactgttcatggaggcactaatgcaaattacttttccggtaaaaagtctgacgagtatctgagtactacagttagatccaacattaatcaaccttggatcaaaaccatctctaagaggatgagagttgatatcattaatcactctatagtaacgcgtggaaaaagctctatattacaaactatagaaattatttttactaatagaacatgtgtgaaaatattcaaggattctactatgcacattattctatccaaggacaaggatgaaaaggggtgtatacacatgattgacaaattattctatgtctattataatttatttctgttgttcgaggatatcatccaaaacgagtactttaaagaagtagctaatgttgtaaaccacgtacttacggctacggcattagatgagaaattattcctaattaagaaaatggctgaacacgatgtttatggagttagcaatttcaaaatagggatgtttaacctgacatttattaagtcgttggatcataccgttttcccctctctgttagatgaggatagcaaaataaagttttttaaggggaaaaagctcaatattgtagcattacgatctctggaggattgtataaattacgtgactaaatccgagaatatgatagaaatgatgaaggaaagatcgactattttaaatagcatagatatagaaacggaatcggtagatcgtctaaaagaattgcttctaaaatgaaaaaaaacactgattcagaaatggatcaacgactcggatataagtttttggtgcctgatcctaaagccggagttttttatagaccgttacatttccaatatgtatcgtattctaattttatattgcatcgattgcatgaaatcttgaccgtcaagcggccactcttatcgtttaagaataatacagaacgaattatgatagaaattagcaatgttaaagtgactcctccagattactcacctataatcgcgagtattaaaggtaagagttatgacgcattagccacgttcactgtaaatatctttaaagaggtaatgaccaaagagggtatatccatcactaaaataagtagttatgagggaaaagattctcatttgataaaaattccgctactaataggatacgggaataaaaatccacttgatacagccaagtatcttgttcctaatgtcataggtggagtctttatcaataaacaatctgtcgaaaaagtaggaattaatctagtagaaaagattacaacatggccaaaatttagggttgttaagccaaactcattcactttctcgttttcctccgtatcccctcctaatgtattaccgacaagatatcgccattacaagatatctctggatatatcacaattggaagcgtcgaatatatcatcgacaaagacatttataacggtcaatattgttttgctgtctcaatatttatctagagtgagtctagaattcattagacgtagcttatcatacgatatgcctccagaagttgtctatctagtaaacgcgataatagatagtgctaaacgaattactgaatctattactgactttaatattgatacatacattaatgacctggtggaagctgaacacattaaacaaaaatctcagttaacgatcaacgagttcaaatatgaaatgctgcataactttttacctcatatgaactatacacccgatcaactaaagggattttatatgatatctttactaagaaagtttctctactgtatctaccacacttctagatatccagatagagattcgatggtttgtcatcgtatactaacatacggcaaatattttgagacgttggcacatgatgaattagagaattacataggcaacatccgaaacgatatcatgaacaatcacaagaacagaggcacttacgcggtaaacattcatgtactaacaactcctggacttaatcatgcattttctagtctattgagtggaaagttcaaaaagtcagacggtagttatcgaacacatcctcactattcatggatgcagaatatttctattcctaggagtgttggattttatccggatcaagtaaagatttcaaagatgttttctgtcagaaaataccatccaagtcaatatctttacttttgttcatcagacgttccggaaagaggtcctcaggtaggtttagtatctcaattgtctgtcttgagttccattacaaatatactaacgtctgagtatttggatttggaaaagaaaatttgtgagtatatcagatcatattataaagatgatataagttactttgaaacaggatttccaatcactatagaaaatgctctagtcgcatctcttaatccaaatatgatatgtgattttgtaactgactttagacgtagaaaacggatgggattcttcggtaacttggaggtaggtattactttagttagggatcacatgaatgaaattcgcattaatattggagcgggaagattagtcagaccattcttggttgtggataacggagagctcatgatggatgtgtgtccggagttagaaagcagattagacgacatgacattctctgacattcagaaagagtttccgcatgtcatcgaaatggtagatatagaacaatttacttttagtaacgtatgtgaatcggttcaaaaatttagaatgatgtcaaaggatgaaagaaagcaatacgatttatgtgactttcctgccgaatttagagatggatatgtggcatcttcattagtgggaatcaatcacaattctggacccagagctattcttggatgtgctcaagctaaacaagctatctcttgtctgagctcggatatacgaaataaaatagacaatggaattcatttgatgtatccagagaggccaatcgtgattagtaaggctttagaaacttcaaagattgcggctaattgcttcggccaacatgttactatagcattaatgtcgtacaaaggtatcaatcaagaggatggaattatcatcaaaaaacaatttattcagagaggcggtctcgatattgttacagccaagaaacatcaagtagaaattccattggaaaactttaataacaaagaaagagataggtctaacgcctattcaaaattagaaagtaatggattagttagactgaatgctttcttggaatccggagacgctatggcacgaaatatctcatcaagaactcttgaagatgattttgctagagataatcagattagcttcgatgtttccgagaaatataccgatatgtacaaatctcgcgttgaacgagtacaagtagaacttactgacaaagttaaggtacgagtattaaccatgaaagaaagaagacccattctaggagacaaatttaccactagaacgagtcaaaagggaacagtcgcgtatgtcgcggatgaaacggaacttccatacgacgaaaatggtatcacaccagatgtcattattaattctacatccatcttctctagaaaaactatatctatgttgatagaggttattttaacagccgcatattctgctaagccgtacaacaataagggagaaaaccgacctgtctgttttcctagtagtaacgaaacatccatcgatacatatatgcaattcgctaaacaatgttatgagcattcaaatccgaaattgtctgatgaagaattatcggataaaatcttttgtgaaaagattctctatgatcctgaaacggataagccttatgcatccaaagtattttttggaccaatttattacttgcgtctgagacatttaactcaggacaaggcaaccgttagatgtagaggtaaaaagacgaagctcattagacaggcgaatgagggacgaaaacgtggaggaggtatcaagttcggagaaatggagagagactgtttaatagcgcatggtgcagccaatactattacagaagttttgaaagattcggaagaagattatcaagatgtgtatgtttgtgaaaattgtggagacatagcagcacaaatcaagggtattaatacatgtcttagatgttcaaaacttaatctctctcctctcttaacaaaaattgataccacacacgtatctaaagtatttcttactcaaatgaacgccagaggcgtaaaagtcaaattagatttcgaacgaagacctccttcgttttataaaccattagataaagttgatctcaaaccgtcttttctggtctaatattgtttagtagatacttatcaacatcatcaagattatcaagattatcaagattatcaagataagctaattcactaaacacattatcgatttcggtatcgttactcgcagaataaagttcgttatgatcctgatattcggaaatctgtggagtttcaggttttggtggatgtgtaacagctacttgagataccgaagtctgatattcagaaagctgtggatgttctggttcggcatccaccgatggtgttacaccactactaattggttcagtaacgtctgtggacgatggaggcaccacttctacaggttctggttctttatcctcagtcatcaacggagctacttcaatgcgaggaaatgtataatttggtaatggtttctcatgtggatctgaagaagaggtaagatatctactagaaagataccgatcacgttctagttctcttttgtagaacttaactttttctttctcagcatctagttgatattccaacctcttcacgttactacgttcagatttcaattcacgttcgcatgggttacctccgcagtttttacgagcgatttcacgttcagccttcatgcgtctctccctctctctatcgagtttatcagagcagtctttctgaaggcgatcgaactccataaatttctccaacgctttgattgtttccatagatttccgaagttcagcttttaggactgtgattctttttctttcgaattcacagctggatgtacaaccgtttccattaccgccatctctaagtttcttttctagatcggcaacatttcatccccatgccttttacattcctcgagtctactgtcgtcgaaatatcgttccagctccttttcgacatcaataactttagcacgttgtctctcaagctctcttttgtagttatctgattccctggcacgtttaagatcttcatgcaattgagtcagctcttaacacaatctcttgcttcttcgtcatagtacgcgcaatcactgtgagatccattgttaccacgtctacactcggcgagctcgcgtttaagagattcaatttcccgtttgtattggtccatgtttccattgctaccaccattagatttacaggctgctagttgtcgttcgagatcagaaatacgggttttcttggaattgatttcgtcgatgtacttggcatcgaaacacttattaagttctttttccaattctacgattttatttctttcgcgagtcaattccctcctgtagtaactatctgttttgtcagattcacgctctctacgtagactttcttgcaagttactaatttgttccctagcacgtccgagtttagttttatatgctgaatagagttctgattcatcctttgagcagatctctagcgatcgtttaagattcctgattctagtctttagcctatttacctcctcagaagatgttccgttaccgttgcgtttacactcgttaagctgtctatcaagatccatgattctatctctaagacgttgcatctctctttccatatcagcattgctttcattattacgtctgcagtcactcaactgtctttcaatatctgagattctatctctaagacgtcgcatctctctctgtttcggcattggtttcattattacgtctacagtcgttcaactgtctttcaagatctgatattctagattggagtctgctaatctctgtagcattttcacggcattcactcagttgtctttcaagatctgaaattttagattggagtctgctaatctctgtaagatttcctcctccgctctcgatgcagtcggtcaacttattctctagttctctaatacgcgaacgcagtgcatcaacttcttgcgtgtcttcctggttgcgtgtacattcatcgagtctagattcgagatctctaacgcgtcgtcgttcttcctcaagttctctgcgtactacagaaagcgtgtccctatcttgttgatatttagcaatttctgattctagagtactgattttgcttacgtagttactaatatttgtcttggccttatcaagatcctccttgtatttgtcgcattccttgatatccctacgaagtctggacagttcccattcgacattacgacgtttatcgatttcagctcggagatcgtcatcgcgttgttttagccacatacgactgagttcaagttctcgttgacaagatccatctacttttccattcctaatagtatccagttccttttctagttctgaacgcatttctcgttccctatcaagcgattctctcaattctcggatagtcttcttatcaatttctaataaatctgaaccatcatctgtcccattttgaatatccctgtgttctttgatctcttttgtaagtcggtcgattctttcggttttataaacagaatccctttccaaagtcctaatcttactgagtttatcactaagttctgcattcaattcggtgagttttctcttggcttcttccaactctgttttaaactctccactatttccgcattcttcctcgcatttatctaaccattcaattagtttattaataactagttggtaatcagcgattcctatagccgttcttgtaattgtgggaacataattaggatcttctaatggattgtatggcttgatagcatcatctttatcattattagggggatggacaaccttaattggttggtcctcatctcctccagtagcgtgtggttcttcaatagccgtgttagtaataggcttaggcaaatgcttgtcgtacgcgggcacttcctcatccatcaagtatttataatcgggttctacgtctgaatattcttttctaagagacgcaacttctggagttagtagaagaactctgtttctatatctatcaacgctggaatcaatactcaagttaaggatagcgaatacctcatcgtcatcatccgtatcctctgaaacgccatcatatgacatttcatgaagtctaacgtattgataaacagaatcagatttagtattaaacagatccttaacctttttagtaaatgcatatgtatattttagatctccagatttcataatatggtcgcatgccttaaatgtcagtgcttccataatatagtctggaacactaattggtgatgaaaaagataccggaccatatgctacgttgataaataactctgagccactaactagataatgattaatgttaaggaagaggaaatattcagtgtataggtatgtcttggcgtcatatcttgtactaaacacgctaaacagtttgttaatgtgatcaatttccaatagattaattagagcagcaggaataccaacaaacatattaccacatccgtattttctatgaatatcacatatcatgttaaaaaatcttgatagaagagcgaatatctcgtctgacttaatgagtcgtagttcagcagcaacataagtcataactgtaaatagaacatactttcctgtagtgttgattctagactccacatcaacaccattattaaaaatagttttatatacatctttaatctgctctccgttaatcgtcgaacgttctagtatacggaaacactttgatttcttatctgtagttaatgacttagtgatatcacgaagaatattacgaattacatttcttgtttttcttgagagacctgattcagaactcaactcatcgttccatagtttttttacctcagtggcgaaatctttggagtgcttggtacatttttcaataaggttcgtgacctccatttattataaaaaaattttattcaaaacttaactacaatcgggtaattataaaatcgtagatctcccatgtggtggaatactaccatctatcgcatgtggatggacagtaggtaatggccatgggaacagtaatgtttgcatatttatctttcttgccagtattactgcatattgtcccaatgtttcgatgtgatgttctaacctatcaactgccgctgtatcacaacaatagtgtccgatgaaattaagattatgatccaatgtgtttaatatatgattatcaagtcttatacgatccgcgtcttttttgacaggatcaggttcttctacaggaagaagtttcggcctcttatgatattcatgtctgggaaacggtggtctagggtgaggctccggtatcggagtgggttttggattataatcatcatcgtctatgacatcatcttcgacttcgatatttattttgctatcttgatgatgtcctgtatcagttgcattttcagcactcgactgaatattagcgcattcattgtttattattaccatatttctaaacccaaaatgtatatgttgaacatcagtactatcgttgatgagtcttatagcatgaattcgcttatcgttatcgggtttagcttctgtcaccttagcaattccttttttattaaactctacataatcatatccatttctattgtttgttctaatataaacgagtatagcatcattgctaaatttttcaatagtatcgaaaacagaatatcctaaaccatataatatatattcaggaacactcaaactaaatgtccaggattctcctaaatacgtaaactttaatagtgcgaaatcattcaaaaatctaccacttatagatagatagtacataaatgcgtatagtagtctacctatctctttattatgaaaaccggcattacgatcatatatgtcgtgatatacctgtgatccgtttacgttaaaccataaatacatgggtgatcctataaacatgaatttatttctaattctcagagctatagttaattgaccgtgtaatatttgcttacatgcatacttgatacgctcattaataagatttttatcattgctcgttatctcagaatcgtatatataaggagtaccatcgtgattcttaccagatattatacaaaatactatatataaaatatattgaccaacgttagtaatcatataaatgtttaacgttttaaattttgtattcaatgatccattatcatacgctagcatggtcttatgatattcattctttaaaatataatattgtgttagccattgcattggggctcctaatggagattttttattctcatccattttaggataggctttcataaagtccctaataacttcgtgaataatgtttctatgttttctactgatgcatgtatttgcttcgatttttttatcccatgtttcatctatcatagatttaaacgcagtaatgctcgcaacattaacatcttgaaccgttggtacaattccgttccataaatttataatgttcgccatttatataactcattttttgaatatacttttaattaacaaaagagttaagttactcatatggacgccgtccagtctgaacatcaatctttttagccagagatatcatagccgctcttagagtttcagcgtgattttccaacctaaatagaacttcatcgttgcgtttacaacacttttctatttgttcaaactttgttgttacattagtaatctttttttccaaattagttagccgttgtttgagagtttcctcattgtcgtcttcatcggctttaacaattgcttcgcgtttagcctctggctttttagcagcctttgtagaaaaaaattcagttgctggaattgcaagatcgtcatctccggggaaaagagttccgtccatttaaagtacagattttagaaactgacactctgcgttatttatatttggtacaacacatggattataaatattgatgttaataacatcagaaaatgtaaagtctatacattgttgcatcgtgttaaattttctaatggatctagtattattgggtccaacttctgcctgaaatccaaatatggaagcggatacaaaaccgtttcctggataaaccacacatctccacttttgctttacatcagaaattgtgtcattgacatcttgaactctcctatctaatgccggtgttccacctatagattttgaatattcgaatgctgcatgagtagcattaaattccttaatattgccataattttcatatattgagtaaccctggataaaaagtaaacacaccgcagccgtcgctaccacaataaaaaaaattgatagagagttcatttataatctattagaagctgacaaaatttttttacacgcatcagacaatgctttaataaatagttcaacatctacttttgtcatatcgaaccgatggtatgattctaacctagaattacatccgaaaaagttgactatgttcatagtcattaagtcattaacaaacaacattccagactctggattataagacgatactgtttcgtcacaattacctaccttaatcatgtgattatgaatattggctattagagcaccttctaagaaatctataatatctttgaaacacgatttaaaatcaaaccacgaatatacttctacgaagaaagttagtttacccataggagaaataactataaatggagatctaaatacaaaatccggatctatgatagttttaacattattatattctctattaaatacctccacatctaaaaatgttaattttgaaactatgtcttcgtttattaccgtacctgaactaaacgctataagctctattgtttgagaactctttaaacgatattcttgaaatacatgtaacaaagtttcctttaactcggtcggtttatctaccatagttacagaatttgtatccttatctataatataataatcaaaatcgtataaagttatataattatcgcgttcagattgtgatcttttcaaatagactaaaaaccccatttctctagtaagtatcttatgtatatgtttgtaaaatatcttcatggtgggaatatgctctaccgcagttagccattcctcattgacagcggtagatgtattagacaaaactattccaatgtttaacaagggccattttacgagattattaaatccttgtttgataaatgtagccaatgagggttcgagttcaacgacgattgaattctcttcccgcggatgctgcatgatgaacgacgggatgttgttcgattgatttggaattctttttcgactttttgtttatattaaatattttaaaatttatagctgatagcaattcatgtactacggataatgtagacgcgtattgcgcatcgatatctttattattagataaatttatcaataaatgtgagaagtttgcctcgttaaggtcttccatttaaatattatataaacatttgtgtttgtatcttattcgtcttttatggaatagttttttactagtaaagctgcaattacacactttgtccgtaaaacataaatataaacaccagcttttatcaatcgttccaaaaagtcgacggcggacatttttaacatggcatctattttaaatacacttaggtttttggaaaaaacatcattttataattgtaacgattcaataactaaagaaaagattaagattaaacataagggaatgtcatttgtattttataagccaaagcattctaccgttgttaaatacttgtctggaggaggtatatatcatgatgatttggttgtattggggaaggtaacaattaatgatctaaagatgatgctattttacatggatttatcatatcatggagtgacaagtagtggagcaatttacaaattgggatcgtctatcgatagactttctctaaataggactattgttacaaaagttaataattatgatgatacattttttgacgacgatgattgatcgctattgcacaattttgtttttttactttctaatatagcgtttagattctttttcatgtgcgaatattgatttactaaaatatcgatgtttaacttttgttctatgacgtccttatcagcggtatcggtacatatacgtaattcaccttcacaaaatacggagtcttcgataataatagccaatcgattattggatctagcggtctgtatcatattcaacatgtttaatatatcctttcgtttcccctttacaggcatcgatcgtagcatattttccgcgtctgagatggaaatgttaaaactacaaaaatgcgtaatgttagcccgtcctaatattggtacgtgtctataagtttggcatagtagaataatagacgtgtttaaatgccttccaaagtttaagaattctattagagtattgcattttgatagtttatcgcctacatcatcaaaaataagtaaaaagtgtgctgattttttatgattttgtgcgacagcaatacatttttctatgttacttttagttcgtatcagattatattctagagattcctgactactaacgaaattaatatgatttggccaaatgtatccatcataatctggattataaacgggtgtaaacaagaatatatgtttatattttttaactagtgtagaaaacagagatagtaaatagatagtttttccagatccagatcctcccgttaaaaccattctaaacggcatttttaataaattttctcttgaaaattgtttttcttggaaacaattcataattatatttacagttactaaattaatttgataataaatcaaaatatggaaaactaaggtcgttagtagggaggagaacaaagaaggcatatcgtgatataaataacatttattatcatgatgacaccagaaaacgacgaagagcagacatctgtgttctccgctactgtttacggagacaaaattcagggaaagaataaacgcaaacgcgtgattggtctatgtattagaatatctatggttatttcactactatctatgattaccatgtccgcgtttctcatagtgcgcctaaatcaatgcatgtctgctaacgaggctgctattactgacgccgctgttgccgttgctgctgcatcatctactcatagaaaggttgcgtctagcactacgcaatatgatcacaaagaaagctgtaatggtttatattaccagggttcttgttatatattacattcagactaccagttattctcggatgctaaagcaaattgcactgcggaatcatcaacactacccaataaatccgatgtcttgattacctggctcattgattatgttgaggatacatggggatctgatggtaatccaattacaaaaactacatccgattatcaagattctgatatatcacaagaagttagaaagtatttttgtgttaaaacaatgaactaatatttatttttgtacattaataaatgaaatcgcttaatagacaaactgtaagtaggtttaagaagttgtcggtgccggccgctataatgatgatactctcaaccattattagtggcataggaacatttctgcattacaaagaagaactgatgcctagtgcttgcgccaatggatggatacaatacgataaacattgttatctagataccaacattaaaatgtctacagataatgcggtttatcagtgtcgtaaattacgagctagattgcctagacctgatactagacatctgagagtattgtttagtattttttataaagattattgggtaagtttaaaaaagaccaataataaatggttagatattaataatgataaagatatagatattagtaaattaacaaattttaaacaactaaacagtacgacggatgctgaagcgtgttatatatacaagtctggaaaactggttgaaacagtatgtaaaagtactcaatctgtactatgtgttaaaaaattctacaagtgacaacaaaaactgcagcggccgctcgagagctcagacggcaatggatggatcataattgatgggaaatgcaatagtaattttttatcataaaagttgtaaagtaaataataaaacaataaatattgaactagtagtacgtatattgagcaatcagaaatgatgctggtacctcttatcacggtgaccgtagttgcgggaacaatattagtatgttatatattatatatttgtaggaaaaagatacgtactgtctataatgacaataaaattatcatgacaaaattaaaaaagataaagagttctaattccagcaaatctagtaaatcaactgatagcgaatcagactgggaggatcactgtagtgctatggaacaaaacaatgacgtagataatatttctaggaatgagatattggacgatgatagcttcgctggtagtttaatatgggataacgaatccaatgttatggcgcctagcacagaacacatttacgatagtgttgctggaagcacgctgctaataaataatgatcgtaatgaacagactatttatcagaacactacagtagtaattaatgaaacggagactgttaaagtacttaatgaagataccaaacagaatcctaactattcatccaatcctttcgtaaattataataaaaccagtatttgtagcaagtcaaatccgtttattacagaacttaacaataaatttagtgagaataatccgtttagacgagcacatagcgatgattatcttaataagcaagaacaagatcatgaacacgatgatatagaatcatcggtcgtatcattggtgtgattagtttcctttttataaaattgaagtaatatttagtattattgctgccgtcacgttgtacaaatggagatattccctgtattcggcatttctaaaattagcaattttattgctaataatgactgtagatattatatagatacagaacatcaaaaaattatatctgatgagatcaatagacagatggatgaaacggtacttcttaccaacatcttaagcgtagaagttgtaaatgacaatgagatgtaccatcttattcctcatagattatcgacgattatactctgtattagttctgtcggaggatgtgttatctctatagataatgacgtcaatggcaaaaatattctaacctttcccattgatcatgctgtaatcatatccccactgagtaaatgtgtcgtagttagcaagggccctacaaccatactggttgctaaagcggatatacccagcaaacgattggtaacatcgtttacaaacgacatactgtatgtaaacaatctatcactgattaattatttgccgttgtctgtattcattattagacgagtcaccgactatttggatagacacatatgcgatcagatatttgctaataataagtggtattcccttataaccatcgacgataagcaatatcctattccatcaaattgtataggtatgtcttctgccaagtacataaattctagcatcgagcaagatactttaatacatgtttgtaacctcgagcatccattcgacttagtatacaaaaaaatgcagtcgtacaattctgtacctatcaaggaacaaatattgtacggtagaattgataatataaatatgagcattagtatttctgtggattaatagatttctagtatggggatcattaatcatctctaatctctaaatacctcataaaacgaaaaaaaagctattatcaaatactgtacggaatagattcattctcttctctttttatgaaactctgttgtatatctactgataaaactggaagcaaaaaatctgataaaaagaataagatcaagatcaaggattatatggaacacgattattataaaataacaatagttcctggttcctcttccacgtctactagctcgtggtattatacacatgcctagtaatagtctctttgcgttgatggaaagcagactagaaataacaggctaaaatgttcagacaccataatagttcccaacccagataataacagagtaccatcaacacattcctttaaactcaatcccaaacccaaaaccgttaaaatgtatccggccaattgatagtagataatgaggtgtacagcgcatgataatttacacagtaaccaaaatgaaaatactttagtaattataagaaatatagatggtaacgtcatcatcaacaatccaataatatgccggagagtaaacattgacggataaaacaaaaatgctccgcataactctatcatggcaataacacaaccaaatacttgtaagattcctaaattagtagaaaatacaacggatatcgatgtataagtgatctcgagaaataataagaataaagtaatgcccgtaaagataaacatcaacattgtttggtaatcattaaaccaattagtatgacgttgaactaatttcacagtaaattttattccagtattatccccgcatgtataagtacctggtaagatatctttatattccataatcaatgagacatcactatctgataacgaatgaagtctagcactagtatgccatttacttaatattgtcgtcttggaagttttattataagttaaaatatcatggttatccaatttccatctaatatactttgtcggattatctatagtacacggaataatgatggtatcattacatgctgtatactctatggtctttgtagttgttataacaaccaacgtatagaggtatatcaacgatattctaactcttgacattttttatttatttaaaatgatacctttgttatttattttattctattttgctaacggtattgaatggcataagtttgaaacgagtgaagaaataatttctacttacttattagacgacgtattatacacgggtgttaatggggcggtatacacattttcaaataataaactaaacaaaactggtttaactaataataattatataacaacatctataaaagtagaggatgcggataaggatacattagtatgcggaaccaataacggaaatcccaaatgttggaaaatagacggttcagacgacccaaaacatagaggtagaggatacgctccttatcaaaatagcaaagtaacgataatcagtcacaacggatgtgtactatctgacataaacatatcaaaagaaggaattaaacgatggagaagatttgacggaccatgtggttatgatttattcacggcggataacgtaattccaaaagatggtttacgaggagcattcgtcgataaagacggtacttatgacaaagtttacattcttttcactgatactatcggctcaaagagaattgttaaaattccgtatatagcacaaatgtgcctaaacgacgaaggtggtccatcatcgttgtctagtcatagatggtcgacgtttctcaaagtcgaattagaatgtgatatcgacggaagaagttatagataaattattcattctaaaactataaaaacagataatgatacgatactatatgtattcttcgatagtccgcattatgtacctattctatgaataccattaaacaatctttttctacgtcaaaattggaaggatatacaaagcaattgccgtctccagctcctggtatatgtctaccagctggaaaagttgttccacataccacgtttgaagtcatagaaaaatataatgtactagatgatattataaagcctttatctaaccaacctatcttcgaaggaccgtctggtgttaaatggttcgatataaaggagaaggaaaatgaacatcgggaatatagaatatacttcataaaagaaaattctatatattcgttcgatacaaaatctaaacaaactcgtagctcgcaagtcgatgcgcgactattttcagtaatggtaacttcgaaaccgttatttatagcagatatagggataggagtaggaatgccacaaatgaaaaaaatacttaaaatgtaatcttaatcgagtacaccacacgacaatgaacaaacataagacagattatgctggttatgcttgctgcgtaatatgcggtctaattgttggaattatttttacagcgacactattaaaagttgtagaacgtaaattagttcatacaccatcaatagataaaacgataaaagatgcatatattagagaagattgtcctactgactggataagctataataataaatgtatccatttatctactgatcgaaaaaacctgggaggaaggacgtaatgcatgcaaagctctaaatccaaattcggatctaattaagatagagactccaaacgagttaagttttttaagaagccttagacgaggctattgggtaggagaatccgaaatattaaaccagacaaccccatataattttatagctaaaaatgccacgaagaatggaactaaaaaacggaaatatatttgtagtacaacgaatactcccaaactgcattcgtgttacactatataacaattacactacatttttatcataacactacttcggttagatgttttagaaaaaaataaatatcgccgtaccgttcttgtttttataaaaataacaattaacaattatcaaattttttctttaatattttacgtggttgaccattcttggtggtaaaataatctcttagtgttggaatggaatgctgtttaatgtttccgcactcatcgtatattttgacgtatgcagtcacatcgtttacgcaatagtcagactgtagttctatcatgcttcctacatcagaaggaggaacagttttaaagtctcttggttttaatctattgccattagttttcatgaaatcctttgttttatccacttcacattttaaataaatgtccactatacattcttctgttaattttactagatcgtcatgggtcatagaatttataggttccgtagtccatggatccaaactagcaaacttcgcgtatacggtatcgcgattagtgtatacaccaactgtatgaaaattaagaaaacagtttaataaatcaacagaaatatttaatcctccgtttgatacagatgcgccatatttatggatttcggattcacacgttgtttgtctgaggtgttcgtctagtgttgcttctacgtaaacttcgattcccatatattctttattgtcagaatcgcataccgatttatcatcatacactgtttgaaaactaaatggtatacacatcaaaataataaataataacgagtacattctgcaatattgttatcgtaattggaaaattagtgttcgagtgagtcggattatgtgagtactggattgtatattttattttatattttgtaataagaataaaatgctaatgtcaagtttattccaatagatgtcttattaaaaaacatatataataaataacaatggctgaatggcataaaattatcgaggatatctcaaaaaataataagttcgaggatgccgccatcgttgattacaagactacaaagaatgttctagctgctattcctaacagaacatttgccaagattaatccgggtgaaattattcctctcatcactaatcgtaatattctaaaacctcttattggtcagaaatattgtattgtatatactaactctctaatggatgagaacacgtatgctatggagttgcttactgggtacgcccctgtatctccgatcgttatagcgagaactcataccgcacttatatttttgatgggtaagccaacaacatccagacgtgatgtgtatagaacgtgtagagatcacgctacccgtgtacgcgcaactggtaattaaaataaaaagtaatattcatatgtagtgtcaattttaaatgatgatgatgaaatggataatatccatattgacgatgtcaataatgccggtattggcatacagctcatcgatttttagatttcattcagaggatgtggaattatgttatgggcatttgtattttgataggatctataatgtagtaaatataaaatataatccgcatattccatatagatataattttattaatcgcacgttaaccgtagatgaactagacgataatgtcttttttacacatggttattttttaaaacacaaatatggttcacttaatcctagtttgattgtctcattatcaggaaacttaaaatataatgatatacaatgctcagtaaatgtatcgtgtctcattaaaaatttggcaacgagtacatctactatattaacatctaaacataagacttattctctacatcggtccacgtgtattactataataggatacgattctattatatggtataaagatataaatgacaagtataatgacatctatgattttactgcaatatgtatgctaatagcgtctacattgatagtgaccatatacgtgtttaaaaaaataaaaatgaactcttaattatgctatgctattagaaatggataaaatcaaaattacggttgattcaaaaattggtaatgttgttaccatatcgtataacttggaaaagataactattgatgttacacctaaaaagaaaaaagaaaaggatgtattattagcgcaatcagttgctgtcgaagaggcaaaagatgtcaaggtagaagaaaaaaatattatcgatattgaagatgacgatgatatggatgtagaaagcgcataatacgatctataaaaataagtatataataaatactttttatttacggtactcttgtagtggtgataccctactcaattatttttttaaaaaaatacttattctgattcttctagccatttccgtgttcgttcgaatgccacatcgacgttaaagataggggagtagttgaaatctagttctgcattgttggtacgcacctcaaatgtagtgttggatatcttcaacgtatagttgttgagtagtgatggttttctaaatagaattctcttcatatcattcttgcacgcgtacatttttagcatccatcttggaattctagatccttgttctattcccaatggtttcatcaatagaagattaaacatatcgtacgaacacgatggagagtaatcgtagcaaaagtaagcatttcctttaatcttagatcccggatactggatatattttgcagccaacacgtgcatccatgcagcatttcctacatatacccggctatgcaccgcgtcatcatcgactgtacgatacataatgttaccgtgttgcttacattgctcgtaaaagactttcgtcaatttgtctccttctccgtaaattccagtgggtcttaggcaacaagtatacaattttgctccattcatgattacggaattattggctttcataaccagttgctcggccatacgtttactttttgcgtatacatgtcctggtgatatatcataaagggtatgctcatggccgatgaatggatcaccgtgtttattgggtcctattgcttccatgctactagtatagatcaaatacttgattcctaggtccacacaagctgccaatatagtctgtgttccataatagtttactttcatgatttcattatcggtgtattttccaaatacatccactagagcagccgtatgaataatcagatttaccccatctagcgcttctctcaccttatcaaagtcgtttatatcacattgtatatagtttataaccttaactttcgaggttattggttgtggatcttctacaatatctatgactctgatttcttgaacatcatctgcactaattaacagttttactatatacctgcctagaaatccggcaccaccagtaaccgcgtacacggccattgctgccactcataatatcagactacttattctattttactaaataatggctgtttgtataatagaccacgataatatcagaggagttatttactttgaaccagtccatggaaaagataaagttttaggatcagttattggattaaaatccggaacgtatagtttgataattcatcgttacggagatattagtcaaggatgtgattccataggcagtccagaaatatttatcggtaacatctttgtaaacagatatggtgtagcatatgtttatttagatacagatgtaaatatatttacaattattggaaaggcgttatctatttcaaaaaatgatcagagattagcgtgtggagttattggtatttcttacataaatgaaaagataatacattttcttacaattaacgagaatggcgtttgatatatcagttaatgcgtctaaaacaataaatgcattagtttacttttctactcagcaaaataaattagtcatacgtaatgaagttaatgatacacactacactgtcgaatttgatagggacaaagtagttgacacgtttatttcatataatagacataatgacaccatagagataagaggggtgcttccagaggaaactaatattggttgcgcggttaatacgccggttagtatgacttacttgtataataagtatagttttaaactgattttagcagaatatataagacacagaaatactatatccggcaatatttattcggcattgatgacactagatgatttggctattaaacagtatggagacattgatctattatttaatgagaaacttaaagtagactccgattcgggactatttgactttgtcaactttgtaaaggatatgatatgttgtgattctagaatagtagtagctctatctagtctagtatctaaacattgggaattgacaaataaaaagtataggtgtatggcattagccgaacatatatctgatagtattccaatatctgagctatctagactacgatacaatctatgtaagtatctacgcggacacactgagagcatagaggatgaatttgattattttgaagacgatgattcgtctacatgttctgccgtaaccgacagggaaacggatgtataattttttttatagcgtgaaggatatgataaaaaatataattgttgtatttatcccattccaatcaccttatatgattctgtaaaaaaattatactgtaacacaataaaggagtcttatagatgtatagaggtcagatactggtttgataaactgtttattccacataagtatgtttgactttatggttagacccgcatactttaacaaatcactgaaaattggagttaggtattgacctctcagaatcagttgccgttctggaacattaaatgtattttttatgatatactccaacgcatttatgtgggcatacaacaagtcattactaatggagtattccaagagttttagttgtctagtatttaacaagagaagagatttcaacagactgtttatgaactcgaacgccgcctcattgtcgcttatattgatgatgtcgaattctcccaatatcatcactgatgagtagctcatcttgttatcgggatccaagttttctaaagatgtcattaaaccctcgatcatgaatggatttatcatcatcgtttttatgttggacatgagcttagtccgtttgtccacatctatagacgacgatttctgaattatttcatatatccctctctttaactccaggaacttgtcaggatggtctactttaatatgttctcgtctaagagatgaaaatctttggatggttgcacgcgacttttctttaaaggatgacgttgcccaagatcctctcttaaatgaatccatcttatccttggacaagatggacagtctattttccttagatggtttaatatttttgttacccatgatctataaaggtagacctaatcgtctcggatgaccatatatttattttcagttttattatacgcataaattgtaaaaaatatgttaggtttacaaaaatgtctcgtggggcattaatcgtttttgaaggattggacaaatctggaaaaacaacacaatgtatgaacatcatggaatctataccggcaaacacgataaaatatcttaactttcctcagagatccactgtcactggaaagatgatagatgactatctaactcgtaaaaaaacctataatgatcatatagttaatctattattttgtgcaaatagatgggagtttgcatcttttatacaagaacaactagaacagggaattactttaatagttgatagatacgcattttctggagtagcgtatgccgccgctaaaggcgcgtcaatgactctcagtaagagttatgaatctggattgcctaaacccgacttagttatattcttggaatctggtagcaaagaaattaatagaaacgtcggcgaggaaatttatgaagatgttacattccaacaaaaggtattacaagaatataaaaaaatgattgaagaaggagatattcattggcaaattatttcttctgaattcgaggaagatgtaaagaaggagttgattaagaatatagttatagaggctatacacacggttactggaccagtggggcaactgtggatgtaatagtgaaattacattttttataaatagatgttagtacagtgttataaatggatgaagcatattactctggcaacttggaatcagtactcggatacgtgtccgatatgcataccgaactcgcatcaatatctcaattagttattgccaagatagaaactatagataatgatatattaaacaaggacattgtaaattttatcatgtgtagatcaaacttggataatccatttatctctttcctagatactgtatatactattatagatcaagagatctatcagaccgaattgattaattcattagacgacaatgaaattatcgattgtatagttaacaagtttatgagcttttataaggataacctagaaaatatagtagatgctatcattactctaaaatatataatgaataatccagattttaaaactacgtatgccgaagtactcggttccagaatagccgatatagatattaaacaagtgatacgtaagaatatactacaattgtctaatgatatccgcgaacgatatttgtgaaaaatattaaaaaaaaatactttttttattaaatgacgtcgcttcgcgaatttagaaaattatgctgtgatatatatcacgcatcaggatataaagaaaaatctaaattaattagagactttataacagatagggatgataaatatttgatcattaagctattgcttcccggattagacgatagaatttataacatgaacgataaacaaattataaaattatatagtataatatttaaacaatctcaggaagatatgctacaagatttaggatacggatatataggagacactattaggactttcttcaaagagaacacagaaatccgtccacgagataaaagcattttaactttagaagaagtggatagttttttaactacgttatcatccgtaactaaagaatcgcatcaaataaaattattgactgatgtagcatctgtttgtacatgtaatgatttaaaatgtgtagtcatgcttattgataaagatctaaaaattaaagcgggccctcggtacgtacttaacgctattagtcctcatgcctatgatgtgtttagaaaatctaataacttgaaagagataatagaaaatgcatctaaacaaaatctagactctatatctatttctgttatgactccaattaatcccatgttagcggaatcgtgtgattctgtcaataaggcgtttaaaaaatttccatcaggaatgtttgcggaagtcaaatacgatggtgaaagagtacaagttcataaaaataataacgagtttgccttctttagtagaaacatgaaaccagtactctctcataaagtggattatctcaaagaatacataccgaaagcatttaaaaaagctacgtctatcgtattggattctgaaattgttcttgtagacgaacataatgtaccgctaccgtttggaagtttaggaatacacaaaaagaaagaatataaaaactctaacatgtgtttgttcgtgtttgactgtttgtactttgatggattcgatatgacggacattccattgtacgaacgaagatcttttctcaaagatgttatggttgaaatacccaatagaatagtattctcagagttgacgaatattagtaacgagtctcagttaactgacgtattggatgatgcactaacgagaaaattagaaggattggtcttaaaagatattaatggagtatacgaaccgggaaagagaagatggttaaaaataaagcgagactatttgaacgagggttccatggcagattctgccgatttagtagtactaggtgcctactatggtaaaggagcaaagggtggtatcatggcagtctttctaatgggttgttacgacgatgaatccggtaaatggaagacggttaccaagtgttcaggacacgatgataatacgttaagggagttgcaagaccaattaaagatgattaaaattaacaaggatcccaaaaaaattccagagtggttagtagttaataaaatctatattcccgattttgtagtagaggatccgaaacaatctcagatatgggaaatttcaggagcagagtttacatcttccaagtcccataccgcaaatggaatatccattagatttcctagatttactaggataagagaggataaaacgtggaaagaatctactcatctaaacgatttagtaaacttgactaaatcttaatagttacatacaaactgaaaattaaaataacaccatttagttggtggtcgccatggatggtgttattgtatactgtctaaacgcgttagtaaaacatggcgaggaaataaatcatataaaaaatgatttcatgattaaaccatgttgtgaaagagtttgtgaaaaagtcaagaacgttcacattggcggacaatctaaaaacaatacagtgattgcagatttgccatatatggataatgcggtatccgatgtatgcaattcactgtataaaaagaatgtatcaagaatatccagatttgctaatttgataaagatagatgacgatgacaagactcctactggtgtatataattattttaaacctaaagatgttattcctgttatcatatctataggaaaggataaagatgtctgtgaactattaatctcatcagacatatcgtgtgcatgcgtggagttaaattcatatcacgtagccattcttcccatgaatgtttccttttttaccaaaggaaatgcctcgttgattattctcctgtttgatttctctatcgatgcagcacctctcttaagaagtgtaaccgataataatgttattatatctagacaccagcgtctacatgacgagcttccgagttccaattggttcaagttttacataagtataaagtccgactattgttctatattatatatggttgttgatggatctgtgatgcatgcgatagctgataatagaactcacgcaattattagcaaaaatatattagacaatactacaattaacgatgagtgtagatgctgttattttgaaccacagattaggattcttgatagagatgagatgctcaatggatcatcgtgtgatatgaacagacattgtattatgatgaatttacctgatgtaggcgaatttggatctagtatgttggggaaatatgaacctgacatgattaagattgctctttcggtggctggtaatttaataagaaatcgagactacattcccgggagacgaggctatagctactacgtttacggtatagcctctagataatttttttaagcacgaaataaaaaacataattttaaaccaatctatttcatactattttgtgtgatcaccatggacataaagatagatattagtatttctggtgataaatttacggtgactactaggagggaaaatgaagaaagaaaaaaatatctacctctccaaaaagaaaaaactactgatgttatcaaacctgattatcttgagtacgatgacttgttagatagagatgagatgtttactattctagaggaatattttatgtacagaggtctattaggcctcagaataaaatatggacgactctttaacgaaattaaaaaattcgacaatgatgcggaagaacaattcggtactatagaagaactcaagcagaaacttagattaaattctgaagagggagcagataactttatagattatataaaggtacaaaaacaggatatcgtcaaacttactgtatacgattgcatatctatgataggattgtgtgcatgcgtggtagatgtttggagaaatgagaaactgttttctagatggaaatattgtttacgagcgattaaactgtttattaatgatcacatgcttgataagataaaatctatactgcagaatagactagtatatgtggaaatgtcatagaaagttaatgagagcaaaaatatataaggttgtattccatatttgttattttttctgtaatagttaaaaaaatacattcgatggtctatctatcagattattatgtgttataaggtactttttctcataataaactagagtatgagtaagatagtgtttttcaaaacatataaatctaaaattgatggatgagatatacagctattaatttcgaaaatatataaatctaaaattgatggataagatatacagctattaatttcgaaaatatattttaatctgataactttaaacatggatttttgatggtggtttaacgttttaaaaaaagattttgttattgtagtatatgataatattaaaagatggatataaagaatttgctgactgcatgtactattttttacattactacattggctacggcagatatacctactccgccaccaacgggtcatgtgacaagggagaatatcttgataagaggcataatcaatgttgtaatcggtgtccacctggagaatttgccaaggttagatgtaatggtaacgataacacaaaatgtgaacgctgcccacctcatacatataccacaatccccaattattctaatggatgtcatcaatgtagaaaatgcccaaccggatcatttgataaggtaaagtgtaccggaacacagaacagtaaatgttcgtgtcttcctggttggtattgcgctactgattcttcacagactgaagattgttgaaattgtgtaccaaaaaggagatgtccatgcggatactttggtggaatagatgaacaaggaaatcctatttgtaaatcgtgctgtattggtgaatattgcaactacctacgtaattatagacttgatccattttctccatgcaaactatctaaatgtaattaattatgattttgatgataatgttaccatacattatatcgctacttggttagtgtattattcagtatgaagacctattaataattacttatcttttgacgatcttgttataattataatataaaaacttatggcatagtaactcataattgctgacgcgataaattcgtaataatctgttttgttcaaatttttataaggaatctacaggcataaaaataaaaatataatttataatatactcttacagcgcgccatcatgaatagcagcagtaaattaattgctgttattaatggatttagaaatagtggacgattttgtgatattaatatagttattaatgatgaaaggataaacgctcacagactcatcctatctggagcctccgaatatttttccattctgttttccaataattttatcgattctaatgaatacgaagttaatctaagtcatttagattatcaaagtgttaacgatttgatcgattacatttatgggatacctttgagcctaactaacgataacgtgaaatatattctttcaaccgctgattttttacaaattggatctgccattactgagtgcgaaaaatacatacttaaaaatctttgttctagaaactgtatcgatttctacatatacgctgataaatataataacaagaaaatagaatcagcgtcgtttaacacaatattacgaaatattttgagactcatcaacgatgaaaactttaaatacttaacagaggaatcaatgataaaaattttaagcgatgatatgttaaatataaaaaatgaggattttgcaccactaattctcattaaatggttagagagtactcaacaatcatgcaccgtcgagttacttagatgcctcagaatatcattgctttccccacaagttataaaatcactttatagtcatcaactggttagttcaatctacgaatgtataacattcttaaacaatatagcattcttggatgaatcatttcctagataccatagcatcgagttgatatctatcggtataagtaattcgcatgataagatttccataaactgctacaatcataaaaaaaatacatgggaaatgatatcttcacgtagatataggtgtagtttcgcagtggccgtcctggataatattatctatatgatgggtggatatgatcagtccccgtatagaagttcaaaggttatagcgtacaatacatgtacaaattcttggatatatgatataccagagctaaaatatcctcgttctaattgtgggggactggctgatgacgaatacatttattgtataggcggcatacgcgatcaggattcatcgttgacatctagtattgatagatggaagccatcaaaaccatattggcagaagtatgctaaaatgcgcgaaccaaaatgtgatatgggggttgcgatgttaaacggattaatatatgtcatgggtggaatcgttaaaggtgacacgtgtaccgacgcactagagagtttatcagaagatggatggatgaagcatcaacgtcttccaataaaaatgtccaatatgtcgacgattgttcatgatggcaagatttatatatctggaggttacaacaatagtagtgtagttaatgtaatatcgaatctagtccttagctataatccgatatatgatgaatggaccaaattatcatcattaaacattcctagaattaatcccgctctatggtcagcgcataataaattatatgtaggaggaggaatatctgatgatgttcgaactaatacatctgaaacatacgataaagaaaaagattgttggacattggataatggtcacgtgttaccacgcaattatataatgtataaatgcgaaccgattaaacataaatatccattggaaaaaacacagtacacgaatgattttctaaagtatttggaaagttttataggtagttgatagaacaaaatacataattttgtaaaaataaatcactttttatactaatatgacacgattaccaatacttttgttactaatatcattagtatacgctacaccttttcctcagacatctaaaaaaataggtgatgatgcaactctatcatgtaatcgaaataatacaaatgactacgttgttatgagtgcttggtataaggagcccaattccattattcttttagctgctaaaagcgacgtcttgtattttgataattataccaaggataaaatatcttacgactctccatacgatgatctagttacaactatcacaattaaatcattgactgctagagatgccggtacttatgtatgtgcattctttatgacatcaactacaaatgacactgataaagtagattatgaagaatactccacagagttgattgtaaatacagatagtgaatcgactatagacataatactatctggatctacacattcaccagaaactagttctgagaaaccagaggatatagataattttaattgctcgtcggtattcgaaatcgcgactccggaaccaattactgataatgtagaagatcatacagacaccgtcacatacactagtgatagcattaatacagtaagtgcatcatctggagaatccacaacagacgagactccggaaccaattactgataaagaagaagatcatacagtcacagacactgtctcatacactacagtaagtacatcatctggaattgtcactactaaatcaaccaccgatgatgcggatctttatgatacgtacaatgataatgatacagtaccaccaactactgtaggcggtagtacaacctctattagcaattataaaaccaaggactttgtagaaatatttggtattaccgcattaattatattgtcggccgtggcaatattctgtattacatattatatatataataaacgttcacgtaaatacaaaacagagaacaaagtctagatttttgacttacataaatgtctgggatagtaaaatctatcatattgagcggaccatctggttcaggaaagacagccatagccaaaagactatgggaatatatttggatttgtggtgtcccataccactagatttcctcgtcctatggaacgagaaggtgtcgattaccattacgttaacagagaggccatctggaagggaatagccgccggaaactttctagaacatactgagtttttaggaaatatttacggaacttctaaaactgctgtgaatacagcggctattaataatcgtatttgtgtgatggatctaaacatcgatggcgttagaagtcttaaaaatacgtacctaatgccttactcggtgtatataagacctacctctcttaaaatggttgagaccaagcttcgttgtagaaacactgaagcggatgatgagattcatcgtcgtgtgatgttggcaaaaactgacatggatgaggcaggtgaagccggtctattcgacactattatcattgaagatgatgtgaatttagcatatagtaagttaattcagatactacaggaccgtattagaatgtattttaacactaattagagacttaagacttaaaacttgataattaataatataactcgtttttatatgtggctatttcaacgtctaatgtattagttaaatattaaaacttaccacgtaaaacttaaaatttaaaatgatatttcattgacagatagatcacacattatgaactttcaaggacttgtgttaactgacaattgcaaaaatcaatgggtcgttggaccattaataggaaaaggtggattcggtagtatttatactactaatgacaataattatgtagtaaaaatagagcccaaagctaacggatcattatttaccgaacaggcattttatactagagtacttaaaccatccgttatcgaagaatggaaaaaatctcacaatataaagcacgtaggtcttatcacgtgcaaggcatttggtctatacaaatccattaatgtggaatatcgattcttggtaattaatagattaggtgcagatctagatgcggtgatcagagccaataataatagattaccaaaaaggtcggtgatgttgatcggaatcgaaatcttaaataccatacaatttatgcacgagcaaggatattctcacggagatattaaagcgagtaatatagtcttggatcaaatagataagaataaattatatctagtggattacggattggtttctaaattcatgtctaatggcgaacatgttccatttataagaaatccaaataaaatggataacggtactctagaatttacacctatagattcgcataaaggatacgttgtatctagacgtggagatctagaaacacttggatattgtatgattagatggttgggaggtatcttgccatggactaagatatctgaaacaaagaattgtgcattagtaagtgccacaaaacagaaatatgttaacaatactgcgactttgttaatgaccagtttgcaatatgcacctagagaattgctgcaatatattaccatggtaaactctttgacatattttgaggaacccaattacgacgagtttcggcacatattaatgcagggtgtatattattaagtgtggtgtttggtcgatgtaaaatttttgtcgataaaaattaaaaaataacttaatttattattgatctcgtgtgtacaaccgaaatcatggcgatgttttacgcacacgctctcggtgggtacgacgagaatcttcatgcctttcctggaatatcatcgactgttgccaatgatgtcaggaaatattctgttgtgtcagtttataataacaagtatgacattgtaaaagacaaatatatgtggtgttacagtcaggtgaacaagagatatattggagcactgctgcctatgtttgagtgcaatgaatatctacaaattggagatccgatccatgatcaagaaggaaatcaaatctctatcatcacatatcgccacaaaaactactatgctctaagcggaatcgggtacgagagtctagacttgtgtttggaaggagtagggattcatcatcacgtacttgaaacaggaaacgctgtatatggaaaagttcaacatgattattctactatcaaagagaaggccaaagaaatgaatgcactcagttcaggacctatcatcgattaccacgtctggataggagattgtatctgtcaagttactgctgtggacgtacatggaaaggaaattatgagaatgagattcaaaaagggtgcggtgctacagatcccaaatctggtaaaagttaaacttggggagaatgatacagaaaatctttcttctactatatcggcggcaccatcgaggtaaccacctctcaagaagaccgcgtgaataatgtactcatgaaacgtttggaaactatacgccatatgtggtctgttgtatatgatcattttgatattgtgaatggtaaagaatgctgttatgtgcatacgcattcatctaatcaaaatcctataccgagtactgtaaaaacaaatttgtacatgaagactatgggatcatgcattcaaatggattccatggaagctctagagtatcttagcgaactgaaggaatcaggtggatggagtcccagaccagaaatgcaggaatttgaatatccagatggagtggaagacactgaatcaattgagagattggtagaggagttcttcaatagatcagaacttcaggctggtaaattagtcaaatttggtaattctattaattgttaaacatacatctgtttcagctaagcaactaagaacacgtatacggcagcagcttccttttatactctcatcttttaccaacacaaagggtggatatttgttcattggagttgataataatacacacaaagtatttggattcacggtgggttacgactacctcagactgatagagaatgatatagaaaagcatatcaaaagactttgtgttgtgcatttctgtgagaagaaagaggacatcaagtacacgtgtcgattcatcaaggtatataaacctggggatgaggctacctcgacatacgtgtgcgctatcaaagtggaaagatgctgttgtgctgtgtttgcagattggccagaatcatggtatatggatactaatggtatcaagaagtattctccagatgaatgggtgtcacatataaaattttaattaatgtaactatagagaacaaataataggttgtaatatcatatagacaataactaacaattaattagtaactgttatctcttttttaactaaccaactaactatatacctattaatacatcgtaattatagttcttaacatctattaatcattgattcgcttctttaattttttataaactaacattgttaattgaaaagggataacatgttacagaatataaattatatatggatttttttaaaaaggaaatacttgactggagtgtatatttatctcttcattatatagcacgcgtgtgttccaattcttccacatcccatataatacaggattataatctcgttcgaacatacgagaaagtggataaaacaatagttgattttttatctaggttgccaaatttattccatattttagaatatggggaaaatattctacatatttattctatggatgatgctaatacgaatattataattttttttctagatagagtattaaatattaataagaacgggtcatttatacacaatctcaggttatcatcatccattaatataaaagaatatgtatatcaattagttaataatgatcatccagataataggataagactaatgcttgaaaatggacgtagaacaagacattttttgtcctatatatcagatacagttaatatctatatatgtattttaataaatcatggattttatatagatgcagaagacagttacggttgtacattattacatagatgtatatatcactataagaaatcagaatcagaatcatacaatgaattaattaagatattgttaaataatggatccgatgtagataaaaaagatacgtacggaaacacaccttttatcctattatgtaaacacgatatcaacaacgtggaattgtttgagatatgtttagagaatgctaatatagactctgtagactttaatagatatacacctcttcattatgtctcatgtcgtaataaatatgattttgtaaagttattaatttctaaaggagcaaatgttaatgcgcgtaataaattcggaactactccattttattgtggaattatacacggtatctcgcttataaaactatatttggaatcagacacagagttagaaatagataatgaacatatagttcgtcatttaataatttttgatgctgttgaatctttagattatctattatccagaggagttattgatattaactatcgtactatatacaacgaaacatctatttacgacgctgtcagttataatgcgtataatacgttggtctatctattaaacagaaatggtgattttgagacgattactactagtggatgtacatgtatttcggaagcagtcgcaaacaacaacaaaataataatggaagtactattgtctaaacgaccatctttgaaaattatgatacagtctatgatagcaattactaaaaataaacaacataatgcagatttattgaaaatgtgtataaaatatactgcgtgtatgaccgattatgatactcttatagatgtacagtcgctacagcaatataaatggtatattttaaaatgtttcgatgaaatagatatcatgaagagatgttatataaaaaataaaactgtattccaattagttttttgtatcaaagacattaatactttaatgagatatggtaaacatccttctttcgtgaagtgcactagtctcgacgtatacggaagtcgtgtacgtaatatcatagcatctattagatatcgtcagagattaattagtctattatccaagaagctggatgcgggagataaatggtcgtgttttcctaacgaaataaaatataaaatattggaaaactttaacgataacgaactatccacatatctaaaaatcttataaacactattaaaatataaaatctaagtaggataaaatcacactacatcattgtttccttttagtgctcgacagtgtatactatttttaacactcataaataaaaatgaaaacgatttccgttgttacgttgttatgcgtactacctgctgttgtttattcaacatgtactgtacccactatgaataacgctaaattaacgtctaccgaaacatcgtttaatgataaacagaaagttacatttacatgtgatcagggatatcattctttggatccaaatgctgtctgcgaaacagataaatggaaatacgaaaatccatgcaagaaaatgtgcacagtttctgattatgtctctgaattatatgataagccattatacgaagtgaattccaccatgacactaagttgcaacggcgaaacaaaatattttcgttgcgaagaaaaaaatggaaatacttcttggaatgatactgttacgtgtcctaatgcggaatgtcaacctcttcaattagaacacggatcgtgtcaaccagttaaagaaaaatactcatttggggaatatatgactatcaactgtgatgttggatatgaggttattggtgcttcgtacataagttgtacagctaattcttggaatgttattccatcatgtcaacaaaaatgtgatataccgtctctatctaatggattaatttccggatctacattttctatcggtggcgttatacatcttagttgtaaaagtggttttatactaacgggatctccatcatccacatgtatcgacggtaaatggaatcccatactcccaacatgtgtacgatctaacgaaaaatttgatccagtggatgatggtcccgacgatgagacagatttgagcaaactctcgaaagacgttgtacaatatgaacaagaaatagaatcgttagaagcaacttatcatataatcatagtggcgttaacaattatgggcgtcatatttttaatctccgttatagtattagtttgttcctgtgacaaaaataatgaccaatataagttccataaattgctaccgtaaatataaatccgttaaaataattaataatttaataacaaacaagtatcaaaagattaaagacttatagctagaatcaattgagatgtcttcttcagtggatgttgatatctacgatgccgttagagcatttttactcaggcactattataacaagagatttattgtgtatggaagaagtaacgccatattacataatatatacaggctatttacaagatgcgccgttataccgttcgatgatatagtacgtactatgccaaatgaatcacgtgttaaacaatgggtgatggatacacttaatggtataatgatgaatgaacgcgatgtttctgtaagcgttggcaccggaatactattcatggaaatgtttttcgattacaataaaaatagtatcaacaatcaactaatgtatgatataattaatagcgtatctataattctagctaatgagagatatagaagcgcttttaacgacgatggtatatacatccgtagaaatatgattaacaagttgtacggatacgcatctctaactactattggcacgatcgctggaggtgtttgttattatctgttgatgcatctagttagtttgtataaataattatttcaatatactagttaaaattttaagattttaaatgtataaaaaactaataacgtttttatttgtaataggtgcattagcatcctattcgaataatgagtacactccgtttaataaactgagtgtaaaactctatatagatggagtagataatatagaaaattcatatactgatgataataatgaattggtgttaaattttaaagagtacacaatttctattattacagagtcatgcgacgtcggatttgattccatagatatagatgttataaacgactataaaattattgatatgtataccattgactcgtctactattcaacgcagaggtcacacgtgtagaatatctaccaaattatcatgccattatgataagtacccttatattcacaaatatgatggtgatgagcaacaatattctattactgcagagggaaaatgctataaaggaataaaatatgaaataagtatgatcaacgatgatactctattgagaaaacatactcttaaaattggatctacttatatatttgatcgtcatggacatagtaatacatattattcaaaatatgatttttaaaaatttaaaatatattatcacttcagtgacagtagtcaaataacaaacaacaccatgagatatattataattctcgcagttttgttcattaatagtatacacgctaaaataactagttataagtttgaatccgtcaattttgattccaaaattgaatggactggggatggtctatacaatatatcccttaaaaattatggcatcaagacgtggcaaacaatgtatacaaatgtaccagaaggaacatacgacatatccgcatttccaaagaatgatttcgtatctttctgggttaaatttgaacaaggcgattataaagtggaagagtattgtacgggactatgcgtcgaagtaaaaattggaccaccgactgtaacattgactgaatacgacgaccatatcaatttgtacatcgagcatccgtatgctactagaggtagcaaaaagattcctatttacaaacgcggtgacatgtgtgatatctacttgttgtatacggctaacttcacattcggagattctaaagaaccagtaccatatgatatcgatgactacgattgcacgtctacaggttgcagcatagactttgtcacaacagaaaaagtgtgcgtgacagcacagggagccacagaagggtttctcgaaaaaattactccatggagttcgaaagtatgtctgacacctaaaaagagtgtatatacatgcgcaattagatccaaagaagatgttcccaatttcaaggacaaaatggccagagttatcaagagaaaatttaataaacagtctcaatcttatttaactaaatttctcggtagcacatcaaatgatgttaccacttttcttagcatgcttaacttgactaaatattcataactaatttttattaatgatacaaaaacgaaataaaactgcatattatacactggttaacgcccttataggctctaaccattttcaagatgaggtccctgattatagtccttctgttcccctctatcatctactccatgtctattagacgatgtgagaagactgaagaggaaacatggggattgaaaatagggttgtgtataattgccaaagatttctatcccgaaagaactgattgcagtgttcatctcccaactgcaagtgaaggattgataactgaaggcaatggattcagggatatacgaaacaccgataaattataaaaaaagcaatgtgtccgctgtttccgttaataatactattttcgtaactggcggattattcataaataactctaatagcacgatcgtggttaacaatatggaaaaacttgacatttataaagacaaacaatggtcgattatagaaatgcctatggctagggtatatcacggcatcgactcgacatttggaatgttatattttgccggaggtctatccgttaccgaacaatatggtaatttagagaaaaacaacgagatatcttgttacaatcctagaacgaataagtggtttgatatttcatatactatttataagatatccatatcatcattgtgtaaactaaataacgtcttctatgtatttagtaaggacattggatatgtggaaaagtatgatggtgcatggaagttagtacatgatcgtctccccgctataaaggcattatcaacttctccttattgattgaaaatgaaaatataaatagtttttatgtatagcagtattaccctatagttttattgcttactactaacatggatacagatgttacaaatgtagaagatatcataaatgaaatagatagagagaaagaagaaatactaaaaaatgtagaaattgaaaataataaaaacattaacaagaatcatccaagtggatatattagagaagcactcgttattaatacaagtagtaatagtgattccattgataaagaagttatagaatgtatcagtcacgatgtaggaatatagatcatatctactaatttttataatcgatacaaaacataaaaaacaactcgttattacatagcaggcatggaatccttcaagtattgttttgataacgatggcaagaaatggattatcggaaatactttatattctggtaattcaatactatataaggtcagaaaaaatttcactagttcgttctacaattacgtaatgaaaatagatcacaaatcacacaagccattgttgtctgaaatacgattctatatatctgtattggatcctttgactatcgacaactggacacgggaacgtggtataaagtatttggctattccagatctgtatggaattggagaaaccgatgattatatgttcttcgttataaagaattcgggaagagtattcgccccaaaggatactgaatcagtcttcgaagcatgcgtcactatgataaacacgttagagtttatacactctcgaggatttacccatggaaaaatagaaccgaggaatatactgattagaaataaacgtctttcactaattgactattctagaactaacaaactatacaagagtggaaactcacatatagattacaacgaggacatgataacttcaggaaatatcaattatatgtgtgtagacaatcatcttggagcaacagtttcaaaacgaggagatttagaaatgttgggatattgcatgatagaatggttcggtggcaaacttccatggaaaaacgaaagtagtataaaagtaataaaacaaaaaaaagaatataaaaaatttatagctactttctttgaggactgttttcctgaaggaaatgaacctctggaattagttagatatatagaattagtatacacgttagattattctcaaactcctaattatgacagactacgtaaactgtttatacaagattgaaattatattctttttttatagagtgtggtagtgttacggatatctaatattaatattagactatctctatcgcgctacacgaccaatatcgattactatggatatcttcagggaaatcgcatcttctatgaaaggagagaatgtattcatttctccagcgtcaatctcgtcagtattgacaatactgtattatggagctaatggatccactgctgaacagctatcaaaatatgtagaaacggaggagaacacggataaggttagcgctcagaatatctcattcaaatccatgaataaagtatatgggcgatattctgccgtgtttaaagattcctttttgagaaaaattggcgataagtttcaaactgttgacttcactgattgtcgcactatagatgcaatcaacaagtgtgtagatatctttactgaggggaaaatcaatccactattggatgaaccattgtctcctgatacctgtctcctagcaattagtgccgtatactttaaagcaaaatggttgatgccattcgaaaaggaatttaccagtgattatcccttttacgtatctccgacggaaatggtagatgtaagtatgatgtctatgtacggcaaggcatttaatcacgcatctgtaaaggaatcattcggcaacttttcaatcatagaactgccatatgttggagatactagtatgatggtcattcttccagacaagattgatggattagaatccatagaacaaaatctaacagatacaaattttaagaaatggtgtaactctctggaagctacgtttatcgatgttcacattcccaagtttaaggtaacaggttcgtataatcttgtggatactctagtaaagtcaggactgacagaggtgttcggttcaactggagattatagcaatatgtgtaattcagatgtgagtgtcgacgctatgattcacaaaacgtatatagatgtcaatgaagagtatacagaagcagctgcagcaacttgtgcactggtgtcagactgtgcatcaacaattacaaatgagttctgtgtagatcatccgttcatctatgtgattaggcatgttgatggaaaaattcttttcgttggtagatattgctctccgacaactaattgttaaccattttttttaaaaaaatagaaaaaacatgtggtattagtgcaggtcgttgttcttccaattgcaattggtaagatgacggccaactttagtacccacgtcttttcaccacagcactgtggatgtgacagactgaccagtattgatgacgtcagacaatgtttgactgaatatatttattggtcgtcctatgcataccgcaacaggcaatgcgctggacagttgtattccacactcctctcttttagagatgatgcggaatcagtgttcatcgacattcgcgagctggtaaaaaatatgccgtgggatgatgtcaaagattgtacagaaatcatccgttgttatataccggatgagcaaaaaaccatcagagagatttcggccatcatcggactttgtgcatatgctgctacttactggggaggtgaagaccatcccactagtaacagtctgaacgcattgtttgtgatgcttgagatgctcaattacgtggattataacatcatattccggcgtatgaattgatgagttgtacatcttgacattttctttcttctcttctccctttcttctcttctcccttcctccctcttctccctttcccagaaacaaacttttttacccactataaaataaaatgagtatactacctattatatttcttcctatatttttttattcttcattcgttcagacttttaacgcgcctgaatgtatcgacaaagggcaatattttgcatcattcatggagttagaaaacgagccagtaatcttaccatgtcctcaaataaatacgctatcatccggatataatatattagatattttatgggaaaaacgaggagcggataatgatagaattataccgatagataatggtagcaatatgctaattctgaacccgacacaatcagactctggtatttatatatgcattaccacgaacgaaacctactgtgacatgatgtcgttaaatttgacaatcgtgtctgtctcagaatcaaatatagatcttatctcgtatccacaaatagtaaatgagagatctactggcgaaatggtatgtcccaatattaatgcatttattgctagtaacgtaaacgcagatattatatggagcggacatcgacgccttagaaataagagacttaaacaacggacacctggaattattaccatagaagatgttagaaaaaatgatgctggttattatacatgtgttttagaatatatatacagaggtaaaacatataacgtaaccagaattgtaaaattagaggtacgggataaaataataccttctactatgcaattaccagatggcattgtaacttcaataggtagtaatttgactattgcgtgtagagtatcgttgagacctcccacaacggatgcagacgtcttttggataagtaatggtatgtattacgaagaagatgatggggacggagacggtagaataagtgtagcaaataaaatctatatgaccgataagagacgtgttattacatcccggttaaacattaatcctgtcaaggaagaagatgctacaacgtttacgtgtatggcgtttactattcctagcatcagcaaaacagttactgttagtataacgtgaatgtatgttgttacatttccatgtcaattgagtttataagaatttttatacattatcttccaacaaacaattgacgaacgtattgctatgattaactcccacgatactatgcatattattaatcattaacttgcagactatacctagtgctattttgacatactcatgttcttgtgtaattgcggtatctatattattaaagtacgtaaatctagctatagttttattatttaattttagataatataccgtctccttatttttaaaaattgccacatcctttattaaatcatgaatgggaatttctatgtcatcgttagtatattgtgaacaacaagagcagatatctataggaaagggtggaatgcgatacattgatctatgtagttttaaaacacacgcgaactttgaagaatttatataaatcattccatcgatacatccttctatgttgacatgtatatatccaggaattcttttattaatgtcaggaaatgtataaactaaaacattgcccgaaagcggtgcctctatctgcgttatatccgttcttaacttacaaaatgtaaccaatacctttgcatgacttgttttgttcggcaacgttagtttaaacttgacgaatggattaattacaatagcatgatccgcgcatctattaagtttttttactttaacgcccttgtatgtttttacagagactttatctaaatttctagtacttgtatgtgttataaatataacgggatatagaactgaatcacctaccttagatacccaattacattttatcagatccagataataaacaaattttgtcgccctaactaattctatattgttatatattttacaattggttatgatatcatgtaataacttggagtctaacgcgcatcgtcgtacgtttatacaattgtgatttagtgtagtatatctacacatgtatttttccgcactatagtattctggactagtgataaaactatcgttatatctgtcttcaatgaactcatcgagatattgctctctgtcatattcatacacctgcataaactttctagacatcttacaatccgtgttattttaggatcatatttacatatttacgggtatatcaaagatgttagattagttaatgggaatcgtctataataatgaatattaaacaattatatgaggacttttaccacaaagcatcataaaaatgagtcgtcgtctgatttatgttttaaatatcaaccgcaaatcaactcataaaatacaagagaatgaaatatatacatattttagtcattgcaatatagaccatacttctacagaacttgattttgtagttaaaaactatgatctaaacagacgacaacatgtaactgggtatactgcactacactgctatttgtataataattactttacaaacgatgtactgaagatattattaaatcatgacgtaaatgtaacgatgaaaaccagtagcggacgtatgcctgtttatatattgcttactagatgttgcaatatttcacatgatgtagtgatagatatgatagacaaagataaaaaccacttattacatagagactattccaacctattactagagtatataaaatctcgttacatgttattaaaggaagaggatatcgatgagaacatagtatccactttattagataagggaatcgatcctaactttaaacaagacggatatacagcgttacattattattatttgtgtctcgcacacgtttataaaccaggtgagtgtagaaaaccgataacgataaaaaaggccaagcgaattatttctttgtttatacaacatggagctaatctaaacgcgttagataattgtggtaatacaccattccatttgtatcttagtattgaaatgtgtaataatattcatatgactaaaatgctgttgacttttaatccgaatttcaaaatatgtaataatcatggattaacgcctatactatgttatataacttccgactacatacaacacgatattcttgttatgttaatacatcactatgaaacaaatgttggagaaatgccgatagatgagcgtcgtatgatcgtattcgagtttatcaaaacatattctacacgtccggcagattcgataacttatttgatgaataggtttaaaaatataaatatttatacccgctatgaaggaaagacattattacacgtagcatgtgaatataataatacacacgtaatagattatcttatacgtatcaacggagatataaatgcgttaaccgacaataacaaacacgctacacaactcattatagataacaaagaaaattccccgtataccatcgattgtttactgtatatacttagatatattgtagataagaatgtgataagatcgttggtggatcaacttccatctctacctatcttcgatataaaatcatttgagaaattcatatcctactgtatacttttagatgacacattttacgataggcacgttaagaatcgcgattctaaaacgtatcgatacgcattttcaaaatacatgtcgtttgataaatacgatggtataataactaaatgtcacgacgaaacaatgttactcaaactgtccactgttctagacactacactatatgcagttttaagatgccataattcgaaaaagttaagaagatacctcaacgagttaaaaaaatataataacgataagtcctttaaaatatattctaatattatgaatgagagataccttaatgtatattataaagatatgtacgtgtcaaaggtatatgataaactatttcctgttttcacagataaaaattgtctactaacattactaccttcagaaattatatacgaaatattatacatgctgacaattaacgatctttataatatatcgtatccacctaccaaagtatagttgtatttttctcatgcgatgtgtgtaaaaaaactgatattatataaatattttagtgccgtataataaagatgacgatgaaaatgatggtacatatatatttcgtatcattattgttattgctattccacagttacgccatagacatcgaaaatgaaatcacagaattcttcaataaaatgagagatactctaccagctaaagactctaaatggttgaatccagcatgtatgttcggaggcacaatgaatgatatagccgctctaggagagccattcagcgcaaagtgtcctcctattgaagacagtcttttatcgcacagatataaagactatgtggttaaatgggagaggctagaaaagaatagacggcgacaggtttctaataaacgtgttaaacatggtgatttatggatagccaactatacatctaaattcagtaaccgtaggtatttgtgtaccgtaactacaaagaatggtgactgtgttcagggtatagttagatctcatattaaaaaacctccttcatgcattccaaaaacatatgaactaggtactcatgataagtatggcatagacttatactgtggaattctttacgcaaaacattataataatataacttggtataaagataataaggaaattaatatcgacgacattaagtattcacaaacgggaaagaaattaattattcataatccagagttagaagatagtggaagatacaactgttacgttcattacgacgacgttagaatcaagaatgatatcgtagtatcaagatgtaaaatacttacggttataccgtcgcaagaccacaggtttaaactaatactagatccaaaaatcaacgtaacgataggagaacctgccaatataacatgcactgctgtgtcaacgtcattattgattgacgatgtactgattgaatgggaaaatccatccggatggcttataggattcgattttgatgtatactctgttttaactagtagaggcggtattaccgaggcgaccttgtactttgaaaatgttactgaagaatatataggtaatacatataaatgtcgtggacacaactattattttgaaaaaacccttacaactacagtagtattggagtaaatacacaatgcatttttatatacattactgaataattattattattatttatatcgtatttgtgctataacgcgactatctaggtatttgtatctcactgatagagaacatataaatatagactctattaaacagttgtgtaaaatatcaaatcctaatagatgtggatgtacggctttacatgagtacttttataattatagatcagtcaacggaaaatacaagtatagatacaacggttactatcaatattatttatctagcgattatgaaaattataatgaatattattatgatgattatgatagaactggtatgaacagtgagagtgataatatatcaatcaaaacagaatatgaattctatgatgaaacacaagatcaaagtacacaactagtaggttacgacattaaactcaaaaccaatgaggatgattttatggctatgatagatcagtgggtgtccatgattatatagatgaatcaattaataaagtagtatatggaagagagtctcacgtaagatggcgggatatatggcaagaacataatgatggcgtatacagtataggaaaggagtgcatagataatatatacgaagacaaccataccgtagacgaattctacaagatagacagcgtatcagatgtagatgacgcggaacacatatctccgataactaatgatgtatctacacaaacatgggaaaagaaatcagagttagatagatacatggaaatgtatcctcgtcatagatatagtaagcattctgtctttaagggattttctgacaaagttagaaaaaatgatttagacatgaatgtggtaaaagaattactttctaacggtgcatctctaacaattaaggatagcagtaataaggatccaataaccgtttattttcgaagaacgataatgaatttagaaatgattgatattattaacaaacatacaactattgatgaacgaaagtatatagtacactcctatctaaaaaattataaaaatttcgattatccatttttcaggaagttagttttgactaataaacattgtctcaacaattattataatataagcgacagcaaatatggaacaccgctacatatattggcgtctaataaaaaattaataactcctaattacatgaagttattagtgtataacggaaatgatataaacgcacgaggtgaagatacacaaatgcgaactccattacacaaatatttgtgtaaatttgtatatcataatattgaatatggtatccgatactataatgaaaagattatagacgcatttatagagttaggagccgatctaactattccaaataacgatggaatgataccagtagtttactgtatacactcaaatgcagaatatggttataacaatattactaacataaagataatacgtaaactacttaatcttagtagacgtgcgtcacataatctatttagagatcgagtcatgcacgattatataagtaatacatatattgatcttgagtgtttagatattattagatcgttggatggattcgatatcaatggttactttgaaggacgtacaccacttcattgcgctatacaacataacttcactcagattgctaagtacttattagatcgaggagctgatatagtcgtacccaacacattgattatacatcagtacatacagtaaatagcatagatatggaggaggatacaaatatttcaaataaagttataaggtacaacactgtcaataatatatggaagacattacctaacttctggactggaactataaatccaggcgtggtctcgcataaagatgatatatatgttgtatgcgacatcaaagatgaaaaaaatgttaagacttgtatatttagatataacacgaatacgtataacggatgggaattggttacgacgacagaaagcagattatcagctctgcatactattcttcatgacaataccataatgatgttacattgttatgaatcgtatatgttacaagatacatttaatgtgtacactcgcgaatggaatcatatgtgtcatcaacattcgaatagttatatcatgtacaatatactacccatctactaaatataatagaataaaataaatgagtatgatcattttagataacgattgattttatcattaccgcttcattcttatattctttgcttacggaacctatatttagaaacatctactaacgattttttatgcttgcattattaatggtatgtaatatgattgattgtgtacgcaataccaatttgttaagtatgaatacggggtacaaacataaactgaaatttaacattatttatttatgatatatatcgttatcgttattgtttggtctataccatggatatctttaaagaactaatcttaaaacaccctgatgaaaatgttttgatttctccagtttctattttatctactttatctattctaaatcatggagcagctggttctacagctgaacaactatcaaaatatatagagaatatgaatgagaatacacccgatgataagaaggatgacaataatgacatggacgtagatattccgtattgtgcgacactagctaccgcaaataaaatatacggtagcgatagtatcgagttccacgcctccttcctacaaaaaataaaagacgattttcaaactgtaaactttaataatgctaaccaaacaaaggaactaatcaacgaatgggttaagacgatgacaaatggtaaaattaattccttattgactagtccgctatccattaatactcgtatgacagttgttagcgccgtccattttaaagcaatgtggaaatatccattttctaaacatcttacatatacagacaagttttatatttctaagaatatagttaccagtgttgatatgatggtgggtaccgagaataacttgcaatatgtacatattaatgaattattcggaggattctctattatcgatattccatacgagggaaactctagtatggtaattatactaccggacgacatagaaggtatatataacatagaaaaaaatataacagatgaaaaatttaaaaaatggtgtggtatgttatctactaaaagtatagacttgtatatgccaaagtttaaagtggaaatgacagaaccgtataatctggtaccgattttagaaaatttaggacttactaatatattcggatattatgcagattttagcaagatgtgtaatgaaactatcactgtagaaaaatttctacatacgacgtttatagatgttaatgaggagtatacagaagcatcggccgttacaggagtatttatgactaacttttcgatggtatatcgtacgaaggtctacataaaccatccattcatgtacatgattaaagacaacacaggacgtatactttttatagggaaatactgctatccgcaataaatataaacaaatagacttttatcacgtttatctatgtctaaatattacaaatagtaatagtataaactaaagctgataatacttaaaaaaataataatatcatttacaattaatagtataaactaaaaattaaacaaatcgttattataagtaatatcaaaatgatgatatacggattaatagcgtgtcttatattcgtgacttcatccatcgctagtccactttatattcccgttattccacccattacggaagataaatcgttcaatagtgtagaggtattagtttccttgtttagagatgaccaaaaagactatacggtaacttctcagttcaataactacactatcgataccaaagactggactatcggcgtactatccacacctgatggtttggatataccattgactaatataacttattggtcacggtttactataggtcgtgcattgttcaaatcagagtctgaggatattttccaaaagaaaatgagtattctaggtgtttctatagaatgtaagaagtcgtcgacattacttacttttttgaccgtgcgtaaaatgactcgagtatttaataaatttccagatatggcttattatcgaggagactgtttaaaagccgtttatgtaacaatgacttataaaaatactaaaactggagagactgattacacgtacctctctaatggggggttgcctgcatactatcgtaatggggtcgatggttgattattgattagtatattccttattcacacaaaaagaacatttttataaacatgaaaccactgtctaaatgtaattatgatcttgatttatagatgaagatcagcctttagaggattttaaccagtatgtttaatatgaaaaaaataaacataacatattttgagattaagcgctattgtgcttaattattttgctctataaactgaatatatagccacaattattgacgggcttgtttatgaccggcaatcatgaatttacagaaattatctctggctatatatcttactgcgacatgttcgtggtgttatgaaacatgcataagaaaaactgcgttgtatcatgacattcaattggagcatgtagaagacaataaagatagtgtagcgtcgctaccgtacaagtagtcaatcaaagagaacgtagtagattgttggctacatttaattggacagatatagctgagggtgttagaaatgagttcattaaaatatgtgatatcaacggaacatatttatataattatactattgctgttagtataattattgattccacggaagaactaccaacagttactccaattacaacaacatatgaaccttctacatataattatactatcgatgatagcactgttattactactgaagaactacaagtgactcctcatatggatctccatcgatgatacatgtattaaaatactttccgaataagtcttttaaatattgtattaattatgaaaaactatgctatgcgagtatgatgcaaagatgtttaatgatacgatactagattttatctctagcgagagatgtcgttagaatcatttatcataactacgtttaataataattcatcaacgaatatcgataacatgtgtcatttatacgttaaagtctgtccgtcttctctattgtttagactgtttgtagaatgctgtgatataaacaaactagtagaaggtacgactccgttacactgttatctaatgaatgaaggatttgaatcatctgttttaaaaaacctattaaaggagtatgtcatgaatacgtttaatgttcatgacatccattacacaaatatttaactcatgatgaagttgagaatgatatgctttctgatagtatagatagctttagctaatataaaaatatattaatccactatatattctagacttgatttaaaaccgataaactactactacgtactgtataagttgttaaaaaaaggagcagaccctaattatgtagatgatagaggtaatacttttcttcattacttctgcatctatatgtccacttatgagaaaacgtcatttaataagatgcatcgtgaaaagaaatttattaaagagttggtaaaatatgaaaccgaaagtaaataatataggaaatacacctctacataactacgtatctcaatatgatatcactctcattcctcatccacaacccattaaaaaaatggaaattaaagccctctattagcataaacggctacaggtctacctttacaatggcctctccttgtgcccagttcagaccctgtcattgccacgctactaaggactccctgaataccgtggccgacgtcagacattgtctgactgaatacatcctgtgggtttctcatagatggacccatagagaaagcgcagggtctctctacaggcttctcatctctttcagaactgatgcaacggagctctttggtggtgagttgaaggattcacttccgtgggacaatatcgacaattgcgtggagatcattaaatgtttcatcagaaatgactccatgaaaaccgccgaagaacttcgtgcaatcattggactttgtactcaatcagctatcgtctctggaagagtcttcaacgataagtatatcgacatactacttatgctgcgaaagattctgaacgagaacgactatctcaccctcttggatcatatccgcactgctaaatactaaatctccttcatgctctctcactacactttttatcatcttatgaggaatgattgccttcatcatttttcgtgaaataggaataattagcaccagaatagctatggattgcacatgtattctatgtcgtctactggatgaagatgtgacgtacaaaaaaataaaactagaaattgaaacgtgtcacaacttatcaaaacatatagatagacgaggaaacaatgcgctacattgttacgtcttcaataaatgcgatacagacattaagattgttcgactgttactctctcgcggagtcgagagactttgtagaaacaacgaaggattaactccgctaggagcatacagtaagcatagatacgtaaaatctcaaattgtgcatctactgatatccagctattcgaattcctctaacgaactcaagtcgaatataaatgatttcgatctgtattcgtatatgtcttcggataatatcgacttacgtctgctaaaatacctaattgtggataaacggatacgtccgtccaagaatacgaattatgcaatcaatggtctcggattggtggatatatacgtaacgacgcctaatccgagaccagaagtattgctatggcttcttaaatcagaatgttacagcaccggttacgtatttcgtacctgtatgtacgacagtgatatgtgtaagaactctcttcattactatatatcgtctcatagagaatctcaatctctatccaaggatgtaattaaatgtttgatcaataacaatgtttccatccatggcagagacgaaggaggatctttacccatccaatactactggtcttgctcaaccatagatatagagattgttaaattattaataaaggatgtggacacgtgtagagtatacgacgtcagccctatattagaggcggattatctaaacaagcgatttagagtaaccccatataatgtagacatggaaatcgttaatcttcttattgagagacgtcatactcttgtcgacgtaatgcgtagtattacttcttacgattccagagactataaccactacatcatcgataacattctaaagagatttagacaacaggatgaatccatcgtacaagccatgttgataaactacttacattacggcgatatggtcgttcgatgcatgttagataacggacaacaactatcctctgcacgactactttgttaataataatctcgtcgatgtaaacgtcgtaaggtttatcgtggaaaataatggacacatggctgtaaatcacgtatcgaacaatggccgtctatgtatgtacggtctgatattatcgagatttaataattgcgggtatcactgttatgaaaccatactaatagatgtatttgatatactaagcaagtacatggataatatagatatgatcgataatgagaataaaactctactatattacgcggtcgatgtcaataatatacaatttgcaaagcggttattggaatatggagcgagtgttacaacatcacgctcgataatcaatacggccatccagaaaagtagttacagaagagaaaacaaaacgaggatagttgatttattacttagctaccatcccactctagagactatgattgacgcatttaatagagatatacgctatctatatcctgaaccattattcgcctgtatcagatacgccttaatcctagatgatgattttccttctaaagtaagtatgatatctccggtcgtcataaggaactaaagcgctatagagtagacattaatagaatgaagaatgcctacatatcaggcgtctccatgtttgatatattatttaaacgaagcaaacgccacagattgagatacgcaaagaatccgacatcaaatggtacaaaaaagaactaacgtccatcattacagaaactgtaaagaacaatgagaggatcgactccatagtggacaacattaatacagacgataacttgatttcgaaattacccatggagatactttattactccattaaataatttatcatggagcgataatgtcctgtttcatttgtttccatgacatattacaaaatcgattccgtccaagatgataaaaacatttaccggcatcataaacacggagtttattttatatgtctcgcataaacattactaaaaaaatatattgttcggttttctttcacatctttaattatgaaaaagtaaatcattatgagatggacgagattgtacgcatcgttcgcgacagtatgtggtacatacctaacgtatttatggacgacggtaagaatgaaggtcacgtttctgtcaacaatgtttgtcatatgtattttacgttctttgatgtggatacatcgtctcatctgtttaagctagttattaaacactgcgatctgaataaacgaggtaactctccattacattgctatacgatgaatacacgatttaatccatctgtattaaagatattgttacaccacggcatgcgtaactttgatagcaaggatgaaaaaggacatattcctctacaccactatctgattcattcactatcaatcgataacaagatctttgatatactaacggacaccattgatgactttagtaaatcatccgatctattgctgtgttatcttagatataaattcaatgggagcttaaactattacgttctgtacaaaggatccgaccctaattgcgtcgacgaggatggactcacttctcttcattactactgtaaacacatatccacgttctacaaaagcaattattacaagttaagtcacactaagatgcgagccgagaagcgattcatctacgcgataatagattatggagcaaacattaacgcggttacacacttaccttcaacagtataccaaacatagtcctcgtgtggtgtatgctcttttatctcgaggagccgatacgaggatacgtaataatcttgattgtacacccatcatggaacgattgtgcaacaggtcatattctcataatgttactcaattggcacgaacaaaaggaagaaggacaacatctactttatctattcataaaacataatcaaggatacactctcaatatactacggtatctactagataggttcgacattcagaaagacgaatactataataccgcctttcaaaattgtaacaacaatgttgcctcatacatcggatacgacatcaaccttccgactaaagacggtattcgacttggtgtttgaaaacagaaacatcatatacaaggcggatgttgtgaatgacatcatccaccacagactgaaagtatctctacctatgattaaatcgttgttctacaagatgtcagaattctctccctacgacgattactacgtaaaaaagatactagcctactgcctattaagggacgagtcattcgcggaactacatagtaaattctgtttaaacgaggactataaaagtgtatttatgaaaaatatatcattcgataagatagattccatcatcgtgacataagtcgccttaaagagattcgaatctccgacaccgacctgtatacggtatcacagctatcttaaagccatacattcggacagacacatttcatttcccatgtacgacgatctcatagaacagtgccatctatcgatggagcataaaagtaaactcgtcgacaaagcactcaataaattagagtctaccatcggtcaatctagactatcgtatttgcctccggaaattatgcgcaatatcatctaaacagtatgttgtacggaaagaaccattacaaatattatccatgatagaaagaaaatatctatatgattggagaagtaggaaacaggaacaagacgacgattactacattattaaatcatgaagtccgtattatactcgtatatattgtttctctcatgtataataataaacggaagagatatagcaccgcatgcaccatccgatggaaagtgtaaagacaacgaatacaaacgccataatttgtgtccgggaacatacgcttccagattatgcgatagcaagactaacacacgatgtacaccctgtggttcgggtaccttcacatctcgcaataatcatttacccgcttgtctaagttgtaacggaagacgcgatcgtgtaacacgactcacaatagaatctgtgaatgctctcccggatattattgtcttctcaaaggatcatccggatgcaaggcatgtgtttcccaaacaaaatgtggaataggatacggagtatccggagacgtcatctgttctccgtgtggtctcggaacatattctcacaccgtctcttccgcagataaatgcgaacccgtacccagtaatacctttaactatatcgatgtggaaattaatctgtatcccgtcaacgacacgtcgtgtactcggacgaccactaccggtctcagtgaatccatctcaacgtcggaactaactattactatgaatcataaagactgtaatcccgtatttcgtgaggaatacttctctgtccttaataaggtagcaacttcaggtttctttacaggagaaaggtgtgcactctgaatttcgagattaaatgcaataacaaagattcttcctccaaacagttaacgaaagcaaagaatgatgacggtatcatgccgcattcggagacagtaactctagtgggcgactgtatatctagcgtcgacatctatatactatatagtaataccaatactcaagactacgaaactgatacaatctcttatcatgtgggtaatgttctcgatgtcgatagccatatgcccggtagttgcgatatacataaactgatcactaattccaaacccacccgctttttatagtaagtttttcacccataaataataaatacaataattaatttctcgtaaaagtagaaaatatattctaatttattgcatggtaaggaagtagaatcataaagaacagtactcaatcaatagcaattatgaaacaatatatcgtcctggcatgcatgtgcctgccagtcttcagcaatcatcctcatcctcatcctcgtgtacggaagaagaaaacaaacatcatatgggaatcgatgttattatcaaagtcacaaagcaagaccaaacaccgaccaatgataagatttgccaatccgtaacggaaattacagagtccgagtcagatccaaatcccgaggtggaatcagaagatgattccacatcagtcgaggatgtagatcctcctaccacttattactccatcatcggtggaggtctgagaatgaactttggattcaccaaatgtcctcagattaaatccatctcagaatccgctgatggaaacacagtgaatgctagattgtccagcgtgtccccaggacaaggtaaggactctcccgcgatcactcatgaagaagctcttgctatgatcaaagactgtgaggtgtctatcgacatcagatgtagcgaagaagagaaagacagcgacatcaagacccatccagtactcgggtctaacatctctcataagaaagtgagttacgaagatatcatcggttcaacgatcgtcgatacaaaatgtgtcaagaatctagagtttagcgttcgtatcggagacatgtgcaaggaatcatctgaacttgaggtcaaggatggattcaagtatgtcgacggatcggcatctgaaggtgcaaccgatgatacttcactcatcgattcaacaaaactcaaagcgtgtgtctgaatcgataactctattcatctgaaattggatgagtagggttaatcgaacgattcaggcacaccacgaattaaaaaagtgtaccggacactatattccggtttgcaaaacaaaaatgttcttaactacattcacaaaaagttacctctcgcgacttcttctttttctgtctcaatagtgtgatacgattatgacactattcctattcctattcctatttcctttcagggtatcacaaaaatattaaacctctttctgatggtctcataaaaaaagttttacaaaaatatttttattctctttctctctttgatggtctcataaaaaaagttttacaaaaatatttttattctctttctctctttgat

SEQ ID NO: 13 - DNA, 197785 bp, Vaccinia virus
  source 1..197785: mol_type = other DNA
  misc_feature 1..197785: note = VIR71
atcaaagagagaaagagaataaaaatatttttgtaaaactttttttatgagaccatcaaagagagaaagagaataaaaatatttttgtaaaactttttttatgagaccatcagaaagaggtttaatatttttgtgataccctgaaaggaaataggaataggaataggaatagtgtcataatcgtatcacactattgagacagaaaaagaagaagtcgcgagaggtaactttttgtgaatgtagttaagaacatttttgttttgcaaaccggaatatagtgtccggtacacttttttaattcgtggtgtgcctgaatcgttcgattaaccctactcatccaatttcagatgaatagagttatcgattcagacacacgctttgagttttgttgaatcgatgagtgaagtatcatcggttgcaccttcagatgccgatccgtcgacatacttgaatccatccttgacctcaagttcagatgattccttgcacatgtctccgatacgaacgctaaactctagattcttgacacattttgtatcgacgatcgttgaaccgatgatatcttcgtaactcactttcttatgagagatgttagacccgagtactggatgggtcttgatgtcgctgtctttctcttcttcgctacatctgatgtcgatagacacctcacagtctttgatcatagcaagagcttcttcatgagtgatcgcgggagagtccttaccttgtcctggggacacgctggacaatctagcattcactgtgtttccatcagcggattctgagatggatttaatctgaggacatttggtgaatccaaagttcattctcagacctccaccgatgatggagtaataagtggtaggaggatctacatcctcgactgatgtggaatcatcttctgattccacctcgggatttggatctgactcggactctgtaatttccgttacggattggcaaatcttatcattggtcggtgtttggtcttgctttgtgactttgataataacatcgattcccatatgatgtttgttttcttcttccgtacacgaggatgaggatgaggatgattgctgaagactggcaggcacatgcatgccaggacgatatattgtttcataattgctattgattgagtactgttctttatgattctacttccttaccatgcaataaattagaatatattttctacttttacgagaaattaattattgtatttattatttatgggtgaaaaacttactataaaaagcgggtgggtttggaattagtgatcagtttatgtatatcgcaactaccgggcatatggctatcgacatcgagaacattacccacatgataagagattgtatcagtttcgtagtcttgagtattggtattactatatagtatatagatgtcgacgctagatatacagtcgcccactagagttactgtctccgaatgcggcatgataccgtcatcattctttgctttcgttaactgtttggaggaagaatctttgttattgcatttaatctcgaaattcagagtgcacacctttctcctgtaaagaaacctgaagttgctaccttattaaggacagagaagtattcctcacgaaatacgggattacagtctttatgattcatagtaatagttagttccgacgttgagatggattcactgagaccggtagtggtcgtccgagtacacgacgtgtcgttgacgggatacagattaatttccacatcgatatagttaaaggtattactgggtacgggttcgcatttatctgcggaagagacggtgtgagaatatgttccgagaccacacggagaacagatgacgtctccggatactccgtatcctattccacattttgtttgggaaacacatgccttgcatccggatgatcctttgagaagacaataatatccgggagagcattcacagattctattgtgagtcgtgttacacgatcgcgtcttccgttacaacttagacaagcgggtaaatgattattgcgagatgtgaaggtacccgaaccacagggtgtacatcgtgtgttagtcttgctatcgcataatctggaagcgtatgttcccggacacaaattatggcgtttgtattcgttgtctttacactttccatcggatggtgcatgcggtgctatatctcttccgtttattattatacatgagagaaacaatatatacgagtataatacggacttcatgatttaataatgtagtaatcgtcgtcttgttcctgtttcctacttctccaatcatatagatattttctttctatcatggataatatttgtaatggttctttccgtacaacatactgtttagatgatattgcgcataatttccggaggcaaatacgatagtctagattgaccgatggtagactctaatttattgagtgctttgtcgacgagtttacttttatgctccatcgatagatggcactgttctatgagatcgtcgtacatgggaaatgaaatgtgtctgtccgaatgtatggctttaagatagctgtgataccgtatacaggtcggtgtcggagattcgaatctctttaaggcgacttatgtcacgatgatggaatctatcttatcgaatgatatatttttcataaatacacttttatagtcctcgtttaaacagaatttactatgtagttccgcgaatgactcgtcccttaataggcagtaggctagtatcttttttacgtagtaatcgtcgtagggagagaattctgacatcttgtagaacaacgatttaatcataggtagagatactttcagtctgtggtggatgatgtcattcacaacatccgccttgtatatgatgtttctgttttcaaacaccaagtcgaataccgtctttagtcggaaggttgatgtcgtatccgatgtatgaggcaacattgttgttacaattttgaaaggcggtattatagtattcgtctttctgaatgtcgaacctatctagtagataccgtagtatattgagagtgtatccttgattatgttttatgaatagataaagtagatgttgtccttcttccttttgttcgtgccaattgagtaacattatgagaatatgacctgttgcacaatcgttccatgatgggtgtacaatcaagattattacgtatcctcgtatcggctcctcgagataaaagagcatacaccacacgaggactatgtttggtatactgttgaaggtaagtgtgtaaccgcgttaatgtttgctccataatctattatcgcgtagatgaatcgcttctcggctcgcatcttagtgtgacttaacttgtaataattgcttttgtagaacgtggatatgtgtttacagtagtaatgaagagaagtgagtccatcctcgtcgacgcaattagggtcggatcctttgtacagaacgtaatagtttaagctcccattgaatttatatctaagataacacagcaatagatcggatgatttactaaagtcatcaatggtgtccgttagtatatcaaagatcttgttatcgattgatagtgaatgaatcagatagtggtgtagaggaatatgtcctttttcatccttgctatcaaagttacgcatgccgtggtgtaacaatatctttaatacagatggattaaatcgtgtattcatcgtatagcaatgtaatggagagttacctcgtttattcagatcgcagtgtttaataactagcttaaacagatgagacgatgtatccacatcaaagaacgtaaaatacatatgacaaacattgttgacagaaacgtgaccttcattcttaccgtcgtccataaatacgttaggtatgtaccacatactgtcgcgaacgatgcgtacaatctcgtccatctcataatgatttactttttcataattaaagatgtgaaagaaaaccgaacaatatatttttttagtaatgtttatgcgagacatataaaataaactccgtgtttatgatgccggtaaatgtttttatcatcttggacggaatcgattttgtaatatgtcatggaaacaaatgaaacaggacattatcgctccatgataaattatttaatggagtaataaagtatctccatgggtaatttcgaaatcaagttatcgtctgtattaatgttgtccactatggagtcgatcctctcattgttctttacagtttctgtaatgatggacgttagttcttttttgtaccatttgatgtcggattctttgcgtatctcaatctgtggcgtttgcttcgtttaaataatatatcaaacatggagacgcctgatatgtaggcattcttcattctattaatgtctactctatagcgctttagttccttatgacgaccggagatatcatacttactttagaaggaaaatcatcatctaggattaaggcgtatctgatacaggcgaataatggttcaggatatagatagcgtatatctctattaaatgcgtcaatcatagtctctagagtgggatggtagctaagtaataaatcaactatcctcgttttgttttctcttctgtaactacttttctggatggccgtattgattatcgagcgtgatgttgtaacactcgctccatattccaataaccgctttgcaaattgtatattattgacatcgaccgcgtaatatagtagagttttattctcattatcgatcatatctatattatccatgtacttgcttagtatatcaaatacatctattagtatggtttcataacagtgatacccgcaattattaaatctcgataatatcagaccgtacatacatagacggccattgttcgatacgtgatttacagccatgtgtccattattttccacgataaaccttacgacgtttacatcgacgagattattattaacaaagtagtcgtgcagaggatagttgttgtccgttatctaacatgcatcgaacgaccatatcgccgtaatgtaagtagtttatcaacatggcttgtacgatggattcatcctgttgtctaaatctctttagaatgttatcgatgatgtagtggttatagtctctggaatcgtaagaagtaatactacgcattacgtcgacaagagtatgacgtctctcaataagaagattaacgatttccatgtctacattatatggggttactctaaatcgcttgtttagataatccgcctctaatatagggctgacgtcgtatactctacacgtgtccacatcctttattaataatttaacaatctctatatctatggttgagcaagaccagtagtattggatgggtaaagatcctccttcgtctctgccatggatggaaacattgttattgatcaaacatttaattacatccttggatagagattgagattctctatgagacgatatatagtaatgaagagagttcttacacatatcactgtcgtacatacaggtacgaaatacgtaaccggtgctgtaacattctgatttaagaagccatagcaatacttctggtctcggattaggcgtcgttacgtatatatccaccaatccgagaccattgattgcataattcgtattcttggacggacgtatccgtttatccacaattaggtattttagcagacgtaagtcgatattatccgaagacatatacgaatacagatcgaaatcatttatattcgacttgagttcgttagaggaattcgaatagctggatatcagtagatgcacaatttgagattttacgtatctatgcttactgtatgctcctagcggagttaatccttcgttgtttctacaaagtctctcgactccgcgagagagtaacagtcgaacaatcttaatgtctgtatcgcatttattgaagacgtaacaatgtagcgcattgtttcctcgtctatctatatgttttgataagttgtgacacgtttcaatttctagttttatttttttgtacgtcacatcttcatccagtagacgacatagaatacatgtgcaatccatagctattctggtgctaattattcctatttcacgaaaaatgatgaaggcaatcattcctcataagatgataaaaagtgtagtgagagagcatgaaggagatttagtatttagcagtgcggatatgatccaagagggtgagatagtcgttctcgttcagaatctttcgcagcataagtagtatgtcgatatacttatcgttgaagactcttccagagacgatagctgattgagtacaaagtccaatgattgcacgaagttcttcggcggttttcatggagtcatttctgatgaaacatttaatgatctccacgcaattgtcgatattgtcccacggaagtgaatccttcaactcaccaccaaagagctccgttgcatcagttctgaaagagatgagaagcctgtagagagaccctgcgctttctctatgggtccatctatgagaaacccacaggatgtattcagtcagacaatgtctgacgtcggccacggtattcagggagtccttagtagcgtggcaatgacagggtctgaactgggcacaaggagaggccattgtaaaggtagacctgtagccgtttatgctaatagagggctttaatttccatttttttaatgggttgtggatgaggaatgagagtgatatcatattgagatacgtagttatgtagaggtgtatttcctatattatttactttcggtttcatattttaccaactctttaataaatttcttttcacgatgcatcttattaaatgacgttttctcataagtggacatatagatgcagaagtaatgaagaaaagtattacctctatcatctacataattagggtctgctcctttttttaacaacttatacagtacgtagtagtagtttatcggttttaaatcaagtctagaatatatagtggattaatatatttttatattagctaaagctatctatactatcagaaagcatatcattctcaacttcatcatgagttaaatatttgtgtaatggatgtcatgaacattaaacgtattcatgacatactcctttaataggttttttaaaacagatgattcaaatccttcattcattagataacagtgtaacggagtcgtaccttctactagtttgtttatatcacagcattctacaaacagtctaaacaatagagaagacggacagactttaacgtataaatgacacatgttatcgatattcgttgatgaattattattaaacgtagttatgataaatgattctaacgacatctctcgctagagataaaatctagtatcgtatcattaaacatctttgcatcatactcgcatagcatagtttttcataattaatacaatatttaaaagacttattcggaaagtattttaatacatgtatcatcgatggagatccatatgaggagtcacttgtagttcttcagtagtaataacagtgctatcatcgatagtataattatatgtagaaggttcatatgttgttgtaattggagtaactgttggtagttcttccgtggaatcaataattatactaacagcaatagtataattatataaatatgttccgttgatatcacatattttaatgaactcatttctaacaccctcagctatatctgtccaattaaatgtagccaacaatctactacgttctctttgattgactacttgtacggtagcgacgctacactatctttattgtcttctacatgctccaattgaatgtcatgatacaacgcagtttttcttatgcatgtttcataacaccacgaacatgtcgcagtaagatatatagccagagataatttctgtaaattcatgattgccggtcataaacaagcccgtcaataattgtggctatatattcagtttatagagcaaaataattaagcacaatagcgcttaatctcaaaatatgttatgtttatttttttcatattaaacatactggttaaaatcctctaaaggctgatcttcatctataaatcaagatcataattacatttagacagtggtttcatgtttataaaaatgttctttttgtgtgaataaggaatatactaatcaataatcaaccatcgaccccattacgatagtatgcaggcaaccccccattagagaggtacgtgtaatcagtctctccagttttagtatttttataagtcattgttacataaacggcttttaaacagtctcctcgataataagccatatctggaaatttattaaatactcgagtcattttacgcacggtcaaaaaagtaagtaatgtcgacgacttcttacattctatagaaacacctagaatactcattttcttttggaaaatatcctcagactctgatttgaacaatgcacgacctatagtaaaccgtgaccaataagttatattagtcaatggtatatccaaaccatcaggtgtggatagtacgccgatagtccagtctttggtatcgatagtgtagttattgaactgagaagttaccgtatagtctttttggtcatctctaaacaaggaaactaatacctctacactattgaacgatttatcttccgtaatgggtggaataacgggaatataaagtggactagcgatggatgaagtcacgaatataagacacgctattaatccgtatatcatcattttgatattacttataataacgatttgtttaatttttagtttatactattaattgtaaatgatattattatttttttaagtattatcagctttagtttatactattactatttgtaatatttagacatagataaacgtgataaaagtctatttgtttatatttattgcggatagcagtatttccctataaaaagtatacgtcctgtgttgtctttaatcatgtacatgaatggatggtttatgtagaccttcgtacgatataccatcgaaaagttagtcataaatactcctgtaacggccgatgcttctgtatactcctcattaacatctataaacgtcgtatgtagaaatttttctacagtgatagtttcattacacatcttgctaaaatctgcataatatccgaatatattagtaagtcctaaattttctaaaatcggtaccagattatacggttctgtcatttccactttaaactttggcatatacaagtctatacttttagtagataacataccacaccattttttaaatttttcatctgttatatttttttctatgttatatataccttctatgtcgtccggtagtataattaccatactagagtttccctcgtatggaatatcgataatagagaatcctccgaataattcattaatatgtacatattgcaagttattctcggtacccaccatcatatcaacactggtaactatattcttagaaatataaaacttgtctgtatatgtaagatgtttagaaaatggatatttccacattgctttaaaatggacggcgctaacaactgtcatacgagtattaatggatagcggactagtcaataaggaattaattttaccatttgtcatcgtcttaacccattcgttgattagttcctttgtttggttagcattattaaagtttacagtttgaaaatcgtcttttattttttgtaggaaggaggcgtggaactcgatactatcgctaccgtatattttatttgcggtagctagtgtcgcacaatacggaatatctacgtccatgtcattattgtcatccttcttatcatcgggtgtattctcattcatattctctatatattttgatagttgttcagctgtagaaccagctgctccatgatttagaatagataaagtagataaaatagaaactggagaaatcaaaacattttcatcagggtgttttaagattagttctttaaagatatccatggtatagaccaaacaataacgataacgatatatatcataaataaataatgttaaatttcagtttatgtttgtaccccgtattcatacttaacaaattggtattgcgtacacaatcaatcatattacataccattaataatgcaagcataaaaaatcgttagtagatgtttctaaatataggttccgtaagcaaagaatataagaatgaagcggtaatgataaaatcaatcgttatctaaaatgatcatactcatttattttattctattatattaacacatacatttttaacagcaacacattcaatattgtattgttatttttatattatttacacaattaacaatatattattagtttatattactgaattaataatataaaattcccaatcttgtcataaacacacactgagaaacagcataaacacaaaatccatcaaaaatgtcgatgaaatatctgatgttgttgttcgctgctatgataatcagatcattcgccgatagtggtaacgctatcgaaacgacattgccagaaattacaaacgctacaacagatattccagctatcagattatgcggtccagagggagatggatattgtttacacggtgactgtatccacgctagagatatcgacggtatgtattgtagatgctctcatggttatacaggcattagatgtcagcatgtagtattagtagactatcaacgttcagaaaaaccaaacactacaacgtcatatatcccatctcccggtattgtgcttgtattagtaggcattattattatgtgttgtctattatctgtttataggttcactcgaagaactaataaactacctctacaagatatggttgtgccataatttttataaatttttttatgagtatttttacaaaaaaaatgtataaagtgtatgtcttatgtatatttataaaaatgctaagtatgcgatgtatctatgttatttgtatttatctaaacaatacctctacctctagatattatacaaaaattttttatttcggcatattaaagtaaaatctagttaccttgaaaatgaatacagtgggtggttccgtatcaccagtaagaacataatagtcgaatacagtatccgattgagattttgcatacaatactagtctagaaagaaatttgtaatcattttctgtgacgggagtccatatatctgtatcatcgtctagtttatcagtgtcccatgctatatttctgttatcatcattagttaatgaaaataactctcgtgcttcagaaaagtcaaatattgtatccatacatacatctccaaaactatcgcttatacgtttatctttaacgatacctatacctagatggttatttactaacagacattttccagatctattgactataactcctatagtttccacatcaaccaagtaatgatcatctattgttatataacaataacataactcttttccatttttatcagtatgtatatctatatcaacgtcgtcgttgtagtgaatagtagtcattgatctattatatgaaacggatatgtctagaacggcaattgtcttacgtccagttaacactttcgttgatttaaagtctagagtctttgcaaacataatatccttatccgactttatatttcctgtagggtggtataattttattttgcctccacatatcggtgtttccaaatatattactagacaatattccatatagttattagttaagggtacccaattagaacacgtacgcttattatcatcatttggatcgtatttcataaaagttattgtactatcgatgtcaacacattctacattttttaatcgtctatatagtatttttctgatattttctataatatcagaattgtcttccatcggaagttgtatactatcggaatcagttacatgtttaaataattctctgatgtcattccttatacaatcaaattcattattaaacagtttaatagtctgtagacctttatcgtcgtaaatatccattgtcttattagttacgcttatttttatgtgttttacgttgctttattatattttataagaatgattgtttgacgaatcacgagaactattaagacacattattaggtatatattataaaaaagtttttgattacgatgttataagaggaaagaggacacattaacatcatacatcaattaactacattcttataacatcgtaatcaaaagaattgcaattttgatgtataacaactgtcaatgggttatggaattgtatattacatattatacggtatgttggtaacgacaaataccgatcggtaatcgtttgccggtgtaatagaattatatatatctatctattacaccggctgagtatacataataataagttgtggtagtatgatctccatatttataatttaggactttgtattcagtatttttggaatcataaaaaataaaaaaaagttttactaatttaaaatttaaaaagtatttacatttttttcactgtttagtcgcggatatggaattcgatcctgccaaaatcaatacatcatctatagatcatgtaacaatattacaatacatagatgaaccaaatgatataagactaacagtatgcattatccgaaatattaataacattacatattatatcaatatcacaaaaataaatacacatttggctaatcaatttcgggcttggaaaaaacgtatcgccggaagggactatatgactaacttatctagagatacaggaatacaacaatcaaaacttactgaaactatacgtaactgtcaaaaaaatagaaacatatatggtctatatatacactacaatttagttattaatgtggttattgattggataaccgatgtgattgttcaatcaatattaagagggttggtaaattggtacatagctaataatacctatactccaaatacacccaataatacaacaaccatttctgagttggatatcatcaaaatactaaataaatacgaggacgtgtatagagtaagtaaagaaaaagaatgtggaatttgctatgaagttgtttactcaaaacgattagaaaacgatagatactttggtttattggattcgtgtactcatatattttgcataacatgcatcaatatatggcataaaacacgaagagaaaccggtgcgtcggataattgtcctatatgtcgtacccgttttagaaacataacaatgagcaagttctataagctagttaactaataaataaaaagtttaatttgttgacgacgtatgtcgttattttttctcgtataaaagattaatttgattctaatataatctttagtattggataaatatcaattcaaattaattccattagattatatcataaataaaaatagtagcacgcactacttcagccaaatattcttttttgaaacgccatctatcgtagtgaggacacaagtgaacctataatgagcaaatttattagtatcggttacatgaaggactttacgtagagtggtgattccactatctgtggtacgaacggtttcatcttctttgatgccatcacccagatgttctataaacttggtatcctcgtccgatttcatatcctttgccaaccaatacatatagctaaactcaggcatatgttccacacatcctgaacaatgaaattctccagaagatgttacaatgtctagatttggacatttggtttcaaccgcgttaacatatgagtgaacacacccatacatgaaagcgatgagaaataggattttcatcttgccaaaatatcactagaaaaaatttatttatcaattttaaaggtataaaaaatacttattgttgctcgaatattttgtatttgatggtatacggaagattagaaatgtaggtattatcatcaactgattctatggttttatgtattctatcatgtttcactattgcgttggaaataatatcatatgcttccacatatattttattttgttttaactcataatactcacgtaattctggattattggcatatctgtgaataattttagctccatgatcagtaaatattaatgagaacatagtattaccacctaccattatttttttcatttcgttcaattcttgattgcaaagatctatataatcattatagcgttgacttatggactctggaatcttagacgatgtacagtcatctataatcatggcatatttaatacattgttttatagcatagtagttatctacgatgttagatatttctctcaatgaatcaatcacacaatctaatgtaggtttatgacataatagcattttcagcagttcaatgtttctagattcgttgatggcaatggctatacatgtatatccgttatttgatctaatgttgacatctgaaccggattctagcagtaaagatactagagattgtttattatatctaacagccttgtgaagaagtgtttctcctcgtttgtcaatcatgttaatgtctttaagataaggtaggcaaatgtttatagtactaagaattgggcaagcataagacatgtcacaaagaccctttttgtatgtataagtgtagaaattataacatccatagttggatttacataggtgtccaatcgggatctctccatcatcgagatgattgacggcatctcccccttccttttttagtagatatttcatcgtgtaagaatcaatattaatatttctaaagtatccgtgtatagcctctttatttaccacagctccatattccaacatgcattccactaaagggatatcgatatcgccgaatgtcatatactcaattagtatatgttggaggacatccgagttcattgttttcaatatcaaagagatggtttccttatcatttctccatagtggtacaatactacacattattccgtgaggctttccattctccaaaaacaatttgaccaaatctacatctttattgtatctataatcactatttagataatcagccataattcctcgagtgcaacatgttagatcgtctatatatgaataagccgtgttatctattcctttcattaacaatttaacgatgtctatatctatatgagatgacttaatataatattgaagagctgtacaatagtttttatctatagaagacggcttgattccgtgattaattagacatttaacaacttccggacgcacatatgctctcgtatccgactctgaatacagatgagagatgatatacagatgcaatacggtaccgcaatttcgtagttgataatcatcatacgcgtatccgtactcgtcctcataaagaacactgcagccattttctatgaacaaatcaataattttaggaacaggatcattgtcattacataattttctataactgaacgatggttttcacatttaacactcaagtcaaatccatgttctaccaacacctttatcaagtcaacgtctacatttttggatttcatatagctgaatatattaaagtcatttatgttgctaaatccagtggcttctagtagagccatcgctatatcctttaactttaacatgtctactatttgtgtattcttctaatggggtagctgtctccaatttttgcgtaatggattagtgccactgtctagtagtagtttgacgacctcgacattattacaatgctcattaaaaaggtatgcgtgtaaagcattattcttgaattggttcctggtatcattaggatctctgtctctcaacatctgtttaagttcatcgagagccacctcctcattttccaaatagtcaaacattttgactgaatagaagtgaatgagctactgtgaactctatacacccacacaactaatgtcattaaatattatttttttgaatgtatttataccatgtcaaaaacttgtacaattattaataaaaataatttagtgtttaaattttaccagttccagattttacacctccgttaaccccactttttacaccactggacgaccctcctccccacattccaccgccaccagatgtataagttttagatcctttattactaccatcatgtccatggataaagacactccacatgccgccactaccccctttagaagacatattaataagacttaagagttaaggacaagtttaacaataaaattaatcacgagtaccctactaccaacctacactattatatgattatagtttctatttttacagtaccttaactaaagtttctagtcacaagagcaatactaccaacctacactattatatgattatagtttctatttttataggaacgcgtacgagaaaatcaaatgtctaatttctaacggtagtgttgataaacgattatcgtcaatggatacctcctctatcatgtcgtctattttcttactttgttctattaacttattagcattatatattatttgattataaaacttatattgcttattagcccaatctgtaaatatcggattattaacatatcgtttctttgtaggtttatttaacttgtacatcactgtaagcatgtccgtaccatttattttaatttgacgcatatccgcaatttctttttcgcagtcggttataaattctatatatgatggatacatgctacatgtgtacttataatcgactaatatgaagtacttgatacatattttcagtaacgatttattattaccacctatgaataagtacctgtgatcgtctaggtaatcaactgttttcttaatacattcgatggttggtaatttactcagaataatttccaatatcttaatatataattctgctatttctggaatatatttatctgccagtataacacaaatagtaatacatgtaaacccatattttgttattatattaatgtctgcgccattatctattaaccattctactaggctgacactatgcgacttaatacaatgataaagtatactacatccatgtttatctattttgtttatatcatcaatatacggcttacaaagttttagtatcgataacacatccaactcacgcatagagaaggtagggaataatggcataatatttattaggttatcatcattgtcattatctacaactaagtttccattttttaaaatatactcgacaactttaggatctctattgccaaatttttgaaaatatttatttatatgcttaaatctatataatgtagctccttcatcaatcatacatttaataacattgatgtatactgtatgataagatacatattctaacaatagatcttgtatagaatctgtatatcttttaagaattgtggatattaggatattattacgtaaactattacacaattctaaaatataaaacgtatcacggtcgaataatagttgatcaactatataattatcgattttgtgatttttcttcctaaactgtttacgtaaatagttagatagaatattcattagttcatgaccactatagttactatcgaataacgcgtcaaatatttcccgtttaatatcgcatttgtcaagataataatagagtgtggtatgttcacgataagtataataacgcatctctttttcgtgtgaaattaaatagtttatcacgtccaaagatgtagcataaccatcttgtgacctagtaataatataataatagagaactgttttacccattctatcatcataatcagtggtgtagtcgtaatcgtaatcgtctaattcatcatcccaattataatattcaccagcacgtctaatctgttctattttgatcttgtatccatactgtatgttgctacatgtaggtattcctttatccaataatagtttaaacacatctacattgggatttgatgttgtagcgtatttctctacaatattaataccatttttgatactatttatttctatacctttcgaaattagtaatttcaataagtctatatcgatgttatcagaacatagatattcgaatatatcaaaatcattgatatttttatagtcgactgacgacaataacaaaatcacaacatcgtttttgatattattatttttcttggtaacgtatgcctttaatggagtttcaccatcatactcatataatggatttgcaccactttctatcaatgattgtgcactgctggcatcgatgttaaatgttttacaactatcatagagtatcttatcgttaaccatgattggttgttgatgctatcgcattttttggtttctttcatttcagttatgtatggatttagcacgtttgggaagcataagctcatatgatttcagtactgtagtgtcagtactattagtttcgatcagatcaatgtctagatctatagaatcaaaacacgataggtcagaagataatgaatatctgtaggcttcttgttgtactgtaacttctcgttttgttagatggttgcatcgtgctttaacatcaatggtacaaattttatcctcgctttgtgtatcatattcgtccctactataaaattgtatattcagattatcatgagatgtgtatacgctaacggtatcaataaacggagcacaccatttagtcataaccgtaatccaaaaatttttaaagtatatcttaacgaaagaagttgtgtcattgtctacggtgtatggtactagatcctcataagtgtatatatctagagtaatgtttaatttatcaaatggttgataatatggatcctcatggcaatttcctaagacgaaaataagacataaacacgcaataaatctaattgcggacatggttactccttaaaaaaatactaataatcaccttggctatttagtaagtgtcatttaacactatactcatattaatccatggactcataatctctatacgggattaacggatgttctatatacggggatgagtagttctcttctttaactttatactttttactaatcatatttagactgatgtatgggtaatagtgtttgaagagctcgttctcatcatcagaataaatcaatatctctgtttttttgttatacagatgtattacagcctcatatattacgtaatagaacgtgtcatctaccttattaactttcaccgcatagttgtttgcaaatacggttaatcctttgacctcgtcgatttccgaccaatctgggcgtataatgaatctaaactttaatttcttgtaatcattcgaaataatttttagtttgcatccgtagttatcccctttatgtaactgtaaatttctcaacgcgatatctccattaataatgatgtcgaattcgtgctgtatacccatactgaatggatgaacgaataccgacggcgttaatagtaatttactttttcatctttacatattgggtactagttttactatcataagtttataaattccacaagctactatggaataagccaaccatcttagtataacacacatgtcttaaagtttattaattaattacatgttgttttatatatcgctacgaatttaaacagagaaatcagtttaggaaaaaaaattatctatctacatcatcacgtctctgtattctacgatagagtgctactttaagatgagacatatccgtgtcatcaaaaatatactccattaaaatgattattccggcagcgaacttgatattggatatatcacaacctttgttaatatctacgacaatagacagcagtcccatggttccataaacagtgagtttatctttctttgaagagatattttgtagagatcttataaaactgtcgaatgacatcgcatttatatctttagctaaatcgtatatgttaccatcgtaatatctaaccgcgtctatcttaaacgtttccatcgctttaaagacgtttccgatagatggtctcatttcatcagtcatactgagccaacaaatataatcgtgtataacatctttgatagaatcagactctaaagaaaacgaatcggctttattatacgcattcatgataaacttaatgaaaaatgtttttcgttgtttaagttggatgaatagtatgtcttaataattgttattatttcattaattaatatttagtaacgagtacactctataaaaacgagaatgacataactaatcataactagttatcaaagtgtctaggacgcgtaattttcatatggtatagatcctgtaagcattgtctgtattctggagctattttctctatcgcattagtgagttcagaatatgttataaatttaaatcgaataacgaacataactttagtaaagtcgtctatattaactcttttattttctagccatcgtaataccatgtttaagatagtatattctctagttactacgatctcatcgttgtctagaatatcacatactgaatctacatccaattttagaaattggtctgtgttacatatctcttctatattattgttgatgtattgtcgtagaaaactattacgtagaccattttctttataaaacgaatatatagtactccaattatctttaccgatatatttgcacacataatccattctctcaatcactacatctttaagattttcgttgttaagatatttggctaaactatataattctattagatcatcaacagaatcagtatatatttttctagatccaaagacgaactctttggcgtcctctataatattcccagaaaagatattttcgtgttttagtttatcgagatctgatctgttcatatacgccatgattgtacggtacgttatgataaccgcataaaataaaaatccattttcatttttaaccaatactattcataattgagattgatgtaatactttgttactttgaacgtaaagacagtacacggatccgtatctccaacaagcacgtagtaatcaaatttggtgttgttaaacttcgcaatatttatcaatttagatagaaacttatactcatcatctgttttaggaatccatgtattattaccactttccaacttatcattatcccaggctatgtttcgtccatcatcgttgcgcagagtgaataattcttttgtattcggtagttcaaatatataatccatgcatagatcggtaaagctattgtagatgtgatttttcctaaatctaatataaaactcgtttactagcaaacactttcctgatttatcgaccaagacacatatggtttctaaatctatcaagtggtggggatccatagttatgacgcagtaacatagattattaccttcttaactgtcgctaatatctatatatttattgttatcgtattggattctgcatatagatggcttgtatgtcaaagatatagaacacataaccaatttatagtcgcgctttacattctcgaatctaaagttaagagatttagaaaacattatatcctcggatgatgttatcactgtttctggagtaggatatattaaagtctttacagatttcgtccgattcaaataaatcactaaataatatcccacattatcatctgttagagtagtatcattaaatctattatattttatgaaagatatatcactgctcacctctatatttcgtacatttttaaactgtttgtataatatctctctgatacaatcagatatatctattgtgtcggtagacgataccgttacatttgaattaatggtgttccattttacaacttttaacaagttgaccaattcatttctaatagtatcaaacgctccatgattaaatattttaatagtatccattttatatcactacggacacaaagtagctgacataaaccattgtataatttttatgttttatgtttattagcgtacacattttggaagttccggcttccatgtatttcctggagagcaagtagatgatgaggaaccagataggttatatccgtacttgcacttaaagtttacattgtcgttgtatgagtatgatcttttaaacccgctagacaagtatccgtttgatattgtaggatgtggacatttaacaatctgacacgtgggtggatcggaccattctcctcctgaacacaggacaccagagttaccaatcaacgaatatccactattgcaactataagttacaacgcttccatcggtataaaaatcctcgtatccgttatgtcttccgttggatatagatggaggggattggcatttaacagattcacaaataggtgcctcgggattccataccatagatccagtagatcctaattcacaatacgatttagattcaccgatcaaatgatatccgctattacaagagtacgttatactagagccaaagtctactccgccaatatcaagttggccattatcgatatctcgaggcgatgggcatctccgtttaatacattgattaaagagtgtccatccagtacctgtacatttagcatatataggtcccattttttgctttctgtatccaggtagacatagatattctatagtgtctcctatgttgtaattagcattagcatcagtctccacactattcttaaatttcatattaatgggtcgtgacggaatagtacagcatgatagaacgcatcctattcccaacaatgtcaggaacgtcacgctctccaccttcatatttatttatccgtaaaaatgttatcctggacatcgtacaaataataaaaagcccatatatgttcgctattgtagaaattgtttttcacagttgctcaaaaacgatggcagtgacttatgagttacgttacactttggagtctcatctttagtaaacatatcataatattcgatattacgagttgacatatcgaacaaattccaagtatttgattttggataatattcgtattttgcatctgctataattaagatataatcaccgcaagaacacacgaacatctttcctacatggttaaagtacatgtacaattctatccatttgtcttccttaactatatatttgtatagataattacgagtctcgtgagtaattccagtaattacatagatgtcgccgtcgtactctacagcataaactatactatgatgtctaggcatgggagacttttttatccaacgatttttagtgaaacattccacatcgtttaatactacatatttttcatacgtggtataaactccacccattacatatatatcatcgtttacgaataccgacgcgcctgaatatctaggagtaattaagtttggaagtcttatccatttcgaagtgccgtgtttcaaatattctgccacacccgttgaaatagaaaattctaatcctcctattacatataactttccattgttaacacaagtactaacttctgattttaacgacgacatattagtaaccgttttccattttttcgtttcaagatctacccgcgatacggaataaacatgtctattgttaatcatgccgccaataatgtatagacaattatgtaaaacatttgcattatagaattgtctatctgtattaccgactatcgtccaatattctgttctaggagagtaatgggttattgtggatatataatcagagtttttaatgactactatattatgttttataccatttcgtgtcactggctttgtagatttggatatagttaatcccaacaatgatatagcattgcgcatagtattagtcataaacttgggatgtaaaatgttgatgatatctacatcgtttggatttttatgtatccactttaataatatcatagctgtaacatcctcatgatttacgttaacgtcttcgtgggataagatagttgtcagttcatcctttgataattttccaaattctggatcggatgtcaccgcagtaatattgttgattatttctgacatcgacgcattatatagttttttaattccatatcttttagaaaagttaaacatccttatacaatttgtggaattaatattatgaatcatagtttttacacatagatctactacaggcggaacatcaattattatggcagcaactagtatcatttctacattgtttatggtgatgtttatcttcttccagcgcatatagtctaatagcgattcaaacgcgtgatagtttataccattcaatataatcgcttcatcctttagatggtgatcctgaatgcgtttaaaaaaattatacggagatgccgtaataatttccttattcacttgtataatttccccattgatagaaaatatcacgctttccattcttgaagtactataagtaattatagtataatgtaaaggtttatatattcaatattttttataaaaaaatcatttcgacattaattcctttttaaatttccgtctatcatctatagaaacatattctatgaatttataaaatgcttttacgtgtcctatcgtaggcgatagaaccgctaaaaagcctattgaatttctacaaaagaatctattatatggtatagggagagtataaaacattaaatgcccgtacttattaaagtattcagtagccaatcctaactctttcgaatacttattaatggctcttgttctgtacgaatctatttttttgaacaacggacctagtggtatatcttgttctatgtatctaaaataatgtctgactagatccgttagtttaatatcctcagtcatcttgtctagaatggcaaatctaactgcgggtttaggctttagtttagtttttatatctacatctatgtctttatctaacaccaaaaatataatagctaatattttattacaatcatccggatattcttctacgatctcactaactaatgtttctttggttatactagtatagtcactatcggacaaataaagaaaatcagatgatcgatgaataatacatttaaattcatcatctgtaagatttttgagatgtctcattaaaatattattagggtcagtactcattatcattaggcagctattacttattttattatttttcaccatatagatcaatcattagatcatcaaaatatgtttcaatcatcctaaagagtatggtgaatgactcttcccatctaatttctgaacgttcaccaatgtctctagccactttggcactaatagcgatcattcgcttagcgtcttctatattattaactggttgattcaatctatctagcaatggaccgtcggacagcgtcattctcatgttcttaatcaatgtacatacatcgccgtcatctaccaattcatccaacaacataagctttttaaaatcatcattataataggtttgatcgttgtcatttctccaaagaatatatctaataagtagagtcctcatgcttagtaatttaactattttagttaacaactattttttatgttaaatcaattagtacaccgctatgtttaatacttattcatattttagtttttaggattgagaatcaatacaaaaattaatgcatcattaattttagaaatacttagtttccacgtagttaatgaaacatttgaactcatcgtacaagacgttctcgtacaggacgtaactataaaccggtttatatttgttcaagatagatacaaatccgataactttttttacgaattctacgggatccactttaaaagtgtcataccgggttctttttatttttttaaacagatcaatggtgtgatgttgattaggtcttttacgaatttgatatagaatagcgtttacatattctccataatggtcaatcgccatttgttcgtatgtcataaattctttaattatatgacactgtgtattgtttagttcatccttgttcattgttaggaatctatccaaaatggcaattatactagaactataggtgcgttgtatacacatattgatgtgtctgtttatacaatccatgatatttggatccatgctactaccttcgggtaaaattgtagcatcatataccatttctagtactttaggttcattattatccattgcagaggacgtcatgatcgcatcctaaaaaaatatattatttttatgttattttgttaaaaataatcatcgaatacttcgtaagatactccttcatgaacataatcagttacaaaacgtttatatgaagtaaagtatctacgatttttacaaaagtccggatgcataagtacaaagtacgcgataaacggaataataatagatttatctagtctatctttttctatagctttcatagttagatacatggtctcagaagtaggattatgtaacatcagcttcgataaaatgactgggttatttagtcttacacattcgctcatacatgtatgaccgttaactacagagtctacactaaaatgattgaacaatagatagtctaccattgtttcgtattcagatagtacagcgtagtacatggcatcttcacaaattatatcattgtctaatagatatttgacgcatcttatggatcccacttcaacagccatcttaaaatcggtaaaatcatattgctttcctttatcattaataatttctaaaacatcatctctatcataaaagatacaaatattaactgtttgatccgtaataacattgctagtcgatagcaatttgttaataagatgcgctgggctcaatgtcttaataagaagtgtaagaggactatctccgaatttgttttgtttattaacatccgttgatggaagtaaaagatctataatgtctacattcttgactgttttagagcatacaatatggagaggtgtatttccatcatgatctggttttgagggactaattcctagtttcatcatccatgagattgtagaagcttttggattgtctgacataagatgtctatgaatatgatttttgccaaatttatccactatcctggcttcgaatccgatggacattatttttttaaacactctttctgaaggatctgtacacgccaacaacggaccacatccttcttcatcaaccgagttgttaatcttggctccatactgtaccaataaatttattctctctatgacttcatcatctgttcccgagagataatatagaggcgttttatgctgtttatcacacgcgtttggatctgcgccgtgcgtcagcagcatcgcgactattctattattattaattttagaagctatatgcaatggataatttccatcatcatccgtctcatttggagagtatcctctatgaagaagttcttcgacaaatcgttcatctagtcctttaattccacaatacgcatgtagaatgtgataattatttccagaaggttcgatagcttgtagcatattcctaaatacatctaaatttttactattatatttggcataaagagatagataatactcggccgacataatgttgtccattgtagtataaaaattaatatttctatttctatttctgtatatttgcaacaatttactctctataacaaatatcataacttagttcttttatgtcaagaaggcactggtttagttcatctataaatgtcacgccataactaccacgcatgctatactcagaattatgataaagatatttatccttggggtgtaggtaatggggattaatctttgttggatcagtctctaagttaacacatgtcacacatgatccatttatagttatatcacacgatgatgatttatgaattgattccggaagatcgctatcgtattttgtggttccacaattcatttccatacatgttattgtcacactaatattatgatgaactttatctagccgctgagtggtaaacaacagaacagatagtttattatctttaccaacaccctcagccgctgccacaaatctctgatccgtatccatgatggtcatgtttatttctagtccgtatccagtcaacactatgttagcatttctgtcgatatagctttcactcatatgacactcaccaataatagtagaattaatgtcgtaatttacaccaatagtgagttcggcggcaaagtaccaataccggtaatcttgtcgaggaggacatatagtattcttgtattctaccgaatacccgagagatgcgatacaaaagagcaagactaatttgtaaaccatcttactcaaaatatgtaacaatagtacgatgcaatgagtaagacaataggaaatctatcttatatacacataattattctatcaattttaccaattagttagtgtaatgttaacaaaaatgtgggagaatctaattagtttttctttacacaattgacgtacatgagtctgagttccttgtttttgctaattatttcatccaatttattattcttgactatatcgagatcttttgtataggagtcagacttgtattcaacatgcttttctataatcattttagctatttcggcatcatccaatagtacattttccagattagcagaatagatattaatgtcgtatttgaacagagcctgtaacatctcaatgtctttattatctatagccaatttaatgtccggaatgaagagaagggaattattggtgtttgtcgacgtcatatagtcgagcaagagaatcatcatatccacgtgtccattttttatagtggtgtgaatacaactaaggagaatagccagatcaaaagtagatggtatttctgaaagaaagtatgatacaatacttacatcattaagcatgacggcatgataaaatgaagttttccatccagttttcccatagaacatcagtctccaatttttcttaacaaacagttttaccgtttgcatgttaccactatcaaccgcataatacaatgcagtgtttcccttgtcatcaaattgtgaatcatccagtccactgaatagcaaaatctttactattttggtatcttccaatgtggctgcctgatgtaatggaaattcattctctagaagatttttcaatgctccagcgttcaacaacgtacatactagacgcacgttattatcagctattgcataatacaaggcactatgtccatggacatccgccttaaatgtatctttactagagagaaagcttttcagctgcttagacttccaagtattaattcgtgacagatccatgtctgaaacgagacgctaattagtgtatattttttcattttttataattttgtcatattgcaccagaattaataatatctctaatagatctgattagtagatacatggctatcgcaaaacaacatatacacatttaataaaaataatatttattaagaaaattcagatttcacgtacccatcaatataaataaaataatgattccttacaccgtacccatattaaggagattccaccttacccataaacaatataaatccagtaatatcatgtctaatgatgaacacaaatggtgtattaaattccagtttttcaggagatgatctcgccgtagctaccataatagtagatgcctctgctacagttccttgttcgtcgacatctatctttgcattctgaaacattttataaatatataatgggtccctagtcatatgtttaaacgacgcattatctggattaaacatactaggagccatcatttcggctatcgacttaatatccctcttattttcgatagaaaatttagggagtttaagattgtacactttattccctaattgaaacgaccaatagtctaattttgcagccgtaatagaatctgtgaaatgggtcatattatcacctattgccaggtacatactaatattagcatccttatacggaaggcgtaccatgtcatattctttgtcatcgattgtgattgtatttccttgcaatttagtaactacgttcatcatgggaaccgttttcgtaccgtacttattagtaaaactagcattgcgtgttttagtgatatcaaacggatattgccatgtacctttaaaatatatagtattaatgattgcccatagagtattattgtcgagcatattagaatctactacattagacataccggatctacgttctactatagaattaattttattaaccgcatctcgtctaaagtttaatctatataggccgaatctatgatattgttgataatacgacggtttaatacacacagtattatctacgaaactttgataagttagatcagtgtacgtatatttagatgttttcagcttagctaatcctgatattaattctgtaaatgctggacccagatctctttttctcaaatccatagtcttcaataattctattctagtattacctgatgcaggcaatagcgacataaacatagaaaacgaatagccaaacggcgagaagacaatattatcatcttgaatatttttatacgctactataccggcattggtaaatccttgcagacgataggtagacgctgaacacgttaacgatagtatcaataacgcaatcatgattttatggtattaataattaaccttatttttatgttcggtataaaaaaattattgatgtctacacatccttttgtaattgacatctatatatccttttgtataatcaactctaatcactttaacttttacagttttccctaccagtttatccctatattcaacatatctatccatatgcatcttaacactctctgccaagatagcttcagagtgaggatagtcaaaaagataaatatatagagcataatccttctcgtatactctgccctttattacatcgcccgcattgggcaacgaataacaaaatgcaagcatcttgttaacgggctcgtaaattgggataaaaattatgtttttatatctattttattcaagagaatattcaggaatttctttttccggttgtatctcgtcgcagtatatatcatttgtacattgtttcatattttttaatagtttacaccttttagtaggactagtatcgtacaattcatagctgtattttgaattccaatcacgcataaaaatatcttccaattgttgacgaagacctaatccatcatccggtgtaatattaatagatgctccacatgtatccgtaaagtaatttcctgtccaatttgaggtacctatataggccgttttatcggttaccatatatttggcatggtttaccctagaatacggaatgggaggatcagcatctggtacaataaatagctttacttctatatctatgtttttagattttagcatagcgatagatcttaaaaagtttctcatgataaacgaagatcgttgccagcaactaatcaatagcttaacggatacttgtctgtctatagcggatcttcttaattcatcttctatataaggccaaaacaaaattttacccgccttcgaataaataatagggataaagttcataacagatacataaacgaatttactcgcatttctaatacatgacaataaagcggttaaatcattggttctttccatagtacatagttgttgcggcgcagaagcaataaatacagagtgtggaacaccacttacgttaatactaagaggatgatctgtattataatacgacggataaaagtttttccaattatatggtagattgttaactccaagataccagtatacctcaaaaatttgagtgagatccgctgccaagttcctattattgaagatcgcaatacccaattctttgacctgagttagtgatctccaatccatgttagcgcttcctaaataaatatgtgtattatcagatatccaaaattttgtatgaagaactcctcctaggatatttgtaatatctatgtatcgtacttcaactccggccatttgtagtctttcaacatcctttaatggtttgttagatttattgacggctactctaactcttactcctcttttgggtaattgtacaatctcgtttaatattatcgtgccgaaattcgtacccacttcatccgataaactccaataaaaagatgatatatctagtgtttttgtggtattggatagaatttccctccacatgttaaatgtagacaaatatactttatcaaattgcatacctataggaatagtctctgtaatcactgcgattgtattatccggattcattttatttgttaaaaaataatcctatatcacttcactctattaaaaatccaagtttctatttctttcatgactgattttttaacttcatccgtttccttatgaagatgatgtttggcaccttcataaatttttatttctctattacaatttgcatgttgcatgaaataatatgcacctaaaacatcgctaatctcattgtttgttccctggagtatgagagtcgggggggtgttaatcttggaaattatttttctaaccttgttggtagccttcaagacctgactagcaaatccagccttaattttttcatgattgattaatgggtcgtattggtatttataaactttatccatatctctagatactgattctggacatagctttccgactggcgcatttggtgtgatggttcccataagtttggcagctagcagattcagttttgaaacagcatctgcattaactagaggagacattagaatcattgctgtaaacaagtttggattatcgtaagaggctagtatagaaattgttgctcccatggaatgacccaataagtagatttaatagttaccacgtgctgtaccaaagtcatcaatcatcattttttcaccattacttcttccatgtccaatatgatcatgtgagaatactaaaattcctaacgatgatatgttttcagctagttcgtcataacgtccagaatgtttaccagctccatgacttatgaatactaatgccttaggatatgtaataggtttccaatatttacaatatatgtaatcattgtccagattgaacatacagtttgcactcatgattcacgttatataactatcaatattaacagttcgtttgatgatcatattatttttatgttttattgataattgtaaaaacatacaattaaatcaatatagaggaaggagacggatactgtcttttgtgagatagtcatggcgactaaatcagattatgaggatgctgttttttactttgtggatgatgataaaatatgtagtcgcgactccatcatcgatctaatagatgaatatatcacgtggagaaatcatgttatagtgtttaacaaagatattaccagttgtggaagactgtacaaggaattgatgaagttcgatgatgccgctatacagtactatggtattgataaaattaatgagattgtcgaagctatgagcgaaggagaccactacatcaattttacaaaagtccatgatcaggaaagtttattcgctaccataggaatatgtgctaaaatcactgaacattggggatacaaaaagatttcagaatctagattccaatcattgggaaacattacagatctgatgaccgacgataatataaacatcttgatactttttctagaaaaaaaattgaattgatgatataggggtcttcataacgcataattattacgttagcattctatatccgtgttaaaaaaaattatcctatcatgtatttgagagttttatatgtagcaaacatgatagctgtgatgccaataagctttagatattcacgcgtgctagtgttagggatggtattatctggtggtgaaatgtccgttatataatctacaaaacaatcatcgcatatagtatgcgatagtagagtaaacatttttatcgtttctactgggttcatacatcgtctacccaattcggttatgaatgaaattgtcgccaatcttacacccaaacccttgttatccattagcatagtattaacttcgttatttatgtcataaactgtaaatgattctgtagatgccatatcatacatgatattcatgtccctattataatcattactaactttatcacaatatatgttgataatatctatatatgatctagtctttgtgggcaactgtctatacaagtcgtctaaacgttgtttactcatatagtatcgaacagccatcattacatggtcccgttccgttgatagataatcgagtatgttagtggacttgtcaaatctatataccatattttctggaagtggatatacatagtcgtgatcaacattattgctagcctcatcttctatatcctgtactataccattatctatatcatctacataatctacgatattattatacataaacatcgacaacatactattgtcaattatctaagtcctgttgatccaaacccttgatctcctctatctgtactatctagagattgtacttcttccagttctggataatatatacgttgatagattagctgggctattctatcccccgtatttacattaaacgtacattttccattattaataagaataactcctatgtttcccctataatcttcgtctattacaccgcctcctatatcaatgccttttagggacagaccagacctaggagctattctaccatagcagaacttaggcatggacatactaatatctgtcttaattaactgtcgttctccaggagggatagtataatcgtaagcgctatataaatcatatccggcggcgtaaggtgattgcctagtaggagatttagctctgttagtttccttaacaaatctaactggtgagttaatattcatgttgaacataaaactaatattttatttcaaaattatttaccatcccatatattccatgaataagtgtgatgattgtacacttctatagtatctatatacgattcacgataaaatcctcctatcaatagcagtttattatccactatgatcaattctggattatccctcggataaataggatcatctatcagagtccatgtattgctggattcacaataaaattccgcatttctaccaaccaagaataaccttctaccgaacactaacgcgcatgatttataatgaggataataagtggatggtccaaactgccactgatcatgattgggtagcaaatattctgtagttgtatcagtttcagaatgtcctcccattacgtatataacattgtttatagatgccactgctggattacatctaggtttcagaagactcggcatattaacccaagcagcatccccgtggaaccaacgctcaacagatgtgggatttggtagacctcctactacgtataatttattgttagcgggtatcccgctagcatacagtctggggctattcatcggaggaattggaatccaattgtttgatatataatttacagctatagcattgttatgtatttcattgttcatccatccaccgatgagatatactacttctccaacatgagtacttgtacacatatggaatatatctataatttgatccatgttcataggatactctatgaatggatacttgtatgatttgcgtggttgtttatcacaatgaaatattttggtacagtctagtatccattttacattatttatacctctgggagaaagataatttgacctgattacatttttgataaggagtagcagatttcctaatttatttcttcgctttatataccacttaatgacaaaatcaactacataatcctcatctggaacatttagttcatcgctttctagaataagtttcatagatagataatcaaaattgtctatgatgtcatcttccagttccaaaaagtgtttggcaataaagtttttagtatgacataagagattggatagtccgtattctatacccatcatgtaacactcgacacaatattcctttctaaaatctcgtaagataaagtttatacaagtgtagatgataaattctacagaggttaatatagaagcacgtaataaattgacgacgttatgactatctatatatacctttccagtatatgagtaaataactatagaagttaaactgtgaatgtcaaggtctagacaaacccttgtaactggatctttatttttcgtgtatttttgacgtaaatgtgtgcgaaagtaaggagataactttttcaatatcgtagaattgactattatattgccacctatagcatcaataattgttttgaatttcttagtcatagacaatgctaatatattcttacagtacacagtattaacaaatatcggcatttatgtttctttaaaagtcaacatctagagaaaaatgattatctttttgagacataactcccattttttggtattcacccacacgtttttcgaaaaaattagtttttccttccaatgatatattttccatgaaatcaaacggattggtaacattataaatttttttaaatcccaattcagaaatcaatctatccgcgacgaattctatatatgttttcatcatttcacaattcattcctataagtttaactggaagagccgcagtaagaaattcttgttcaatggatactgcatctgttataatagatctaacggtttcttcactcggtggatacaataaatgtttaaacatcaaacatgcgaagtcgcagtgtagaccctcgtctctactaattagttcgttggaaaacgtgagtccgggcattaggccacgctttttaagccaaaatatggaagcgaatgatccggaaaagaagattccttctactgcagcaaaggcaataagtctctctccataaccggcgctgtcatgtatccacttttgagcccaatcggccttcttttttacacaaggcattgtttctatggcattaaagagatagtttttttcattactatctttaacataagtatcgatcaaaagactatacatttccgaatgaatgttttcaatggccatctgaaatccgtagaaacatctagcctcggtaatctgtacttctgtacaaaatcgttccgccaaattttcattcactattccgtcactggctgcaaaaaacgccaatacatgttttataaaatatttttcgtctggtgttagtttattccaatcattgatatctttagatatatctacttcttccactgtccaaaatgatgcctctgcctttttatacatgttccagatgtcatgatattggattgggaaaataacaaatctatttggatttggtgcaaggatgggttccataactaaattaacaatatcaataaattttttttcagttatctatatgcctgtacttggattttttgtacatcgatatcgccgcaatcactacaataattacaagtattattgatagcattgttattagtactatcataattaaattatcgacattcatgggtgctgaataatcgttattatcatcattatcattttgtaattgtgacatcatactaaataaatcgtttgcgagattgttgtgggaagcgggcatggaggatgcattatcattattatttaacgccttccatttggattcacaaatatggcgcgcgttcaacattttatggaaactataattttgtgaaaacagataacaagaaaactcgtcatcgttcaaatttttaacgatagtaaaccgattaaacgtcgagctaatttctaacgctagcgactctgttggatatgggtttccagatatatatcttttcagttcccctacgtatctataatcatctgtaggaaatggaagatatttccatttatctactgttcctaatatcatatgtggtggtgtagtagaaccattaagcgcgaaagatgttatttcgcatcgtattttaacttcgcaataatttctggttagataacgcactctaccagtcaagtcaatgatattagcctttacagatatattcatagtagtcgtaacgatgactccatcttttagatgcgatactcctttgtatgtaccagaatcttcgtacctcaaactcgatatatttaaacaagttaatgagatattaacgcgttttatgaatgatgatatataaccagaagttttatcctcggtggctagcgctataaccttatcattataataccaactagtgtgattaatatgtgacacgtcagtgtgggtacaaatatgtacattatcgtctacgtcgtattcgatacatccgcatacagccaacaaatataaaatgacaaatactctaacgccgttcgtacccatcttgatgcggtttaataaatgttttgatttcaatttattgtaaaaaaagattcggttttatactgttcgatattctcattgcttatattctcatctatcatctccacacagtcaaatccgtggttagcatgcacctcatcaaccggtaaaagactatcggactcttctatcattataactctagaatatttaatttggtcattattaatcaagtcaattatcttatttttaacaaacgtgagtattttactcattttttataaaaacttttagaaatatacagactctatcgtgtgtctatatcttctttttatatccaatgtatttatgtctgatttttcttcatttatcatatataatggtccaaattctacacgtgcttcggattcatccagatcattaaggttcttataattgtaacatccttctcttccctcttctacatcttccttcttattcttattcttagcgtcacagaatctaccacagcaggatcccatgacgagcgtcatattaaactaatccattttcaattataatatatgattagtaatgaccattaaaataaaaaatattcttcataaccggcaagaaagtgaaaagttcacattgaaactatgtcagtagtatacatcatgaaatgatgatatatatatactctattttggtggaggattatatgatataattcgtggataatcattcttaagacacatttcttcattcgtaaatcttttcacgttaaatgagtgtccatattttgcaatttcttcatatgatggcggtgtacgtggacgaggctgctcctgttcttgttgtggtcgccgactgtcgtgtttgcgtttatccctccattatcgcgattgcgtagatggagtactattatataccttgtaattaaatttttttattaattaaacgtataaaaacgttccgtatctgtatttaagagccagatttcgtctaatagaacaaatagctacagtaaaaataactagaataattgctacacccactagaaaccacggatcgtaatacggcaatcggttttcgataataggtggaacgtatattttatttaaggacttaacaattgtctgtaaaccacaatttgcttccgcggatcctgtattaactatctgtaaaagcatatgttggccgggcggagccgaacattctccgatatccaatttctgtatatctataatattattaacctccgcatacgcattacagttcttttctagcttggataccgcactaggtacatcgtctagatctattcctatttcctcagcgatagctcttctatccttttccggaagcaatgaaatcacttcaataaatgattcaaccatgagtgtgaaactaagtcgagaattactcatgcatttgttagttattcggagcgcgcaatttttaaactgtcctataacctctcctatatgaatagcacaagtgacattagtagggatagaatgttgagctaatttttgtaaataactatctataaaaagattatacaaagttttaaactctttagtttccgccatttatccagtctgagaaaatgtctctcataataaatttttccaagaaactaattgggtgaagaatggaaacctttaatctatatttatcacagtctgttttggtacacatgatgaattcttctaatgccgtactaaattcgatatctttttcgatttctggatatgtttttaataaagtatgaacaaagaaatggaaatcgtaataccagttatgtttaactttgaaattgttttttattttcttgttaatgattccagccacttgggaaaagtcaaagtcgtttaatgccgatttaatacgttcattaaaaacaaactttttatcctttagatgaattattattggttcattggaatcaaaaagtaagatattatcgggtttaagatctgcgtgtaaaaagttgtcgcagcatggtagttcgtagattttaatgtataacagagccatctgtaaaaagataaactttatgtattgtaccaaagatttaaatcctaatttgatagctaactcggtatctactttatctgccgaatacagtgctaggggaaaaattataatgtttcctctttcgtattcgtagttagttctcttttcatgttcgaaaaagtgaaacatgcggttaaaatagtttataacattaatattactgttaataactgccgggtaaaagtgggatagtaatttcacgaatttgatactgtcctttctctcgttaaacgcctttagaaaaactttagaagaatatctcaatgatagttcctgaccatccatagtttgtatcaataatagcaacatatgaagaacacgtttatacagagtatgtaaaaatgttaatttatagtttaatcccatggcccacgcacacacgattaattttttttcatctccctttagattgttgtatagaaatttgggtactgtgaactccgccgtagtttccatgggactatataattttgtggcctcgaatacaaattttactacatagttatctatcttaaaaactataccatatcctcctgtagatatgtgataaaaatcgtcgtttataggataaaatcgtttatccttttgttggaaaaaggatgaattaatgtaatcattctcttctatctttagtagtgtttccttattaaaattcttaaaataatttaacaatctaactgacggagcccaattttggtgtaaatctaattgggacattatattgttaaaatacaaacagtctcctaatataacagtatctgataatctatggggagacatccattgatattcaggggatgaatcattggcaacacccatttattgtacaaaaagccccaatttacaaacgaaagtccaggtttgatagagacaaactattaactattttgtctctgtttttaacacctccacagtttttaatttctttagtaatgaaattattcacaatatcagtatcttctttatctaccagagattttactaacttgataaccttggctgtctcattcaatagggtagtaatatttgtatgtgtgatattgatatctttttgaattgtttcttttagaagtgattctttgatggtgccagcatacgaattacaataatgcagaaactcggttaacatgcaggaattatagtaagccaattccaattgttgcctgtgttgtattagagtgtcaatatgagcaatggtgtccttgcgtttctctgatagaatgcgagcagcgattttggcgttatcatttgacgatatttctggaatgacgaatcctgtttctactaactttttggtaggacaaagtgaaacaatcaagaagatagcttctcctcctatttgtggaagaaattgaactcctctagatgatctactgacgatagtatctccttgacagatattggaccgaattacagaagtacctggaatgtaaagccctgaaaccccctcattttttaagcagattgttgccgtaaatcctgcactgtgaccaagatagagagctcctttggtgaatccatctctatgtttcagtttaaccaagaaacagtcagctggtctaaaatttccatctctatctaatacagcatctaacttgatgtcaggaactatgaccggtttaatgttatatgtaacattgagtaaatccttaagttcataatcatcactgtcatcagttatgtacgatccaaacaatgtttctactggcatagtggatacgaagatgctatccatcagaatgtttccctgattagtattttctatatagctattcttctttaaacgattttccaaatcagtaactatgttcatttttttaggagtaggacgcctagccagtatggaagaggattttctagatcctctcttcaacatctttgatctcaatggaatgcaaaaccccatagtgaaacaaccaacgataaaaataatattgtttttcactttttataattttaccatctgactcatggattcattaatatctttataagagctactaacgtataattctttataactgaactgagatatatacaccggatctatggtttccataattgagtaaatgaatgctcggcaataactaatggcaaatgtataaaacaacgaaattatactagagttgttaaagttaatattttctatgagctgttccaataaattatttgttgtgactgcgttcaagtcataaatcatcttgatactatccagtaaacagtctttaagttctggaatattatcatcccattgtaaagcccctaattcgactatcgaatatcctgctctgatagcagtttcaatatcgacggacgtcaatactgtaataaaggtggtagtattgtcatcatcgtgataaactacgggaatatggtcgttagtaggtacggtgactttacacaacgcgatatataactttccttttgtaccatttttaacgtagttgggacgtcctgcagggtattgttttgaagaaatgatatcgagaacagatttgatacgatatttgttggattcctgattattcactataatataatctagacagatagatgattcgataaatagagaaggtatatcgttggtaggataatacatccccattccagtattctcggatactctattgatgacactagttaagaacatgtcttctattctagaaaacgaaaacatcctacatggactcattaaaacttctaacgctcctgattgtgtctcgaatgcctcgtacaaggatttcaaggatgccatagattctttgaccaacgatttagaattgcgtttagcatctgatttttttattaaatcgaatggtcggctctctggtttgctaccccaatgataacaatagtcttgtaaagataaaccgcaagaaaatttatacgcatccatccaaataaccctagcaccatcggatgatattaatgtattattatagattttccatccacaattattgggccagtatactgttagcaacggtatatcgaatagattactcatgtaacctactagaatgatagttcgtgtactagtcataatatctttaatccaatctaagaaatttaaaattagattttttacactgttaaagttaacaaaggtattacccggatacgtggatatcatatatggcattggtccattatcagtaatagctccataaactgatacggcgatggtttttatatgtgtttgatctaacgaggaagaaattcgcgcccacaattcatctctagatatgtatttaatatcaaacggtaacacatcaatttcgggacgcgtatatgtttctaaatttttaatccaaatataatgatgacctatatgccctattatcatactgtcaactatagtacacctagagaacttacgatacatctgtttcctataatcgttaaattttacaaatctataacatgctaaaccttttgacgacaaccattcattaatttctgatatggaatctgtattctcgataccgtattgttctaaagccagtgctatatctccctgttcgtgggaacgctttcgtataatatcgatcaacggataatctgaagtttttggagaataatatgactcatgatctatttcgtccataaacaatctagacataggaattggaggcgatgatcttaattttgtgcaatgagtcgtcaatcctataacttctaatattgtaatattcatcatcgacataacactatctatgttatcatcgtatattagtataccacggccttcttcatttcgtgccaaaataatatacagtcttaaataattacgcaatatctcaatagtttcataattgttagctgttttcatcaaggtttgtatcctgtttaacatgatggcgttctataacgtctctattttctatttttaattttttaaatttttaacgatttactgtggctagatacccaatctctctcaaatatttttttagcctcgcttacaagctgtttatctatactattaaaactgacgaatccgtgattttggtaatgggttccgtcgaaatttgccgaagtgatatgaacatattcgtcgtcgactatcaacaattttgtattattctgaatagtgaaaaccttcacagatagatcattttgaacacacaacgcgtctagacttctggcggttgccatagaatatacgtcgttcttatcccaattaccaactagaagtctgatcttaactcctctattaatggctgcttctataatggagttgtaaatgtcaggccaatagtagctattaccgtcgacacgtgtagtgggaactatggccaaatgttcaatatctatactagtcttagccgacttgagtttatcaataactacatcagtgtctagatctctagaatatcccaataggtgttctggagaatcagtaaagaacactccacctataggattcttaatatgatacgcagtgctaactggcagacaacaagccgcagagcataaattcaaccatgaattttttgcgctattaaaggctttaaaagtatcaaatcttctacgaagatctgtggccagcgggggataatcagaatatacacctaacgttttaatcgtatgtatagatcctccagtaaatgacgcgtttcctacataacatctttcatcatctgacacccaaaaacaaccgagtagtagtcccacattattttttttatctatattaacggttataaaatttatatccgggcagtgactttgtagctctcccagatttcttttccctcgttcatctagcaaaactattattttaatccctttttcagatgcctcttttagtttatcaaaaataagcgcgcccctagtcgtactcagaggattacaacaaaaagatgctatgtatatatatttcttagctagagtgataatttcgttaaaacattcaaatgttgttaaatgatcggatctaaaatccatattttctggtagtgtttctaccagcctacattttgctcccgcaggtaccggtgcaaatggccacatttagttaacataaaaacttatacatcctgttctatcaacgattctagaatatcatcggctatatcgctaaaattttcatcaaagtcgacatcacaacctaactcagtcaatatattaagaagttccatgatgtcatcttcgtttatttctatatccgtatccattgtagattgttgaccgattatcgagtttaaatcattactaatactcaatccttcagaatacaatctgtgtttcattgtaaatttataggcggtgtatttaagttggtagattttcaattatgtatcaatatagcaacagtagttcttgctcctccttgattctagcatcctcttcattattttcttctacgtacataagcatgtccaatacgttagacaacacaccgacgatggcggccgccacagacacgaatatgactagaccgatgaccatttaaaaacccctctctagctttcacttaaactgtatcgattattcttttagaacatgtataatataaaaacattattctatttcgaatttaggcttccaaaaatttttcatccgtaaaccgataataatatatatagacttgttaatagtcggaataaatagattaatgcttaaactatcatcatctccacgattagagatacaatatttacattctttttgctgtttcgaaactttatcaatacacgttaatacaaacccaggaaggagatattgaaactgaggctgttgaaaatgaaacggtgaatacaataattcagataatgtaaaatcatgattccgtattctgatgatattagaactgctaatggatgtcgatggtatgtatctaggagtatctattttaacaaagcatcgatttgctaatatacaattatcattttgattaattgttattttattcatattcttaaaaggtttcatatttatcaattcttctacattaaaaatttccatttttaatttatgtagccccgcaatactcctcattacgtttcattttttgtctataatatccattttgttcatctcggtacatagattatccaattgagaagcgcatttagtagttttgtacattttaagtttattgacgaatcgtcgaaaactagttatagttaacattttattatttgataccctgatattaatacccctgccgttactattatttataactgatgtaacccacgtaacattagaattaattatcgatagtaatgcatcgacgcttccaaaattgtctattataaactcaccgataatttttttattgcatgttttcatattcattaggattatcaaatctttaatcttattacgattgtatgcgttgatattacaagacgtcattctaaaagacggaggatctccatcaaatgccagacaatcacgtacaaagtacatggaaataggttttgttctattgcgcatcatagattcatatagaacacccatagaaatactaatttgttttactctataaaatactaatgcatctatttcatcgttttgtataacgtctttccaagtgccaaattccaaatttttttcattgatagtaccaaattcttctatctctttaactacttgcatagataggtaattacagtgatgcctacatgccgttttttgaaactgaatagatgcgtctagaagcgatgctacactagtcacaatcaccactttcatatttagaatatatgtatgtaaaaatatagtagaatttcattttgtttttttctatgctataaatgaattctcattttgcatctgctcatactccgttttatatcaataccaaagaaggaagatatctggttctaaaagccgttaaagtatgcgatgttagaactgtagaatgcgaaggaagtaaagcttcctgcgtactcaaagtagataaaccctcatcgcccgcgtgtgagagaagaccttcgtccccgtccagatgcgagagaatgaataaccctggaaaacaagtcccgtttatgaggacggacatgctacaaaatatgttcgcggctaatcgcgataatgtagcttctagacttttgtcctaaaatactattatatccttttcgatattaataaatccgtgtcgtccaggttttttatctctttcagtatgtgaatagataggtattttatctctattcatcatcgaatttaagagatccgataaacattgtttgtattctccagatgtcagcatctgatacaacaatatatgtgcacataaacctctggcacttatttcatgtaccttccccttatcactaaggagaatagtatttgagaaatatgtatacatgatattatcatgaattagatatacagaatttgtaacactctcgaaatcacacgatgtgtcggcgttaagatctaatatatcactcgataacacattttcatctagatacactagacattttttaaagctaaaatagtctttagtagtgacagtaactatgcgattattttcatcgatgatacatttcatcggcatattattacgcttaccatcaaagactataccatgtgtatatctaacgtattctagcatggttgccatacgtgcattaaacttttcaggatctttggatagatcttccaatctatctatttgagaaaacatttttatcatgttcaatagttgaaacgtcggatccactatatagatattatctataaagattttaggaactacgttcatggtatcctggcgaatattaaaactatcaatgatatgattatcgttttcatcttttatcaccatatagtttctaagatatgggattttacttaatataatattatttcccgtgataaattttattagaaaggccaaatctataagaaaagtcctagaattagtctgaagaatatctatatcgccgtaccgtatatttggattaattagatatagagaatatgatccgtaacatatacaacttttattatggcgtctaagatattcttccatcaacttattaacatttttgactagggaagatacattatgacgtcccattacttttgccttgtctattactgcgacgttcatagaatttagcatatctcttgccaattcttccattgatgttacattataagaaattttagatgaaattacatttggagctttaatagtaagaactcctaatatgtccgtgtatgtggtcactaatacagattgtagttctataatcgtaaataatttacctatattatatgtttgagtctgtttagaaaagtagctaagtatacgatcttttatttctgatgcagatgtatcaacatcggaaaaaaatctttttttattcttttttactaaagatacaaatatgtctttgttaaaaacagttattttctgaatatttctagcttgtaattttaacatatgatattcgttcacactaggtactctgcctaaataggtttctataatctttaatgtaatattaggaagagtattctgatcaggattcctattcattttgaggatttaaaactctgattattgtctaatatggtctcaacacaaactttttcacagagcgatagagtttttgataactcgtttttcttaagaaatataaaactactgtttccagagctcgctctatcttttattttatctaattcgatacaaactcctgatactggttcagaaagtaattcattaattttcagtcctttatagaagatatttaatatagataatacaaaattttcagttcttgatatcgatctgattgatcctagaactagatatattaataacgtgctcattaggcagtttatggcagcttgataattagatatagtatattccagttcatatttattagataccgcattgcccagattttgatattctatgaattcctctgaaaataaatccaaaataactagacattctattttttgtggattagtgtactctcttccctctatcatgttcactactggtgtccacgatgataaatatctagagggaatataatatagtccataggatgccaatctagcaatgtcgaataactgtaatttgattcttcgttcttcattatgaattgattcttgaggtataaacctaacacaaattatattattagacttttcgtatgtaatgtctttcatgttataagtttttaatcctggaatagaatctattttaatgaggcttttaaacgcagagttctccaacgagtcaaagcataatactctgttgtttttcttatatacgatgttacgattttcttctttgaatggaataggtttttgaattagtttataattacaacataatagataaggaagtgtgcaaatagtacgcggaaaaaacataatagctcccctgttttcatccatggttttaagtaaatgatcactggcttctttagtcaatggatattcgaacattaaccgtttcatcatcattggacagaatccatatttcttaatgtaaagagtgatcaaatcattgtgtttattgtaccatcttgttgtaaatgtgtattcggttatcggatctgctcctttttctattaaagtatcgatgtcgatctcgtctaagaattcaactatatcgacatatttcatttgtatacacataaccattactaacgtagaatgtataggaagagatgtaacgggaacagggtttgttgattcgcaaactattctaatacataattcttctgttaatacgtcttgcacgtaatctattatagatgccaagatatctatataattattttgtaagatgatgttaactatgtgatctatataagtagtgtaataattcatgtatttcgatatatgttccaactctgtctttgtgatgtctagtttcgtaatatctatagcatcctcaaaaaatatattcgcatatattcccaagtcttcagttctatcttctaaaaaatcttcaacgtatggaatataataatctattttacctcttctgatatcattaatgatatagtttttgacactatcttctgtcaattgattcttattcactatatctaagaaacggatagcgtccctaggacgaactactgccattaatatctctattatagcttctggacataattcatctattataccagaattaatgggaactattccgtatctatctaacatagttttaagaaagtcagaatctaagacctgatgttcatatattggttcatacatgaaatgatctctattgatgatagtgactatttcattctctgaaaattggtaactcattctatatatgctttccttgttgatgaaggatagaatatactcaatagaatttgtaccaacaaactgttctcttatgaatcgtatatcatcatctgaaataatcatgtaaggcatacatttaacaattagagacttgtctcctgttatcaatatactattcttgtgataatttatgtgtgaggcaaatttgtccacgttctttaattttgttatagtagatatcaaatccaatggagctacagttcttggcttaaacagatatagtttttctggaacgaattctacaacattattataaaggactttgggtagataagtgggatgaaatcctattttaattaatgcgatagccttgtcctcgtgcagatatccaaacgcttttgtgatagtatggcattcattgtctagaaacgctctacgaatatctgtgacagatatcatctttagagaatatactagtcgcgttaatagtactacaatttgtattttttaatctatctcaataaaaaaattaatatgtatgattcaatgtataactaaactactaactgttattgataactagaatcagaatctaatgatgacgtaaccaagaagtttatctactgccaatttagctgcattatttttagcatctcgtttagattttccatctgccttatcgaatactcttccgtcgatgtctacacaggcataaaatgtaggagagttactaggccccactgattcaatacgaaaagaccaatctctcctagtaatttggcagtactcattaataacggtgacagggttagcacctttccaatcaataatttttttagccggaataacatcatcaaaagacttatgatcctctctcattgatttttcgcgggatacatcatctattatggcgtcagccataacatcagcatccggcttatccgcctccgttgtcataaaccaacgaggaggaatatcgtcggagctgtacaccatagcactacgttgaagatcgtacagagctttattaacttctcgcttctccatattaagttgtctagttagttgtgcagcagtagctccttcgattccaatggttttaatagcctcacacacaatctctgcgttagaacgttcgtcgatatagattttagacatttttagagagaactaacacaaccagcaataaaactgaacctactttatcatttttttattcatcatcctctggtggttcgtcgttcctatcgaatgtggatctgattaacccgtcatctataggtgatgctggttctggagattctggaggagatggattattatctggaagaatctctgttatttccttgttttcatgtatcgattgcgttgtaacattaagattgcgaaatgctctaaatttgggaggcttaaagtgttgtttgcaatctctacacgcatgtctaactagtggaggttcgtcagcggctctagtttgaatcatcatcggcgtagtattcctacttttacagttaggacacggtgtattgtatttctcgtcgagaacgttaaaataatcgttgtaactcacatcctttattttatctatattgtattctactcctttcttaatgcattttataccgaataagagatagcgaaggaattctttttcggtgccgctagtacccttaatcatatcacatagtgttttatattccaaatttgtggcaatagacggtttatttctatacgatagtttgtttctggaatcctttgagtattctataccaatattattctttgattcgaatttagtttcttcgatattagattttgtattacctatattcttgatgtagtactttgatgatttttccatggcccattctattaagtcttccaagttggcatcatccacatattgtgatagtaattctcggatatcagtagcggctaccgccattgatgtttgttcattggatgagtaactactaatgtatacattttccatttataacacttatgtattaactttgttcatttatattttttcattattatgttgatattaacaaaagtgaatatatatgttaataattgtattgtggttatacggctacaatttcataatgagtggaagtcagtgtccgatgatcaatgacgatagctttactctgaaaagaaagtatcaaatcgatagtgcggagtcaacaataaaaatggataagaagaggataaagtttcagaatagagccaaaatggtaaaagaaataaatcagacaataagagcagcacaaactcattacgagacattgaaactaggatacataaaatttaagagaatgattaggactactactctagaagatatagcaccatctattccaaataatcagaaaacttataaactattctcggacatttcagccatcggcaaagcatcacagaatccgagtaagatggtatatgctctgctgctttacatgtttcccaatttgtttggagatgaccatagattcattcgttatagaatgcatccaatgagtaaaatcaaacacaagatcttctctcctttcaaacttaatcttattagaatattagtggaagaaagattctataataatgaatgcagatctaataaatggagaataattggaacacaagttgataaaatgttgatagctgaatctgataaatatacaatagatgcaaggtataacctaaaacccatgtatagaatcaagggaaaatctgaagaagataccctcttcatcaaacagatggtagaacaatgtgtgacatcccaggaattggtggaaaaagtgttgaagatactgtttagagatttgttcaagagtggagaatacaaagcatacagatacgatgatgatgtagaaaatggatttattggattggatacactaaaattaaacattgttcatgatatagttgaaccatgtatgcctgttcgtaggccagtggctaagatactgtgtaaagaaatggtaaataaatactttgagaatccgctacatattattggtaaaaatcttcaagagtgcattgactttgttagtgaataggcatttcatctttctccaatactaattcaaattgttaaattaataatggatagtataaatagttattagtgataaaatagtaaaaataattattagaataagagtgtagtatcatagataactctcttctataaaaatggattttattcgtagaaagtatcttatatacacagtagaaaataatatagattttttaaaggatgatacattaagtaaagtaaacaattttaccctcaatcatgtactagctctcaagtatctagttagcaattttcctcaacacgttattactaaggatgtattagctaataccaatttttttgttttcatacatatggtacgatgttgtaaagtgtacgaagcggttttacgacacgcatttgatgcacccacgttgtacgttaaagcattgactaagaattatttatcgtttagtaacgcaatacaatcgtacaaggaaaccgtgcataaactaacacaagatgaaaaatttttagaggttgccgaatacatggacgaattaggagaacttataggcgtaaattatgacttagttcttaatccattatttcacggaggggaacccatcaaagatatggaaatcatttttttaaaactgtttaagaaaacagacttcaaagttgttaaaaaattaagtgttataagattacttatttgggcatacctaagcaagaaagatacaggcatagagtttgcggataatgatagacaagatatatatactctatttcaacaaactggtagaatcgtccatagcaatctaacagaaacgtttagagattatatctttcccggagataagactagctattgggtgtggttaaacgaaagtatagctaatgatgcggatatcgttcttaatagacacgccattaccatgtatgataaaattcttagttatatatactctgagataaaacaaggacgcgttaataaaaacatgcttaagttagtttatatctttgagcctgaaaaagatatcagagaacttctgctagaaatcatatatgatattcctggagatatcctatctattattgatgcaaaaaacgacgattggaaaaaatattttattagtttttataaagctaattttattaacggtaatacatttattagtgatagaacgtttaacgaggacttattcagagttgttgttcaaatagatcccgaatatttcgataatgaacgaattatgtctttattctctacgagtgctgcggacattaaacgatttgatgagttagatattaataacagttatatatctaatataatttatgaggtgaacgatatcacattagatacaatggatgatatgaagaagtgtcaaatctttaacgaggatacgtcgtattatgttaaggaatacaatacatacctgtttttgcacgagtcggatcccatggtcatagagaacggaatactaaagaaactgtcatctataaaatccaagagtagacggctgaacttgtttagcaaaaacattttaaaatattatttagacggacaattggctcgtctaggtcttgtgttagatgattataaaggagacttgttagttaaaatgataaaccatcttaagtctgtggaggatgtatccgcattcgttcgattttctacagataaaaaccctagtattcttccatcgctaatcaaaactattttagctagttataatatttccatcatcgtcttatttcaaaggtttttgagagataatctatatcatgtagaagaattcttggataaaagcatccatctaaccaagacggataagaaatatatacttcaattgataagacacggtagatcatagaacagaccaaatatattattaataatttgtatatacatagatataattatcacatattaaaaattcacacatttttgataaatgggaactgctgcaacaattcagactcccaccaaattaatgaataaagaaaatgcagaaatgattttggaaaaaattgttgatcatatagttatgtatattagtgacgaatcaagtgattcagaaaataatcctgaatatattgattttcgtaacagatacgaagactatagatctctcattataaaaagtgatcacgagtttgtaaagctatgtaaaaatcatgcagagaaaagttctccagaaacgcaacaaatgattatcaaacacatatacgaacaatatcttattccagtatctgaagtactattaaaacctataatgtccatgggtgacataattacatataacggatgtaaagacaatgaatggatgctagaacaactctctaccctaaactttaacaatctccgcacatggaactcatgtagcataggcaatgtaacgcgtctgttttatacattttttagttatctgatgaaagataaactaaatatataagtataatcccattctaatactttaacctgatgtattacctgcatcttattagaatattaacctaactaaaagacataacataaaaactcattacatagttgataaaaagcggtaggatataaatattatggctgccaccgttccgcgttttgacgacgtgtacaaaaatgcacaaagaagaattctagatcaagaaacattttttagtagaggtctaagtagaccgttaatgaaaaacacatatctatttgataattacgcgtatggatggataccagaaactgcaatttggagtagtagatacgcaaacttagatgcaagtgactattatcccatttcgttgggattacttaaaaagttcgagtttctcatgtctctatataaaggtcctattccagtatacgaagaaaaagtaaatactgaattcatagccaatggatcgttctctggtagatacgtatcatatcttcgaaagttttctgctcttccaacaaacgagtttattagttttttgttactgacttccattccaatctataatatcttgttctggtttaaaaatactcagtttgatattactaaacacacattattcagatacgtctatacagataatgccaaacacctggcgttggctaggtatatgcatcaaacaggagactataagcctttgtttagtcgtctcaaagagaattatatatttaccggtcccgttccaataggtatcaaagatatagatcaccctaatcttagtagagcaagaagtccatccgattatgagacattagctaatattagtactatattgtactttaccaagtatgatccggtattaatgtttttattgttttacgtacctgggtattcaattactacaaaaattactccagccgtagaatatctaatggataaactgaatctaacaaagagcgacgtacaactgttgtaaattattttatgcttcgtaaaatgtaggttttgaaccaaacattctttcaaagaatgagatgcataaaactttattatccaatagattgactatttcggacgtcaatcgtttaaagtaaacttcgtaaaatattctttgatcactgccgagtttaaaacttctatcgataattgtctcatatgttttaatatttacaagttttttggtccatggtacattagccggacaaatatatgcaaaataatatcgttctccaagttctatagtttctggattatttttattatattcagtaaccaaatacatattagggttatctgcggatttataatttgagtgatgcattcgactcaacataaataattctagaggagacgatctactatcaaattcggatcgtaaatctgtttctaaagaacggagaatatctatacatacctgattagaattcatccgtccttcagacaacatctcagacagtctggttttgtacatcttaatcatattcttatgaaacttggaaacatctcttctagtttcactagtacctttattaattctctcaggtacagattttgaattcgacgatgccgagtatttcatcgttgtatatttcttcttcgattgcataatcagattcttatataccgcctcaaactctattttaaaattattaaacaatactctactattaatcagtcgttctaactctttcgctatttctatagacttatctacatcttgactgtctatctctgtaaacacggagtcggtatctccatacacgctacgaaaacgaaatctgtaatctataggcaacgatgttttcacaatcggattaatatctctatcgtccatataaaatggattacttaatggattggcaaaccgtaacataccgttagataactctgctccatttagtaccgattctagatacaagatcattctacgtcctatggatgtgcaactcttagccgaagcgtatgagtatagagcactatttctaaatcccatcagaccatatactgagttggctactatcttgtacgtatattgcatggaatcataaatggccttttcagttgaactggtagcctgttttaacatctttttatatctggctctctctgccaaaaatgttcttaatagtctaggaatggttccttctatcgatctatcgaaaattgctatttcagagatgaggttcggtagtctaggttcacaatgaaccgtaatatatctaggaggtggatatttctgaagcaatagctgattatttatttcttcttccaatctattggtactaacaacgacaccgactaatgtttccggagatagatttccaaagatacacacattaggatacagactgttataatcaaagattaatacattattactaaacattttttgttttggagcaaataccttaccgccttcataaggaaacttttgttttgtttctgatctaactaagatagttttagtttccaacaatagctttaacagtggacccttgatgactgtactcgctctatattcgaataccatggattgaggaagcacatatgttgacgcacccgcgtctgtttttgtttctactccataatactcccacaaatactgacacaaacaagcatcatgaatacagtatctagccatatctaaagctatgtttagattataatccttatacatctgagctaaatcaacgtcatcctttccgaaagataatttatatgtatcattaggtaaagtaggacataatagtacgactttaaatccattttcccaaatatctttacgaattactttacatataatatcctcatcaacagtcacataattacctgtggttaaaacctttgcaaatgcagcggctttgcctttcgcgtccgtagtatcgtcaccgatgaacgtcatttctctaactcctctatttaatactttacccatgcaactgaacgcgttcttggatatagaatccaatttgtacgaatccaatttttcagatttttgaatgaatgaatatagatcgaaaaatatagttccattattgttattaacgtgaaacgtagtattggccatgccgcctactcccttatgactagactgatttctctcataaatacagagatgtacagcttcctttttgtccggagatctaaagataatcttctctcctgttaataactctagacgattagtaatatatctcagatcaaagttatgtccgttaaaggtaacgacgtagtcgaacgttagttccaacaattgtttagctattcgtaacaaaactatttcagaacatagaactagttctcgttcgtaatccatttccattagtgactgtatcctcaaacatcctctatcgacggcttcttgtatttcctgttccgttaacatctcttcattaatgagcgtaaacaataatcgtttaccacttaaatcgatataacagtaacttgtatgcgagattgggttaataaatacagaaggaaacttcttatcgaagtgacactctatatctagaaataagtacgatcttgggatatcgaatctaggtatttttttagcgaaacagttacgtggatcgtcacaatgataacatccattgttaatctttgtcaaatattgctcgtccaacgagtaacatccgtctggagatatcccgttagaaatataaaaccaactaatattgagaaattcatccatggtggcattttgtatgctgcgtttctttggctcttctatcaaccacatatctgcgacggagcattttctatctttaatatctagattataacttattgtctcgtcaatgtctatagttctcatctttcccaacggcctcgcattaaatggaggaggagacaatgactgatatatttcgtccgtcactacgtaataaaagtaatgaggaaatcgtataaatacggtctcaccatttcgacatctggatttcagatataaaaatctgttttcaccgtgactttcaaaccaattaatgcaccgaacatccatttatagaatttagaaatatattttcatttaaatgaatcccaaacattggggaagagccgtatggaccattatttttatagtactttcgcaagcgggtttagacggcaacatagaagcgtgtaaacgaaaactatatactatagtcagcactcttccatgtcctgcatgtagacggcacgcgactatcgctatagaggacaataatgtcatgtctagcgatgatctgaattatatttattattttttcatcagattatttaacaatttggcatctgatcccaaatacgcgatcgatgtgacaaaggttaaccctttataaacttaacccattataaaacttatgattagtcacaactgaaataaccgcgtgattattttttggtataattctacacggcatggtttctgtaactatgaattcaacccccgttacattagtgaaatctttaacaaacagcaagggttcgtcaaagacataaaactcattgtttacaatcgaaatagaccccctatcacacttaaaataaaaaatatccttatcctttaccaccaaataaaattctgattggtcaatgtgaatgtattcacttaacagttccacaaatttatttattaactccgaggcacatacatcgtcggtattttttatggcaaactttactcttccagcatccgtttctaaaaaaatattaacgagttccatttatatcatccaatattattgaaatgacgttgatggacagatgatacaaataagaaggtacggtacctttgtccaccatctcctccaattcatgctctattttgtcattaactttaatgtatgaaaacagtacgccacatgcttccatgacagtgtgtaacactttggatacaaaatgtttgacattagtataattgttcaagactgtcaatctataatagatagtagctataatatattctatgatggtattgaagaagatgacaaccttggcatattgatcatttaacacagacatggtatcaacagatagcttgaatgaaagagaatcagtaattggaataagcgtcttctcgatagagtgtccgtataccaacatgtctgatattttgatgtattccattaaattatttagttttttctttttattttcgttaaacagcatttctgtcaacggaccccaacatcgttgaccgattaagttttgattgatttttccgtgtaatgcgtatctagtcagatcgtatagcctatccaataatccatcatctgtgcgtagatcacatcgtacactttttaattctctatagaagagcgacagacatctggagcaattacagacagcaatttctttattctctacagatgtaagatacttgaagacattcctatgatgatgcagaattttggataacacggtattgatggtatctgttaccataattcctttgatggctgatagtgtcagagcacaagatttccaatctttgacaatttttagcaccattatctttgttttgatatctatatcagacagcatggtgcgtctgacaacacagggattaagacggaaagatgaaatgattctctcaacatcttcaatggataccttgctattttttctggcattatctatatgtgcgagaatatcctctagagaatcagtatcctttttgatgatagtggatctcaatgacatgggacgtctaaaccttcttattttatcaccagattgcatggtgatttgtcttctttcttttatcataatgtaatctctaaattcatcggcaaattgtctatatctaaaatcataatatgagatgtttacctctacaaatatctgttcgtccaatgttagagtatctacatcagttttgtattccaaattaaacatggcaacggatttaattttatattcctctattaagtcctcgtcgataataacagaatgtagataatcatttaatccatcgtacatggttggaagatgcttgttgacaaaatctttaattgtcttgatgaaggtgggactatatctaacatcttgattaataaaatttataacattgtccataggatactttgtaactagttttatacacatctcttcatcggtaagtttagacagaatatcgtgaacaggtggtatattatattcatcagatatacgaagaacaatgtccaaatctatattgtttaatatattatatagatgtagcgtagctcctacaggaatatctttaactaagtcaatgatttcatcaaccgttagatctattttaaagttaatcatataggcattgatttttaaaaggtatgtagccttgactacattctcattaattaaccattccaagtcactgtgtgtaagaagattatattctatcataagcttgactacatttggtcccgataccattaaagaattcttatgatataaggaaacagcttttaggtactcatctactctacaagaattttggagagccttaacgatatcagtgacgtttattatttcaggaggaaaaaacctaacattgagaatgtcggagttaatagcttccagatacagtgattttggcaatagtccgtgtaatccataatccagtaacacgagctggtgcttgctagacaccttttcaatgtttaatttttttgaaataagctttgataaagccttcctcgcaaattccggatacatgaacatgtcggcgacatgattaagtattgttttttcattatttttatattttctcaacaagttctcaataccccaatagatgatagaatatcacccaatgcgtccatgttgtctatttccaacaggtcgctatatccaccaatagaagtttttccaaaaaagattctaggaacagttctaccaccagtaatttgttcaaaatagtcacgcaattcattttcgggtttaaattctttaatatcgacaatttcatacgctcctcttttgaaactaaacttatttagaatatccagtgcatttctacaaaaaggacatgtatacttgacaaaaattgtcactttgttattggccaacctttgttgtacaaattcctcggccattttaatatttaagtgatataaaactatctcgacttatttaactctttagtcgagatatatggacgcagatagctatatgatagccaactacagaaggcaaacgctataaaaaacataattacgacgagcatatttataaatatttttattcagcattacttgatatagtaatattaggcacagtcaaacattcaaccactctcgatacattaactctctcattttctttaacaaattctgcaatatcttcgtaaaaagattcttgaaactttttagaatatctatcgactctagatgaaatagcgttcgtcaacatactatgttttgtatacataaaggcgcccattttaacagtttctagtgacaaaatgctagcgatcctaggatcctttagaatcacatagattgacgattcgtctctcttagtaactctagtaaaataatcatacaatctagtacgcgaaataatattatccttgacttgaggagatctaaacaatctagttttgagaacatcgataagttcatcgggaatgacatacatactatctttaatagaactcttttcatccagttgaatggattcgtccttaaccaactgattaatgagatcttctattttatcattttccagatgatatgtatgtccattaaagttaaattgtgtagcgcttctttttagtctagcagccaatactttaacatcactaatatcgatatacaaaggagatgatttatctatggtattaagaattcgtttttcgacatctgtcaaaaccaattcctttttgcctgtatcatccagttttccatcctttgtaaagaaattattttctactagactattaataagactgataaggattcctccataattgcacaatccaaactttttaacaaaactagactttacaagatctacaggaatgcgtacttcaggtttcttagcttgtgattttttcttttgtggacattttcttgtgaccaactcatctaccatttcattgattttagcagtgaaataagctttcaatgcacgggcactgatactattgaaaacgagttgatcttcaaattccgccatttaagttcaccaaacaacttttaaatacaaatatatcaatagtagtagaataagaactataaaaaaaataataattaaccaataccaaccccaacaaccggtattattagttgatgtgactgttttctcatcacttagaacagatttaacaatttctataaagtctgtcaaatcatcttccggagaccccataaatacaccaaatatagcggcgtacaacttatccatttatacattgaatattggcttttctttatcgctatcttcatcatattcatcatcaatatcaacaagtcccagattacgagccagatcttcttctacattttcagtcattgatacacgttcactatctccagagagtccgataacgttagccaccacttctctatcaatgattagtttcttgagtgcgaatgtaatttttgtttccgttccggatctatagaaaactacaggtgtgataattgccttggccaattgtctttctcttttactgagtgattctagttcaccttctatagatctgagaatggatgattctccagtcgaaacatattctaccatggatccgtttaatttgttgatgaagatggattcatccttaaatgttttctctgtaatagtttccaccgaaagactatgcaaagaatttggaatgcgttccttgtgcttaatgtttccatagacggcttctagaagttgatacaacataggactagccgcggtaacttttatttttagaaagtatccatcgcttctatcttgtttagatttatttttataaagtttagtctctccttccaacataataaaagtggaagtcatttgactagataaactatcagtaagttttatagagatagacgaacaattagcgtattgagaagcatttagtgtaacgtattcgatacattttgcattagatttactaatcgattttgcatactctataacacccgcacaagtctgtagagaatcgctagatgcagtaggtcttggtgaagtttcaactctcttcttgattaccttactcatgattaaacctaaataattgtactttgtaatataatgatatatattttcactttatctcatttgagaataaaaatgtttttgtttaaccactgcatgatgtacagatttcggaatcgcaaaccaccagtggttttattttatccttgtccaatgtgaattgaatgggagcggatgcgggtttcgtacgtagatagtacattcccgtttttagaccgagactccatccgtaaaaatgcatactcgttagtttggaataactcggatctgctatatggatattcatagattgactttgatcgatgaaggctcccctgtctgcagccatttttatgatcgtcttttgtggaatttcccaaatagttttataaactcgcttaatatcttctggaaggtttgtattctgaatggatccaccatctgccataatcctattcttgatctcatcattccataattttctctcggttaaaactctaaggagatgcggattaactacttgaaattctccagacaatactctccgagtgtaaatattactggtatacggttccaccgactcattatttcccaaaatttgagcagttgatgcagtcggcataggtgccaccaataaactatttctaagaccgtatgttctgattttatcttttagaggttcccaattccaaagatccgacggtacaacattccaaagatcatattgtagaataccgttactggcgtacgatcctacatatgtatcgtatggtccttccttctcagctagttcacaactcgcctctaatgcaccgtaataaatggtttcgaagatcttcttatttagatcttgtgcttccaggctatcaaatggataatttaagagaataaacgcgtccgctaatccttgaacaccaataccgataggtctatgtctcttattagagatttcagcttctggaataggataataattaatatctataattttattgagatttctgacaattactttgaccacatccttcagtttgagaaaatcaaatcgcccatctattacaaacatgttcaaggcaacagatgccagattacaaacggctacctcattagcatccgcatattgtattatctcagtgcaaagattactacacttgatagttcctaaattttgttgattactctttttgttacacgcatccttataaagaatgaatggagtaccagtttcaatctgagattctataatcgctttccagacgactcgagcctttattatagatttgtatctcctttctctttcgtatagtgtatacaatcgttcgaactcgtctccccaaacattgtccaatccaggacattcatccggacacatcaacgaccactctccgtcatccttcactcgtttcataaagagatcaggaatccaaagagctataaatagatctctggttctatgttcctcgtttcctgtattctttttaagatcgaggaacgccataatatcagaatgccacggttccaagtatatggccataactccaggccgtttgtttcctccctgatctatgtatctagcggtgttattataaactctcaacattggaataataccgtttgatataccattggtaccggagatatagcttccactggcacgaatattactaattgatagacctattccccctgccattttagagattaatgcgcatcgttttaacgtgtcatagataccctctatgctatcatcgatcatgttaagtagaaaacagctagacatttggtgacgactagttcccgcattaaataaggtaggagaagcgtgcgtaaaccatttttcagaaagtagattgtacgtctcaatagctgagtctatatcccattgatgaattcctactgcgacacgcattaacatgtgctgaggtctttcaacgatcttgttgtttattttcaacaagtaggatttttccaaagttttaaaaccaaaatagttgtatgaaaagtctcgttcgtaaataataaccgagttgagtttatccttatatttgttaactatatccatggtgatacttgaaataatcggagaatgtttcccatttttaggattaacatagttgaataaatcctccatcacttcactaaatagtttttttgtttccttgtgtagatttgatacggctattctggcggctagaatggcataatccggatgttgtgtagtacaagtggctgctatttcggctgccagagtgtccaattctaccgttgttactccattatatattccttgaataaccttcatagctattttaataggatctatatgatccgtgtttaagccataacataattttctaatacgagacgtgattttatcaaacatgacattttccttgtatccatttcgtttaatgacaaacatttttgttggtgtaataaaaaaattatttaacttttcattaatagggatttgacgtatgtagcgtacaaaattatcgttcctggtatatagataaagagtcctatatatttgaaaatcgttacggctcgattaaactttaatgattgcatagtgaatatatcattaggatttaactccttgactatcagggcggcaccagaaattaccatcaaaagcattaatacagttatgccgatcgcagttagaacggttatagcatccaccatttatatctaaaaattagatcaaagaatatgtgacaaagtcctagttgtatactgagaattgacgaaacaatgtttcttacatatttttttcttattagtaactgacttaatagtaggaactggaaagctagacttgattattctataagtatagatacccttccaaataatattctctttgataaaagttccagaaaatgtagaattttttaaaaagttatcttttgctattaccaagattgtgtttagacgcttattattaatatgagtgatgaaatccacaccgcctctagatatcgcttttatttccacattagatggtaaatccaatagtgaaactatctttttaggaatgtatggactcgcgtttagaggagtgaacgtcttaggcgtcggaaaggatgattcatcaaacgaataaacaatttcacaaatggatgttaatgtattagtaggaaattttttgacgctagtggaattgaagattctaatggatgatgttctacctatttcatccgataacatgttaatttccgacaccaacggttttaatatttcgatgatatacggtagtctctctttcggacttatatagcttattccacaatacgagtcattatatactccaaaaaacaaaataactagtataaaatctgtatcgaatgggaaaaacgaaattatcgacataggtatagaatctggaacattgaacgtattaatacttaattctttttctgtggtaagtaccgataggttattgacattgtatggttttaaatattctataacttgagacttgatagatattagtgatgaattgaaaattatttttatcaccacgtgtgtttcaggatcatcgtcgacgcccgtcaaccaaccgaatggagtaaaataaatatcattaatatatgctctagatattagtatttttatcaatcctttgattatcatcttctcgtaggcgaatgattccatgatcaagagtgatttaagaacatcctccggagtattaatgggcttagtaaacagtccatcgttgcaataataaaagttatccaagttaaaggatattatgcattcgtttaaagatatcacctcatctgacggagacaattttttggtaggttttagagactttgaagctacttgtttaacaaagttattcatcgtcgtttactattctatttaattttgtagttaatttatcacatatcacattaattgactttttggtccatttttccatacgtttatattcttttaatcctgcgttatccgtttccgttatatccagggatagatcttgcaagttaaatagaatgctcttaaataatgtcatttttttatccgctaaaaatttaaagaatgtataaacttttttcaaagatttaaaacttttaggtggagttctagtacacaatatcataaacaaactaataaacatcccgcattcagattccaacagctgattaacttccacattaatacagcctattttcgctccaaatgtacattcgaaaaatctgaataaaacatcgatgtcacaatttgtattatccaatacagaatgtctgtgattcgtgttaaaaccatcggagaaggaatagaaataaaaattattatagtggtggaattcagttggaatattgcctccggagtcataaaaggatactaaacattgttttttatcataaattacacatttccaatgagacaaataacaaaatccaaacattacaaatctagaggtagaacttttaattttgtctttaagtatatacgataagatatgtttattcataaacgcgtcaaatttttcatgaatcgctaaggagtttaagaatctcatgtcaaattgtcctatataatccacttcggatccataagcaaactgagagactaagttcttaatacttcgattgctcatccaggctcctctctcaggctctattttcatcttgacgacctttggattttcaccagtatgtattcctttacgtgataaatcatcgattttcaaatccatttgtgagaagtctatcgccttagatactttttcccgtagtcgaggtttaaagaaatacgctaacggtatactagtaggtaactcaaagacatcatatatagaatggtaacgcgtctttaactcgtcggttaactctttcttttgatcgagttcgtcgctactattgggtctgctcaggtgccccgactctactagttccaacatcataccgataggaatacaagacactttgccagcggttgtagatttatcatatttctccactacatatccgttacaatttgttaaaaatttagatacatctatattgctacataatccagctagtgaatatatatgacataataaattggtaaatcctagttctggtattttactaattactaaatctgtatatctttccatttatcatggaaaagaatttaccagatatcttcttttttccaaactgcgttaatgtattctcttacaaatattcacaagatgaattcagtaatatgagtaaaacggaacgtgatagtttctcattggcggtgtttccagttataaaacatagatggcataacgcacacgttgtaaaacataaaggaatatacaaagttagtacagaagcacgtggaaaaaaagtatctcctccatcactaggaaaacccgcacacataaacctaaccgcgaagcaatatatatacagtgaacacacaataagctttgaatgttatagttttctaaaatgtataacaaatacagaaatcaattcgttcgatgagtatatattaagaggactattagaagctggtaatagtttacagatattttccaattccgtaggtaaacgaacagatactataggtgtactagggaataagtatccatttagcaaaattccattggcctcattaactcctaaagcacaacgagagatattttcagcgtggatttctcatagacctgtagttttaactggaggaactggagtgggtaagacgtcacaggtacccaagttattgctttggtttaattatttatttggtggattctctactctagataaaatcactgactttcacgaaagaccagtcattctatctcttcctaggatagctttagttagattgcatagcaataccattttaaaatcattgggatttaaggtactagatggatctcctatttctttacggtacggatctataccggaagaattaataaacaaacaaccaaaaaaatatggaattgtattttctacccataagttatctctaacaaaactatttagttatggcactcttattatagacgaagttcatgagcatgatcaaataggagatattattatagcagtagcgagaaagcatcatacgaaaatagattctatgtttttaatgactgccacgttagaggatgacagggaacggctaaaagtatttttacctaatcccgcatttatacatattcctggagatacactgtttaaaattagcgaggtatttattcataataagataaatccatcttccagaatggcatacatagaagaagaaaagagaaatttagttactgctatacagatgtatactcctcctgatggatcatccggtatagtctttgtggcatccgttgcacagtgtcacgaatataaatcatatttagaaaaaagattaccgtatgatatgtatattattcatggtaaggtcttagatatagacgaaatattagaaaaagtgtattcatcacctaatgtatcgataattatttctactccttatttggaatccagcgttactatacacaatgttacacacatttatgatatgggtagagtttttgtccccgctccttttggaggatcgcaacaatttatttctaaatctatgagagatcaacgaaaaggaagagtaggaagagttaatcctggtacatacgtctatttctatgatctgtcttatatgaagtctatacagcgaatagattcagaatttctacataattatatattgtacgctaataagtttaatctaacactccccgaagatttgtttataatccctacaaatttggatattctatggcgtacaaaggaatatatagactcgttcgatattagtacagaaacatggaataaattattatccaattattatatgaagatgatagagtatgctaaactttatgtactaagtcctattctcgctgaggagttggataactttgagaggacgggagaattaactagtattgtacgagaagccattttatctctaaatttacgaattaagattttaaattttaaacataaagatgatgatacgtatatacacttttgtaaaatattattcggtgtctataacggaacaaacgctactatatattatcatagacctctaacgggatatatgaatatgatttcagatactatatttgttcctgtagataataactaaaaatcaaactctaatgaccacatctttttttagagatgaaaaattttctacatctccttttgtagacacgactaaacattttgcagaaaaaagtttattagtgtttagataatcgtatacttcatcagtgtagatagtaaatgtgaacagataaaaggtattcttgctcaatagattggtaaattccatagaatatattaatcctttcttcttgagatcccacatcatttcaaccagagacgttttatccaatgatttacctcgtactataccacatacaaaactagattttgcagtgacgtcgtacctggtattcctaccaaacaaaattttacttttagttcttttagaaaattctaaggtagaatctctatttgccaatatgtcatctatggaattaccactagcaaaaaatgatagaaatatatattgatacatcgcagctggttttgatctactatactttaaaaacgaatcagattccataattgcctgtatatcatcagctgaaaaactatgttttacacgtattccttcggcatttctttttaatgatatatcttgtttagacaatgataaagttatcatgtccatgagagacgcgtctccgtatcgtataaatatttcattagatgttagacgcttcattaggggtatacttctataaggtttcttaatcagtccatcattggttgcgtcaagaactactatcggatgttgttgggtatctctagtgttacacatggccttactaaagtttgggtaaataactatgatatctctattaattatagatgcatatatttcattcgtcaaggatattagtatcgacttgctatcgtcattaatacgtgtaatgtaatcatataaatcatgcgatagccaaggaaaatttaaatagatgttcatcatataatcgtcgctataattcatattaatacgttgacattgactaatttgtaatatagcctcgccacgaagaaagctctcgtattcagtttcatcgataaaggataccgttaaatataactggttgccgatagtctcatagtctattaagtggtaagtttcgtacaaatacagaatccctaaaatattatctaatgttggattaatctttaccataactgtataaaatggagacggagtcataactattttaccgtttgtacttactggaatagatgaaggaataatctccggacatgctggtaaagacccaaatgtctgtttgaagaaatccaatgttccaggtcctaatctcttaacaaaaattacgatattcgatcccgatatcctttgcattctatttaccagcatatcacgaactatattaagattatctatcatgtctattctcccaccgttatataaatcgcctccgctaagaaacgttagtatatccatacaatggaatacttcatttctaaaatagtattcgttttctaattctttaatgtgaaatcgtatactagaaagggaaaaattatctttgagttttccgttagaaaagaaccacgaaactaatgttctgattgcgtccgattccgttgctgaattaatggatttacaccaaaaactcatataacttctagatgtagaagcattcgctaaaaaattagtagaatcaaaggatataagtagatgttccaacaagtgagcaattcccaagatttcatctatatcattctcgaatccgaaattagaaattcccaagtagatatcctttttcatccgatcgttgatgaaaatacgaactttattcggtaagacaatcatttactaaggagtaaaataggaagtaatgttcgtatgtcgttatcatcgtataaattaaaggtgtgttttttaccattaagtgacattataattttaccaatattggaattataatataggtgtatttgcgcactcgcgacggttgatgcatcggtaaatatagctgtatctaatgttctagtcggtatttcatcatttcgctgtctaataatagcgttttctctatctgtttccattacagctgcctgaagtttattggtcggataatatgtaaaataataagaaatacatacgaataacaaaaataaaataagatataataaagatgccatttagagatctaattttgttcaacttgtccaaattcctacttacagaagatgaggaatcgttggagatagtgtcttccttatgtagaggatttgaaatatcttatgatgacttgataacttactttccagataggaaataccataaatatatttataaagtatttgaacatgtagatttatcggaggaattaagtatggaattccatgatacaactttgcgagatttagtttatcttagattgtacaagtattccaagtgtatacggccgtgttataaattaggagataatctaaaaggcatagttgttataaaggacaggaatatttatattagggaagcaaatgatgacttgatagaatatctcctcaaggaatacactcctcagatttatacatattctaatgagcgcgtccccataactggttcaaaattaattctttgtggattttctcaagttacatttatggcgtatacaacgtcgcatataacaacaaataaaaaggtagatgttctcgtttccaaaaaatgtatagatgaactagtcgatccaataaattatcaaatacttcaaaatttatttgataaaggaagcggaacaataaacaaaatactcaggaagatattttattcggtaaccggtggccaaactccataggtagctttttctatttcggattttagaatttccaaattcaccagcgatttatcggttttggtgaaatccaaggatttattaatgtccacaaatgccatttgttttgtctgtggattgtatttgaaaatggaaacgatgtagttagatagatgcgctgcgaagtttcctattagggttccgcgcttcacgtcacccagcatacttgaatcaccatcctttaaaaaaaatgataagatatcaacatggagtatatcatactcggattttaattcttctactgcatcactgacattttcacaaatactacaatacggtttaccgaaaataatcagtacgttcttcatttatgggtatcaaaaacttaaaatcgttactgctggaaaataaatcactgacgatattagatgataatttatacaaagtatacaatggaatatttgtggatacaatgagtatttatatagccgtcgccaattgtgtcagaaacttagaagagttaactacggtattcataaaatacgtaaacggatgggtaaaaaagggagggcatgtaaccctttttatcgatagaggaagtataaaaattaaacaagacgttagagacaagagacgtaaatattctaaattaaccaaggacagaaaaatgctagaattagaaaagtgtacatccgaaatacaaaatgttaccggatttatggaagaagaaataaaggcaaaaatgcaattaaaaatcgataaacttacatttcaaatatatttatctgattctgataacataaaaatatcattgaatgagatactaacacatttcaacaataatgagaatgttacattattttattgtgatgaacgagacgcagaattcgttatgtgtctcgaggctaaaacacatttctctaccacaggagaatggccgttgataataagtaccgatcaggatactatgctatttgcatctactgataatcatcctaagatgataaaaaacttaactcaactgtttaaatttgttccctcggcagaggataactatttagcaaaattaacggcgttagtgaatggatgtgatttctttcctggactctatggggcatctataacacccaccaacttaaacaaaatacaattgtttagtgattttacaatcgataatatagtcactagtttggcaattaaaaattattatagaaagactaactctaccgtagacgtgcgtaatattgttacgtttataaacgattacgctaatttagacgatgtctactcgtatgttcctccttgtcaatgcactgttcaagaatttatattttccgcattagatgaaaaatggaatgaatttaaatcatcttatttagagaccgttccgttaccctgtcaattaatgtacgcgttagaaccacgtaaggagattgatgtttcagaagttaaaactttatcatcttatatagatttcgaaaatactaaatcagatatcgatgttataaaatctatatcctcgatttttggatattctaacgaaaactgtaacacgatagtattcggcatctataaggataatttactactgagtataaataattcattttactttaacgatagtctgttaataaccaatactaaaagtgataatataataaatataggttactagattaaaaatggtgttccaactcgtgtgctctacatgcggtaaagatatttctcacgaacgatataaattgattatacgaaaaaaatcattaaaggatgtactcgtcagtgtaaagaacgaatgttgtaggttaaaattatctacacaaatagaacctcaacgtaacttaacagtgcaacctctattggatataaactaatatggatccggttaattttatcaagacatatgcgcctagaggttctattatttttattaattataccatgtcattaacaagtcatttgaatccatcgatagaaaaacatgtgggtatttattatggtacgttattatcggaacacttggtagttgaatctacctatagaaaaggagttcgaatagtcccattggatagtttttttgaaggatatcttagtgcaaaagtatacatgttagagaatattcaagttatgaaaatagcagctgatacgtcattaactttattgggtattccgtatggatttggtcatgatagaatgtattgttttaaattggtagctgactgttataaaaatgccggtgttgaaacatcgtctaaacgaatattaggtaaagatatttttctgagccaaaacttcacagacgataatagatggataaagatatatgattctaataatttaacattttggcaaattgattaccttaaagggtgagttaatatgcataactactcctccgttgttttttccctcgttctttttcttaacgttgtttgccatcactctcataatgtaaagatattctaaaatggtaaacttttgcatatcggacgcagaaattggtataaatgttgtaattgtattatttcccgtcaatggactagtcacagctccatcagttttatatcctttagagtatttctcactcgtgtctaacattctagagcattccatgatctgtttatcgttgatattggccggaaagatagattttttattttttattatattactattggcaattgtagatataacttctggtaaatatttttctaccttttcaatctcttctattttcaagccggctatatattctgctatattgttgctagtatcaataccttttcttgctaagaagtcatatgtggtattcactatatcagttttaactggtagttccattagcctttccacttctgcagaataatcagaaattggttctttaccagaaaatccagctactataataggctcaccgatgatcattggcaaaatcctatattgtaccagattaatgagagcatatttcatttccaataattctgctagttcttgagacattgatttatttgatgaatctagttggttctctagatactctaccatttctgccgcatacaataacttgttagataaaatcagggttatcaaagtgtttagcgtggctagaatagtgggcttgcatgtattaaagaatgcggtagtatgagtaaaccgttttaacgaattatatagtctccagaaatctgtggcgttacatacatgagccgaatgacatcgaagattgtccaatatttttaatagctgctctttgtccattatttctatatttgactcgcaacaattgtagataccattaatcactgattcctttttcgatgccggacaatagcacaattgtttagctttggactctatgtattcagaattaatagatatatctcttaatacagattgcactatacattttgaaactatgtcaaaaattgtagaacgacgctgttctgcagccatttaactttaaataatttacaaaaatttaaaatgagcatccgtataaaaatcgataaactgcgccaaattgtggcatatttttcagagttcagtgaagaagtgtctataaatgtagactcgacggatgagttaatgtatatttttgccgccttgggcggatctgtaaacatttgggccattatacctctcagtgcatcagtgttctaccgcggagccgaaaatattgtgtttaatcttccggtgtccaaggtaaaatcgtgtttgtgtagttttcacaatgatgccatcatagatatagaacctgatctggaaaataatctagtaaaactttctagttatcatgtagtaagtgtcgattgtaacaaggaactgatgcctattaggacagatactactatttgtctaagtatagatcaaaagaaatcttacgtgtttaattttcacaagtatgaagaaaaatgttgtggtagaaccgtcattcatttagaatggttgttgggctttatcaagtgtattagtcagcatcagcatttggctattatgtttaaagatgacaatattattatgaagactcctggtaatactgatgcgttttccagggaatattctatgactgaatgttctcaagaactacaaaagttttctttcaaaatagctatctcgtctctcaacaaactacgaggattcaaaaagagagtcaatgtttttgaaactagaatcgtaatggataatgacgataacattctaggaatgttgttttcggatagagttcaatcctttaagatcaacatctttatggcgtttttagattaatactttcaatgagataaatatgggtggcggagtaagtgttgagctccctaaacgggatccgcctccgggagtacccactgatgagatgttattaaacgtggataaaatgcatgacgtgatagctcccgctaagcttttagaatatgtgcatataggaccactagcaaaagataaagaggataaagtaaagaaaagatatccagagtttagattagtcaacacaggacccggtggtctttcggcattgttaagacaatcgtataatggaaccgcacccaattgctgtcgcacttttaatcgtactcattattggaagaaggatggaaagatatcagataagtatgaagagggtgcagtattagaatcgtgttggccagacgttcacgacactggaaaatgcgatgttgatttattcgactggtgtcagggggatacgttcgatagaaacatatgccatcagtggatcggttcagcctttaataggagtgatagaactgtagagggtcaacaatcgttaataaatctgtataataagatgcaaacattatgtagtaaagatgctagtgtaccaatatgtgaatcatttttgcatcatttacgcgcacacaatacagaagatagcaaagagatgatcgattatattctaagacaacagtctgcggactttaaacagaaatatatgagatgtagttatcccactagagataagttagaagagtcattaaaatatgcggaacctcgagaatgttgggatccagagtgttcgaatgccaatgttaatttcttactaacacgtaattataataatttaggactttgcaatattgtacgatgtaatactagcgtgaacaacttacagatggataaaacttcctcattaagattgtcatgtggattaagcaatagtgatagattttctactgttcccgtcaatagagcaaaagtagttcaacataatattaaacattcgttcgacctaaaattgcatttgatcagtttattatctctcttggtaatatggatactaattgtagctatttaaatgggtgccgcggcaagcatacagacgacggtgaatacactcagcgaacgtatctcgtctaaattagaacaagaagcgaacgctagtgctcaaacaaaatgtgatatagaaatcggaaatttttatatccgacaaaaccatggatgtaacctcactgttaaaaatatgtgctctgcggacgcggatgctcagttggatgctgtgttatcagccgctacagaaacatatagtggattaacaccggaacaaaaagcatacgtgccagctatgtttactgctgcgttaaacattcagacaagtgtaaacactgttgttagagattttgaaaattatgtgaaacagacttgtaattctagcgcggtcgtcgataacaaattaaagatacaaaacgtaatcatagatgaatgttacggagccccaggatctccaacaaatttggaatttattaatacaggatctagcaaaggaaattgtgccattaaagcgttgatgcaattgacgactaaggccactactcaaatagcacctagacaagttgctggtacaggagttcagttttatatgattgttatcggtgttataatattggcagcgttgtttatgtactatgccaagcgtatgctgttcacatccaccaatgataaaatcaaacttattttagccaataaggaaaacgtccattggactacttacatggacacattctttagaacttctccgatggttattgctaccacggatatacaaaactgaaaatatattgataatattttaatagattaacatggaagttatcgctgatcgtctagacgatatagtgaaacaaaatatagcggatgaaaaatttgtagattttgttatacacggtctagagcatcaatgtcctgctatacttcgaccattaattaggttgtttattgatatactattatttgttatagtaatttatatttttacggtacgtctagtaagtagaaattatcaaatgttgttggtggcgctagtcatcacattaactattttttattactttatactataatagtactagactgacttctaacaaacatctcacctgccataaataaatgcttgatattaaagtcttctatttctaacactattccatctgtggaaaataatactctgacattatcgctaattgacacatcggtgagtgatatgcctataaagtaataatcttctttgggcacatataccagtgtaccaggttctaacaacctatttactggtgctcctgtagcatactttttctttaccttgagaatatccatcgtttgcttggtcaatagcgatatgtgattttttatcaaccactcgaaaaagtaattggagtgttcatatcctctacgggctattgtctcatggccgtgtatgaaatttaagtaacacgactgtggtagatttgttctatagagccggttgccgcaaatagatagaactaccaatatgtctgtacaaatgttaaacattaattgattaacagaaaaaacaatgttcgttctgggaatagaaaccagatcaaaacaaaattcgttagaatatatgccacgtttatacattgaatataaaataactacagtttgaaaaataacagtatcatttaaacatttaacttgcggggttaatctcacaactttactgtttttaaactgttcaaaatatagcatcgatccatgagaaatacgtttagccgcctttaatagaggaaatcccaccgcctttctggatctcaccaacgacgatagttctgaccagcaactcatttcttcatcatccacctgttttaacatataataggcaggagatagatatccgtcattgcaatattccttctcgtaggcacacaatctaatattgataaaatctccattctcttctctgcatttattatcttgtttcggtggctgattaggctgtagtcttggtttaggctttggtatatcgttgttgaatctattttggtcattaaatctttcatttcttcctggtatatttttatcacctcgtttggttggatttttgtctatattatcgtttgtaacatcggtacgggtattcatttatcacaaaaaaaacttctctaaatgagtctactgctagaaaacctcatcgaagaagataccatattttttgcaggaagtatatctgagtatgatgatttacaaatggttattgccggcgcaaaatccaaatttccaagatctatgctttctatttttaatatagtacctagaacgatgtcaaaatatgagttggagttgattcataacgaaaatatcacaggagcaatgtttaccacaatgtataatataagaaacaatttgggtctaggagatgataaactaactattgaagccattgaaaactatttcttggatcctaacaatgaagttatgcctcttattattaataatacggatatgactgccgtcattcctaaaaaaagtggtaggagaaagaataagaacatggttattttccgtcaaggatcatcacctatcttgtgtattttcgaaactcgtaaaaagattaatatttataaagaaaatatggaatccgcatcgactgagtatacacctatcggagacaacaaggctttgatatctaaatatgcgggaattaatatcctaaatgtgtattctccttccacatccataagattgaatgccatttacggattcaccaataaaaataaactagagaaacttagtactaataaggaactagaatcgtatagttctagccctcttcaagaacccattaggttaaatgattttctgggactattggaatgtgttaaaaagaatattcctctaacagatattccgacaaaggattgattactataaatggagaatgttcctaatgtatactttaatcctgtgtttatagagcccacgtttaaacattctttattaagtgtttataaacacagattaatagttttatttgaagtattcgttgtattcattctaatatatgtattttttagatctgaattaaatatgttcttcatgcctaaacgaaaaatacccgatcctattgatagattacgacgtgctaatctagcgtgtgaagacgataaattaatgatctatggattaccatggatgacaactcaaacatctgcgttatcaataaatagtaaaccgatagtgtataaagattgtgcaaagcttttgcgatcaataaatggatcacaaccagtatctcttaacgatgttcttcgcagatgatgattcattttttaagtatttggctagtcaagatgatgaatcttcattatctgatatattgcaaatcactcaatatctagactttctgttattattattgatccaatcaaaaaataaattagaagccgtgggtcattgttatgaatctctttcagaggaatacagacaattgacaaaattcacagactttcaagattttaaaaaactgtttaacaaggtccctattgttacagatggaagggtcaaacttaataaaggatatttgttcgactttgtgattagtttgatgcgattcaaaaaagaatcctctctagctaccaccgcaatagatcctattagatacatagatcctcgtcgcgatatcgcattttctaacgtgatggatatattaaagtcgaataaagtgaacaataattaattctttattgtcatcatgaacggcggacatattcagttgataatcggccccatgttttcaggtaaaagtacagaattaattagacgagttggtaccaaaaattgaaaataaatacaaaggttcttgagggttgtgttaaattgaaagcgagaaataatcataaatactgcagaccatggaaaccgacacacttttgctctgggtactcctgttgtgggtgccaggttcaacaggggatgaagtgcaactggtcgagagtggaggaggcctcgtgcaaccggggggatcacttcggctgagctgcgcagcatctggctttaccatctccgattactggatacactgggttagacaagcaccaggtaaagggctggagtgggtggcaggcatcacgccggcaggagggtacacctattacgctgattctgtgaaaggccgatttactataagtgcagacacgtctaagaatacggcttatctgcaaatgaattcccttagggcagaggatacagctgtttattactgtgctcggtttgtgttcttcctcccgtacgcaatggactactggggtcaagggaccctggttacagttagtagtgggggaggaggttccggaggtgggggaagtggtggcggtggatctgatatccaaatgactcagagcccaagctcactttcagcatctgtaggagatcgcgtgacaataacgtgtcgcgcgtctcaggatgtgtccacggcagtcgcatggtaccaacaaaagccggggaaagctcccaagttgctcatctattctgcctcttttctttatagtggggtaccgagcagattctccggtagtggctccggtaccgactttacgctcacaataagttcactccagcccgaggatttcgcgacctactattgtcaacaggggtatggcaacccattcactttcggacagggaactaaagtcgaaattaaacgcggtggtggaggatcagggggcggcggatctgggggaggggggagccaagttcaattggtcgaaagtggagccgaagtgaaaaagcccggggcgtcagtcaaggtaagttgtaaggcttctggttacactttcacgggttattatatgcattgggtgcgccaagccccggggcagggattggaatggatggggtggataaaccctaatagcggcggaacaaactacgcccagaagttccagggaagagtaaccatgacgagagataccagtatctcaacggcatatatggagctttctcgccttaggagtgacgatacagcagtctactattgtgctcgctctcccaatccatattattatgattcctctggctattactacccaggggcctttgatatatggggacagggaacaatggttaccgttagtagcggcggtggtggatctggcgggggaggctcaggtggaggtggttcacaacccggccttacgcagcccccaagcgtgagcgtcgccccaggccaaacagctaggataacgtgcggtggcaataacatcggaagtaaaagtgtccactggtatcagcagaaaccgggtcaggccccggtcctcgttgtctatgacgactctgaccggccctcaggaatcccggagcggttttcagggtctaactcaggtaacaccgcaactttgactatttcacgcgtcgaagcaggtgatgaagccgattactattgtcaggtgtgggacagcagctccgaccactacgtctttggtactggcactaaggtcacggtcctgggacaatgattaattaatttttataaaaattgaaattttattttttttttttggaatataaatactcgagaccatgttcataaacataaaatccattctttggatgtgttccacactgattgtgactcatgcgctccataaggtcaaggtggggaaaagtccgccggttagagggagtctttccggaaaagtgtctcttccatgccattttagcaccatgcctactttgccgccgtcctacaatacatccgaattccttcgcataaaatggtcaaaaatcgaggtcgataaaaatggaaaggatctgaaagagacgactgtcttggtcgcccaaaacggaaatataaaaatcggacaagattacaaaggccgcgtgtcagttccgacgcatcccgaggctgtaggagatgcgagcttgactgtcgtaaaattgctcgctagcgatgctggactttaccgatgtgacgtgatgtacggtatcgaagatactcaagacactgtatctctcacagtagatggggtcgtcttccactatagggcggcaacctcccggtatactctcaattttgaggcggcgcagaaggcatgtctcgacgtcggggctgttatcgccacaccggaacagctctttgccgcttatgaggatggtttcgagcaatgtgacgccggttggctcgccgatcagacggttcgatatcccattcgggcgccgagggtgggctgttatggagataagatgggcaaagcaggtgtcaggacatatggattccgcagcccacaggaaacgtatgatgtgtactgctacgttgatcatctggacggagatgtctttcacctgacggtgccctccaaattcacttttgaggaggccgctaaagaatgtgagaatcaggatgcacgactcgcgaccgtaggtgagctgcaagcggcgtggaggaatgggttcgatcagtgtgactacgggtggctgtcagacgcctctgtcaggcaccctgtaactgtcgcaagagcgcaatgcggcggggggctcctgggagtacgaacgctctacaggtttgaaaaccagactggttttcctccaccagattcacgctttgatgcatattgcttcaagcgacggatgtcagacctgagtgtgattggacatcccatagattcagagtctaaggaagacgagccctgctccgaagaaacggacccagtccacgatctgatggctgaaatcctccccgagttccctgatattatagaaatagatctttatcactctgaggaaaatgaagaggaagaagaggagtgcgcaaacgccacggatgttacaacgacccccagtgtccagtatatcaatggaaagcaccttgttacgacagttcctaaggacccagaagctgctgaatgattaattaatttttatgagctcggaggtaatgatatgtatcaatcggtgtgtagaaagtgttacatcgactcataatattatattttttatctaaaaaactaaaaataaacattgattaaattttaatataatacttaaaaatggatgttgtgtcgttagataaaccgtttatgtattttgaggaaattgataatgagttagattacgaaccagaaagtgcaaatgaggtcgcaaaaaaactaccgtatcaaggacagttaaaactattactaggagaattattttttcttagtaagttacagcgacacggtatattagatggtgccaccgtagtgtatataggatcggctcctggtacacatatacgttatttgagagatcatttctataatttaggagtgatcatcaaatggatgctaattgacggccgccatcatgatcctattttaaatggattgcgtgatgtgactctagtgactcggttcgttgatgaggaatatctacgatccatcaaaaaacaactgcatccttctaagattattttaatttctgatgtaagatccaaacgaggaggaaatgaacctagtacggcggatttactaagtaattacgctctacaaaatgtcatgattagtattttaaaccccgtggcatctagtcttaaatggagatgcccgtttccagatcaatggatcaaggacttttatatcccacacggtaataaaatgttacaaccttttgctccttcatattcagctgaaatgagattattaagtatttataccggtgagaacatgagactgactcgagttaccaaattagacgctgtaaattatgaaaaaaagatgtactaccttaataagatcgtccgtaacaaagtagttgttaactttgattatcctaatcaggaatatgactattttcacatgtactttatgctgaggaccgtgtactgcaataaaacatttcctactactaaagcaaaggtactatttctacaacaatctatatttcgtttcttaaatattccaacaacatcaactgaaaaagttagtcatgaaccaatacaacgtaaaatatctagcaaaaattctatgtctaaaaacagaaatagcaagagatccgtacgcggtaataaatagaaacgtgctactgagatatactaccgatatagagtataatgatttagttactttaataaccgttagacataaaattgattctatgaaaactgtgtttcaggtatttaacgaatcatccataaattatactccggttgatgatgattatggagaaccaatcattataacatcgtatcttcaaaaaggtcataacaagtttcctgtaaattttctatacatagatgtggtaatatctgacttatttcctagctttgttagactagatactacagaaactaatatagttaatagtgtactacaaacaggcgatggtaaaaagactcttcgtcttcccaaaatgttagagacggaaatagttgtcaagattctctatcgccctaatataccattaaaaattgttagatttttccgcaataacatggtaactggagtagagatagccgatagatctgttatttcagtcgctgattaatcaattagtagagatgagataagaacattataataatcaataatattatcttatatctcgtttagaaaaatgctaatattaaaatagctaacgctagtaatccaatcggaagccatttgatatctataatagggtatctaatttcctgattcagatagcggacagctatattctcggtagctactcgtttggaatcacaaacattatttacatctaatttactatctgtaatggaaacgtttcccaatgaaatggtacaatccgatacattgcattttgttatatttttttttaaagaggctggtaacaacgcatcgcttcgtttacatggctcgtaccaacaataatagggtaatcttgtatctattcctatccgtactatgcttttatcaggataaatacatttacatcgtatatcgtctttgttagcatcacagaatgcataaatttgttcgtccgtcatgataaaaatttaaagtgtaaatataactattatttttatagttgtaataaaaagggaaatttgattgtatactttcggttctttaaaagaaactgacttgataaaaatggctgtaatctctaaggttacgtatagtctatatgatcaaaaagagattaatgctacagatattatcattagtcatgttaaaaatgacgacgatatcggtaccgttaaagatggtagactaggtgctatggatggggcattatgtaaaacttgtgggaaaacggaattggaatgtttcggtcactggggtaaagtaagtatttataaaactcatatagttaagcctgaatttatttcagaaattattcgtttactgaatcatatatgtattcactgcggattattgcgttcacgagaaccgtattccgacgatattaacctaaaagagttatcgggacacgctcttaggagattaaaggataaaatattatccaagaaaaagtcatgttggaacagcgaatgtatgcaaccgtatcaaaaaattactttttcaaagaaaaaggtttgtttcgtcaacaagttggatgatattaacgttcctaattctctcatctatcaaaagttaatttctattcatgaaaagttttggccattattagaaattcatcaatatccagctaacttattttatacagactactttcccatccctccgctgattattagaccggctattagtttttggatagatagtatacccaaagagaccaatgaattaacttacttattaggtatgatcgttaagaattgtaacttgaatgctgatgaacaggttatccagaaggcggtaatagaatacgatgatattaaaattatttctaataacactaccagtatcaatttatcatatattacatccggcaaaaataatatgattagaagttatatcgtcgcccgacgaaaagatcagaccgctagatctgtaattggtcccagtacatctatcaccgttaatgaggtaggaatgcccgcatatattagaaatacacttacagaaaagatatttgttaatgcctttacagtggataaagttaaacaactattagcgtcaaaccaagttaaattttactttaataaacgattaaaccaattaacaagaatacgccaaggaaagtttatcaaaaataaaatacatttattgcctggtgattgggtagaagtagctgttcaagaatatacaagtattatttttggaagacagccgtctctacatagatacaacgtcatcgcttcatctatcagagctaccgaaggagatactatcaaaatatctcccggaattgccaactctcaaaatgctgatttcgacggagatgaagaatggatgatattggagcaaaatcctaaagccgtaattgaacaaagtattcttatgtatccgacgacgttactcaaacacgatattcatggagcccccgtttatggatctattcaagatgaaatcgtagcagcgtattcattgtttaggatacaagatctttgtttagatgaagtattgaacatcttggggaaatatggaagagagttcgatcctaaaggtaaatgtaaattcagcggtaaagatatctatacttacttgataggtgaaaagattaattatccgggtctcttaaaggatggtgaaattattgcaaacgacgtagatagtaattttgttgtggctatgaggcatctgtcattggctggactcttatccgatcataagtcgaacgtggaaggtatcaactttattatcaagtcatcttatgtttttaagagatatctatctatttacggttttggggtgacattcaaagatctgagaccaaattcgacgttcactaataaattggaggccatcaacgtagaaaaaatagaacttatcaaagaagcatacgccaaatatctcaacgatgtaagagacgggaaaatagttccattatctaaagctttagaggcggactatgtggaatccatgttatccaacttgacaaatcttaatatccgagagatagaagaacatatgagacaaacgctgatagatgatccagataataacctcctgaaaatggccaaagcgggttataaagtaaatcctacagaactaatgtatattctaggtacgtatggacaacaaaggattgatggtgaaccagcagagactcgagtattgggtagagtcttaccttactatcttccagactctaaggatccagaaggaagaggttacattcttaattctttaacaaaaggattaacgggttctcaatattacttttcgatgctggttgccagatctcaatctactgatatcgtctgtgaaacatcacgtaccggaacactggctagaaaaatcattaaaaagatggaggatatggtggtcgacggatacggacaagtagttataggtaatacgctcatcaagtacgccgccaattataccaaaattctaggctcagtatgtaaacctgtagatcttatctatccagatgagtccatgacttggtatttggaaattagtgctctgtggaataaaataaaacagggattcgtttactctcagaaacagaaacttgcaaagaagacattggcgccgtttaatttcctagtattcgtcaaacccaccactgaggataatgctattaaggttaaggatctgtacgatatgattcataacgtcattgatgatgtgagagagaaatacttctttacggtatctaatatagattttatggagtatatattcttgacgcatcttaatccttctagaattagaattacaaaagaaacggctatcactatctttgaaaagttctatgaaaaactcaattatactctaggtggtggaactcctattggaattatttctgcacaggtattgtctgagaagtttacacaacaagccctgtccagttttcacactactgaaaaaagtggtgccgtcaaacaaaaacttggtttcaacgagtttaataacttgactaatttgagtaagaataagaccgaaattatcactctggtatccgatgatatctctaaacttcaatctgttaagattaatttcgaatttgtatgtttgggagaattaaatccagacatcactcttcgaaaagaaacagataaatatgtagtagatataatagttaatagattatacatcaagagagcagaaataaccgaattagttgtcgaatatatgattgaacgatttatctcctttagcgtcattgtaaaggaatggggtatggagacattcattgaggacgaggataatattagatttactgtctacctaaatttcgttgaaccggaagaattgaatcttagtaagtttatgatggttcttccgggtgccgccaacaagggcaagattagtaaattcaagattcctatctctgattatacgggttatgacgacttcaatcaaacaaaaaagctcaataagatgactgtagaactcatgaatctaaaagaattgggttctttcgatttggaaaacgtcaacgtgtatcctggagtatggaatacatacgatatcttcggtatcgaggccgctcgtgaatacttgtgcgaagccatgttaaacacctatggagaagggttcgattatctgtatcagccttgtgatcttctcgctagtttactatgtgctagttacgaaccagaatcagttaataaattcaagttcggtgcagctagtactcttaagagagctacgttcggagacaataaagcattgttaaacgcggctcttcataaaaagtcagaacctattaacgataatagtagctgccacttttttagcaaggtccctaatataggaactggatattacaaatactttatcgacttgggtcttctcatgagaatggaaaggaaactatctgataagatatcttctcaaaagatcaaggaaatggaagaaacagaagacttttaattcttatcaataacatatttttctatgatctgtcttttaaacgatggattttccacaaatgcgcctctcaagtccctcatagaatgatacacgtataaaaaatatagcataggcaatgactccttatttttagacattagatatgccaaaatcatagccccgcttctatttactcccgcagcacaatgaaccaacacgggctcgtttcgttgatcacatttagataaaaaggcggttacgtcgtcaaaatatttactaatatcggtagttgtatcatctaccaacggtatatgaataatattaatattagagttaggtaatgtatatttatccatcgtcaaatttaaaacatatttgaacttaacttcagatgatggtgcatccatagcatttttataatttcccaaatacacattattggttacccttgtcattatagtgggagatttggctttgtgcatatctccagttgaacgtagtagtaagtatttatacaaacttttcttatccatttataacgtacaaatggataaaactactttatcggtaaacgcgtgtaatttagaatacgttagagaaaaggctatagtaggcgtacaagcagccaaaacatcaacacttatattctttgttattatattggcaattagtgcgctattactctggtttcagacgtctgataatccagtctttaatgaattaacgagatatatgcgaattaaaaatacggttaacgattggaaatcattaacggatagcaaaacaaaattagaaagtgatagaggtagacttctagccgctggtaaggatgatatattcgacttcaaatgtgtggatttcggcgcctattttatagctatgcgattggataagaaaacatatctgccgcaagctattaggcgaggtactggagacgcgtggatggttaaaaaggcggcaaaggtcgatccatctgctcaacaattttgtcagtatttgataaaacacaagtctaataatgttattacttgtggtaatgagatgttaaatgaattaggttatagcggttattttatgtcaccgcattggtgttccgattttagtaatatggaatagtgttagataaatgcggtaacgaatgttcctgtaaggaaccataacagtttagatttaacgttaaagatgagcataaacataataaacaaaattacaatcaaacctataacattaatatcaaacaatccaaaaaatgaaatcagtggagtagtaaacgcgtacataactcctggataacgtttagcagctgccgttcctattctagaccaaaaattcggtttcatgttttcgaagcggtgttctgcaacaagtcggggatcgtgttctacatatttggcggcgttatccagtatctgcctattgatcttcatttcgttttcgattctggctatttcaaaataaaatcccgatgatagacctccagactttataatttcatctacgatgttcagcgccgtagtaactctaataatataggctgataagctaacatcataccctcctgtatatgtgaatatggcatgatttttgtccattacaagctcggttttaactttattgcctgtaataatttctctcatctgtaggatatctatttttttgtcatgcattgccttcaagacgggacgaagaaacgtaatatcctcaataacgttatcgttttctacaataactacatattctacctttttattttctaactcggtaaaaaaattagaatcccatagggctaaatgtctagcgatatttcttttcgtttcctctgtacacatagtgttacaaaaccctgaaaagaagtgagtatacttgtcatcatttctaatgtttcctccagtccactgtataaacgcataatccttgtaatgatctggatcatccttgactaccacaacatttcttttttctggcataacttcgttgtcctttacatcatcgaacttctgatcattaatatgctcatgaacattaggaaatgtttctgatggaggtctatcaataactggcacaacaataacaggagttttcaccgccgccatttagttattgaaattaatcatatacaactctttaatacgagttatattttcgtctatccattgtttcacatttacatatttcgacaaaaagatataaaatgcgtattccaatgcttctctgtttaatgaattactaaaatatacaaacacgtcactgtctggcaataaatgatatcttagaatattgtaacaatttattttgtattgcacatgttcgtgatctatgagttcttcttcgaatggcataggatctccgaatctgaaaacgtataaataggagttagaataataatatttgagagtattggtaatatataaactctttagcggtataattagtttttttctctcaatttctatttttagatgtgatggaaaaatgactaattttgtagcattagtatcatgaactctaatcaaaatcttaatatcttcgtcacacgttagctctttgaagtttttaagagatgcatcagttggttctacagatggagtaggtgcaacaattttttgttctacacatgtatgtactggagccattgttttaactataatggtgcttgtatcgaaaaactttaatgcagatagcggaagctcttcgccgcgactttctacatcgtaattgggttctaacgccgatctctgaatggatactagttttctaagttctaatgtgattctctgaaaatgtaaatccaattcctccggcattatagatgtgtatacatcggtaaataaaactatagtatccaacgatcccttctcgcaaattctagtcttaaccaaaaaatcgtatataaccacggagatggcgtatttaagagtggattcttctaccgttttgttcttggatgtcatataggaaactataaagtccgcactactgttaagaatgattactaacgcaactatatagttcaaattaagcattttggaaacataaaataactctgtagacgatacttgactttcgaataagtttgcagacaaacgaagaaagaacagacctctcttaatttcagaagaaaactttttttcgtattcctgacgtctagagtttatatcaataagaaagttaagaattagtcggttaatgttgtatttcattacccaagtttgagatttcataatattatcaaaagacatgataatattaaagataaagcgctgactatgaacgaaatagctatatggttcgctcaagaatatagtcttgttaaacgtggaaacgataactgtatttttaatcacgtcagcggcatctaaattaaatataggtatatttattccacacactctacaatatgccacaccatcttcataataaataaattcgttagcaaaattattaattttagtgaaatagttagcgtcaactttcatagcttccttcaatctaatttgatgctcacacggtgcgaattccactctaacatcccttttccatgcctcaggttcatcgatctctataatatctagtttcttgcgtttcacaaacacgggctcgtctctcgcgatgagatctgtatagtaactatgtaaatgataactagatagaaagatgtagctatatagatgacgatcctttaagagaggtataataactttaccccaatcagataaactattgttatggtcttcggaaaaagaatttttataaatttttccagtattttccaaatatacgtacttgacatctaaaaaatccttaatgataataggaatggataatccgtctattttataaagaaatacatatcgcacattatacttttttttggaaatgggaataccgatgtgtctacataaatatgcaaagtctaaatattttttagagaatcttagttggtccaaattcttttccaagtacggtaatagatttttcatattgaacggtatcttcttaatctctggttctagttccgcattaaatgatgaaactaagtcactatttttataactaacgattacatcacctctaacatcatcatttaccagaatactgatcttcttttgtcgtaaatacatgtctaatgtgttaaaaaaaagatcatacaagttatacgtcatttcatctgtggtattcttgtcattgaaggataaactcgtactaatctcttctttaacagcctgttcaaatttatatcctatatacgaaaaaatagcaaccagtgtttgatcatccgcgtcaatattctgttctatcgtagtgtataacaatcgtatatcttcttctgtgatagtcgatacgttataaaggttgataacgaaaatatttttatttcgtgaaataaagtcatcgtaggattttggacttatattcgcgtctagtagatatgcttttatttttggaatgatctcaattagaatagtctctttagagtccatttaaagttacaaacaactaggaaattggtttatgatgtataatttttttagtttttatagattctttattctatacttaaaaaatgaaaataaatacaaaggttcttgagggttgtgttaaattgaaagcgagaaataatcataaattatttcattatcgcgatatccgttaagtttgtatcgtaatggcgtggtcaattacaaataaagcggatactagtagcttcacaaagatggctgaaatcagagctcatctaaaaaatagcgctgaaaataaagataaaaacgaggatattttcccggaagatgtaataattccatctactaagcccaaaaccaaacgagccactactcctcgtaaaccagcggctactaaaagatcaaccaaaaaggaggaagtggaagaagaagtagttatagaggaatatcatcaaacaactgaaaaaaattctccatctcctggagtcagcgacattgtagaaagcgtggccgctgtagagctcgatgatagcgacggggatgatgaacctatggtacaagttgaagctggtaaagtaaatcatagtgctagaagcgatctttctgacctaaaggtggctaccgacaatatcgttaaagatcttaagaaaattattactagaatctctgcagtatcgacggttctagaggatgttcaagcagctggtatctctagacaatttacttctatgactaaagctattacaacactatctgatctagtcaccgagggaaaatctaaagttgttcgtaaaaaagttaaaacttgtaagaagtaaatgcgtgcacttttttataaagatggtaaactctttaccgataataattttttaaatcctgtatcagacgataatccagcgtatgaggttttgcaacatgttaaaattcctactcatttaacagatgtagtagtatatgaacaaacgtgggaggaggcgttaactagattaatttttgtgggaagcgattcaaaaggacgtagacaatacttttacggaaaaatgcatgtacagaatcgcaacgctaaaagagatcgtatttttgttagagtatataacgttatgaaacgaattaattgttttataaacaaaaatataaagaaatcgtccacagattccaattatcagttggcggtttttatgttaatggaaactatgttttttattagatttggtaaaatgaaatatcttaaggagaatgaaacagtagggttattaacactaaaaaataaacacatagaaataagtcccgatgaaatagttatcaagtttgtaggaaaggacaaagtttcacatgaatttgttgttcataagtctaatagactatataagccgctattgaaactgacggatgattctagtcccgaagaatttctgttcaacaaactaagtgaacgaaaggtatacgaatgtatcaaacagtttggtattagaatcaaggatctccgaacgtatggagtcaattatacgtttttatataatttttggacaaatgtaaagtccatatctcctcttccatcaccaaaaaagttaatagcgttaactatcaaacaaactgctgaagtggtaggtcatactccatcaatttcaaaaagagcttacatggcaacgactattttagaaatggtaaaggataaaaattttttagatgtagtatctaaaactacgttcgatgaattcctatctatagtcgtagatcacgttaaatcatctacggatggatgatatagatctttacacaaataattacaagaccgataaatggaaatggataagcgtatgaaatctctcgcaatgacagctttcttcggagagctaaacacattagatattatggcattgataatgtctatatttaaacgccatccaaacaataccattttttcagtggataaggatggtcagtttatgattgatttcgaatacgataattataaggcttctcaatatttggatctgaccctcactccgatatctggagatgaatgcaagactcacgcatcgagtatagccgaacaattggcgtgtgtggatattattaaagaggatattagcgaatatatcaaaactactccccgtcttaaacgatttataaaaaaataccgcaatagatcagatactcgtatcagtcgagatacagaaaagcttaaaatagctctagctaaaggcatagattacgaatatataaaagacgcttgttaataagtaaatgaaaaaaaactagtcgtttataataaaacacaatatggatgccaacatagtatcatcttctactattgcaacgtatatagacgctttagcaaagaatgcttcagaattagaacagaggtctaccgcatacgaaataaataatgaattggaactagtatttattaagccgccattaattactttgacaaatgtagtgaatatctctacgattcaggaatcgtttattcgatttaccgttactaataaggaaggtgtcaaaattagaactaagattccattatctaaggtacatggtctagatgtaaaaaatgtacagttagtagatgctatagataacatagtttgggaaaagaaatcattagtgacggaaaatcgtcttcacaaagaatgcttgttgagactatcgacagaggaacgtcatatatttttggattacaagaaatatggatcctctatccgactagaattagtcaatcttattcaagcaaaaacaaaaaactttacgatagactttaagctaaaatattttctaggatccggtgcccaatctaaaagttctttgttgcacgctattaatcatccaaagtcaaggcctaatacatctctggaaatagaattcacacctagagacaatgaaaaagttccatatgatgaactaataaaggaattgacgactctatcacgtcatatatttatggcttctccagagaatgtaattctttctccgcctattaacgcacctataaagacttttatgttgcctaaacaagatatagtaggtctggatctggaaaatctatatgccgtaactaagactgacggcattcctataactatcagagttacatcaaacgggttgtattgttattttacacatcttgggtatattattagatatccagttaagagaataatagattccgaagtagtagtctttggtgaggcagttaaggataagaactggaccgtatatctcattaagctaatagagcctgtgaatgcaatcaatgatagactagaagaaagtaagtatgttgaatctaaactagtggatatttgtgatcggatagtattcaagtcaaagaaatatgaaggtccgtttactacaactagtgaagtcgtcgatatgttatctacatatttaccaaagcaaccagaaggtgttattctgttctattcaaagggacctaaatctaacattgattttaaaattaaaaaggaaaatactatagaccaaactgcaaatgtagtatttaggtacatgtccagtgaaccaattatctttggagaatcgtctatctttgtagagtataagaaatttagcaacgataaaggctttcctaaagaatatggttctggtaagattgtgttatataacggcgttaattatctaaataatatctattgtttggaatatattaatacacataatgaagtgggtattaagtccgtggttgtacctattaagtttatagcagaattcttagttaatggagaaatacttaaacctagaatcgataaaaccatgaaatatattaactcagaagattattatggaaatcaacataatatcatagtcgaacatttaagagatcaaagcatcaaaataggagatatctttaacgaggataaactatcggatgtgggacatcaatacgccaataatgataaatttagattaaatccagaagttagttattttacgaataaacgaactagaggaccgttgggaattttatcaaactacgtcaagactcttcttatttctatgtattgttccaaaacatttttagacgattccaacaaacgaaaggtattggcgattgattttggaaacggtgctgacctggaaaaatacttttatggagagattgcgttattggtagcgacggatccggatgctgatgctatagctagaggaaatgaaagatacaacaaattaaactctggaattaaaaccaagtactacaaatttgactacattcaggaaactattcgatccgatacatttgtctctagtgtcagagaagtattctattttggaaagtttaatatcatcgactggcagtttgctatccattattcttttcatccgagacattatgctaccgtcatgaataacttatccgaactaactgcttctggaggcaaggtattaatcactaccatggacggagacaaattatcaaaattaacagataaaaagacttttataattcataagaatttacctagtagcgaaaactatatgtctgtagaaaaaatagctgatgatagaatagtggtatataatccatcaacaatgtctactccaatgactgaatacattatcaaaaagaacgatatagtcagagtgtttaacgaatacggatttgttcttgtagataacgttgatttcgctacaattatagaacgaagtaaaaagtttattaatggcgcatctacaatggaagatagaccgtctacaaaaaactttttcgaactaaatagaggagccattaaatgtgaaggtttagatgtcgaagacttacttagttactatgttgtttatgtcttttctaagcggtaaataataatatggtatgggttctgatatccccgttctaaatgcattaaataattccaatagagcgatttttgttcctataggaccttccaactgtggatactctgtattgttaatagatatattaatacttttgtcgggtaacagaggttctacgtcttctaaaaataaaagtttgataacatctggcctgttcataaataaaaacttggcgattctatatatactcttattatcaaatctagccattgtcttatagatgtgagctactgtaggtgtaccatttgattttctttctaatactatatatttctctcgaagaagttcttgcacatcatctgggaataaaatactactgttgagtaaatcagttattttttttatatcgatattgatggacatttttatagttaaggataataagtatcccaaagtcgataacgacgataacgaagtatttatacttttaggaaatcacaatgactttatcagatcaaaattaacaaaattaaaggagcatgtatttttttctgaatatattgtgactccagatacatatggatctttatgcgtcgaattaaatgggtctagttttcagcacggtggtagatatatagaggtggaggaatttatagatgctggaagacaagttagatggtgttctacatccaatcatatatctgaagatatacccgaagatatacacactgataaatttgtcatttatgatatatacacttttgacgctttcaagaataaacgattggtattcgtacaggtacctccgtcgttaggagatgatagctatttgactaatccgttattgtctccgtattatcgtaattcagtagccagacaaatggtcaatgatatgatttttaatcaagattcatttttaaaatatttattagaacatctgattagaagccactatagagtttctaaacatataacaatagttagatacaaggataccgaagaattaaatctaacgagaatatgttataatagagataagtttaaggcgtttgtattcgcttggtttaacggcgtttcggaaaatgaaaaggtactagatacgtataaaaaggtatctaatttgatataatgaattcagtgactgtatcacacgcgccatatactattacttatcacgatgattgggaaccagtaatgagtcaattggtagagttttataacgaagtagccagttggctgctacgagacgagacgtcgcctattcctgataagttctttatacagttgaaacaaccgcttagaaataaacgagtatgtgtgtgcggtatagatccgtatccgaaagatggaactggtgtaccgttcgaatcaccaaattttacaaaaaaatcaattaaggagatagcttcatctatatctagattaaccggagtaattgattataaaggttataaccttaatataatagacggggttataccctggaattattacttaagttgtaaattaggagaaacaaaaagtcacgcgatctactgggataagatttccaagttactgctgcagcatataactaaacacgttagtgttctttattgtttgggtaaaacagatttctcgaatatacgggcaaagttagaatccccggtaactaccatagtgggatatcatccagcggctagagaccgtcaattcgagaaagatcgatcatttgaaattatcaacgttttactggaattagacaacaaggtacctataaattgggctcaagggtttatttattaatgctttagtgaaattttaacttgtgttctaaatggatgcggctattagaggtaatgatgttatctttgttcttaagactataggtgtcccgtcagcgtgcagacaaaatgaagatccaagatttgtagaagcatttaaatgcgacgagttagaaagatatattgagaataatccagaatgtacactattcgaaagtcttagggatgaggaagcatactctatagtcagaattttcatggatgtagatttagacgcgtgtctagacgaaatagattatttaacggctattcaagattttattatcgaggtgtcaaactgtgtagctagattcgcgtttacagaatgcggcgccattcatgaaaatgtaataaaatccatgagatctaatttttcattgactaagtctacaaatagagataaaacaagttttcatattatctttttagacacgtataccactatggatacattgatagctatgaaacgaacactattagaattaagtagatcatctgaaaatccactaacaagatcgatagacactgccgtatataggagaaaaacaactcttcgggttgtaggtactaggaaaaatccaaattgcgacactattcatgtaatgcaaccacctcatgataatatagaagattacctattcacttacgtggatatgaacaacaatagttattacttttctctacaacgacgattggaggatttagttcctgataagttatgggaaccagggtttatttcattcgaagacgctataaaaagagtttcaaaaatattcattaattctataataaactttaatgatctcgatgaaaataattttacaacggtaccactggtcatagattacgtaacaccttgtgcattatgtaaaaaacgatcgcataaacatccgcatcaactatcgttggaaaatggtgctattagaatttacaaaactggtaatccacatagttgtaaagttaaaattgttccgttggatggtaataaactgtttaatattgcacaaagaattttagacactaactctgttttattaaccgaacgaggagaccatatagtttggattaataattcatggaaatttaacagcgaagaacccttgataacaaaactaattttgtcaataagacatcaactacctaaggaatattcaagcgaattactctgtccaagaaaacgaaagactgtagaagctaacatacgagacatgttagtagattcagtggagaccgatacctatccggataaacttccgtttaaaaatggtgtattggacctggtagacggaatgttttactctggagatgatgctaaaaaatatatgtgtactgtatcaaccggatttaaatttgacgatacaaagttcgtcgaagacagtccagaaatggaagagttaatgaatatcattaacgatatccaaccattaacggatgaaaataagaaaaatagagagctatatgaaaaaacattatctagttgtttatgcggtgctaccaaaggatgtttaacattcttttttggagaaactgcaactggaaagtcgacaaccaaacgtttgttaaagtctgctatcggtgacctgtttgttgagacgggtcaaacaattttaacagatgtattggataaaggacctaatccatttatcgctaacatgcatttgaaaagatctgtattctgtagcgaactacctgattttgcatgtagtgggtcaaagaaaatcagatctgataatattaaaaagttgacagaaccttgtgtcattggaagaccgtgtttctccaataaaattaataatagaaaccatgcgacaatcattatcgatactaattacaaacctgtttttgataggatagataacgcattaatgagaagaattgccgtcgtgcgattcagaacacacttttctcaaccttctggtagagaggctgctgaaaataatgacgcgtacgataaagtcaaactattagacgaggggttagatggtaaaatacaaaataatagatatagattcgcatttctatacttgttggtgaaatggtacagaaaatatcatgttcctattatgaaactatatcctacacccgaagagattcctgactttgcattctatctcaaaataggtactctgttggtatctagctctgtaaagcatattccattaatgacggacctctccaaaaagggatatatattgtacgataatgtggtcactcttccgttgactactttccaacagaaaatatccaagtattttaattctagactatttggacacgatatagagagcttcatcaatagacataagaaatttgccaatgttagtgatgaatatctgcaatatatattcatagaggatatttcatctccgtaaatatatgctcatatatttatagaagatatcacatatctaaatgaataccggaattatagatttatttgataatcatgttgatagtataccaactatattacctcatcagttagctactctagattatctagttagaactatcatagatgagaacagaagcgtgttattgttccatattatgggatcaggtaaaacaataatcgctttgttgttcgccttggtagcttccagatttaaaaaggtttacattctagtgccgaacatcaacatcttaaaaattttcaattataatatgggtgtagctatgaacttgtttaatgacgaattcatagctgagaatatctttattcattccacaacaagtttttattctcttaattataacgataacgtcattaattataacggattatctcgctacaataactctatttttatcgttgatgaggcacataatatctttgggaataatactggagaacttatgaccgtgataaaaaataaaaacaagattccttttctactattgtctggatctcccattactaacacacctaatactctgggtcatattatagatttaatgtccgaagagacgatagattttggtgaaattattagtcgtggtaagaaagtaattcagacacttcttaacgaacgcggtgtgaatgtacttaaggatttgcttaaaggaagaatatcatattacgaaatgcctgataaagatctaccaacgataagatatcacggacgtaagtttctagatactagagtagtatattgtcacatgtctaaacttcaagagagagattatatgattactagacgacagctatgttatcatgaaatgtttgataaaaatatgtataacgtgtcaatggcagtattgggacaacttaatctgatgaataatttagatactttatttcaggaacaggataaggaattgtacccaaatctgaaaataaataatggcgtgttatacggagaagaattggtaacgttaaacattagttccaaatttaaatactttattaatcggatacagacactcaacggaaaacattttatatacttttctaattctacatatggcggattggtaattaaatatatcatgctcagtaatggatattctgaatataatggttctcagggaactaatccacatatgataaacggcaaaccaaaaacatttgctatcgttactagtaaaatgaaatcgtctttagaggatctattagatgtgtataattctcctgaaaacgatgatggtagtcaattgatgtttttgttttcatcaaacattatgtccgaatcctatactctaaaagaggtaaggcatatttggtttatgactatcccagatactttttctcaatacaaccaaattcttggacgatctattagaaaattctcttacgccgatatttctgaaccagttaatgtatatcttttagccgccgtatattccgatttcaatgacgaagtgacgtcattaaacgattacacacaggatgaattaattaatgttttaccatttgacatcaaaaagctgttatatctaaaatttaagacgaaagaaacgaatagaatatactctattcttcaagagatgtctgaaacgtattctcttccaccacatccatcaattgtaaaagttttattgggagaattggtcagacaatttttttataataattctcgtattaagtataacgataccaagttacttaaaatggttacatcagttataaaaaataaagaagacgctaggaattacatagatgatattgtaaacggtcacttctttgtatcgaataaagtatttgataaatctcttttatacaaatacgaaaacgatattattacagtaccgtttagactttcctacgaaccatttgtttggggagttaactttcgtaaagaatataacgtggtatcttctccataaaactgatgagatatataaagaaataaatgtcgagctttgttaccaatggataccttccagttacattggagccacacgagctgacgttagacataaaaactaatattaggaatgccgtatataagacgtatctccatagagaaattagtggtaaaatggccaagaaaatagaaattcgtgaagacgtggaattacctctcggcgaaatagttaataattctgtagttataaacgttccgtgtgtaataacctacgcgtattatcacgttggggatatagttagaggaacattaaacatcgaagatgaatcaaatgtaactattcaatgtggagatttaatctgtaaactaagtagagattcgggtactgtatcatttagcgattcaaagtactgcttttttcgaaatggtaatgcgtatgacaatggcagcgaagtcactgccgttctaatggaggctcaacaaggtatcgaatctagttttgtttttctcgcgaatatcgtcgactcataagaaagagaatagcggtaagtataaacacgaatactatggcaataattgcgaatgttttattcccttcgatatatttttgataatatgaaaaacatgtctctctcaaatcggacaaccatctcataaaatagttatctcgcgctggcgaggtggttgccgctcgtataatctccccagaataatatacttgcgtgtcgtcgttcaatttatacggatttctatagttctctgttatataatgcggttttccatcatgattagacgacgacaatagtgttctaaatttagatagttgatcagaatgaatgtttattggcgttggaaaaattatccatgctgcgtctgcagagtggttgatagttgttcctagatatgtaaaataatccaacgtactaggtagcaaattgtctagataaaatactgaatcaaacggcgcagacgtattagcggatctaatggaatccaattgattgactatcttttgaaaatatacatttttatgatccgatacttgtaagaatatagaaataatgataagtccatcatcgtgtttttttgcctcttcataagaactatattttttcttattccaatgaacaagattaatctctccagagtatttgtacacatctatcaagtgattggatccataatcgtcttcctttccccaatatatatgtagtgatgataacacatattcattggggagaaaccctccacttatatatcctcctttaaaattaatccttactagttttccagtgttctggatagtggttggtttcgactcattataatgtatgtctaacggcttcaatcgcgcgttagaaattgcttttttagtttctatattaataggagatagttgttgcggcatagtaaaaatgaaatgataactgtttaaaaatagctcttagtatgggaattacaatggatgaggaagtgatatttgaaactcctagagaattaatatctattaaacgaataaaagatattccaagatcaaaagacacgcatgtgtttgctgcgtgtataacaagtgacggatatccgttaataggagctagaagaacttcattcgcgttccaggcgatattatctcaacaaaattcagattctatctttagagtatccactaaactattacggtttatgtactacaatgaactaagagaaatctttagacggttgagaaaaggttctatcaacaatatcgatcctcactttgaagagttaatattattgggtggtaaactagataaaaaggaatctattaaagattgtttaagaagagaattaaaagaggaaagtgatgaacgtataacagtaaaagaatttggaaatgtaattctaaaacttacaacacgggataaattatttaataaagtatatataggttattgcatggcgtgttttattaatcaatcgttggaggatttatcgcatactagtatttacaatgtagaaattagaaagattaaatcattaaatgattgtattaacgacgataaatacgaatatctgtcttatatttataatatgctagttaatagtaaatgaacttttacagatctagtataattagtcagattattaagtataatagacgactagctaagtctattatttgcaaggatgactctcaaattattacactcacggcattcgttaaccaatgcctatggtgtcataaacgagtatccgtgtccgctattttattaactactgataacaaaatattagtatgtaacagacgagatagttttctctattctgaaataattagaactagaaacatgtttagaaagaaacgattatttctgaattattccaattatttgtccaaacaggaaagaagtatactatcgtcatttttttctctatatccagctactgctgataatgatagaatagacgctatttatccgggtggcatacccaaaaggggtgagaatgttccagagtgtctatccagggaaatcaaagaagaagttaatatagacaattcttttgtattcatagacactcggttttttattcatggtatcatagaagataccattatcaacaaattttttgaggtaattttctttgtcggaagaatatctctaacgagtgatcaaattattgatacctttaaaagtaatcatgaaatcaaggatctaatatttttagatccgaattcaggtaatggactccaatacgaaattgcaaaatatgctctagatactgcaaaacttaaatgttacggccatagaggatgttattatgaatcattaaaaaaattaactgaggatgattgattagaaaatataaattaatttaccatcgtgtatttttataacgggattgtccggcatatcatgtagatagttaccgtctacatcgtatactcgaccatctacgcctttaaatcctctatttattgacattaatctattagaattggaataccaaatattagtaccctcaattagtttattggtaatattttttttagacgatagatcgatggctcttgaaaccaaggttttccaaccggactcattgtcgatcggtgagaagtctttttcattagcatgaatccattctaatgatgtatgtttaaacactctaaacaattggacaaattcttttgatttgctttgaatgatttcaaataggtcttcgtctacagtaggcataccattagataatctagccattataaagtgcacgtttacatatctacgttctggaggagtaagaacgtgactattgagacgaatggctcttcctactatctgacgaagagacgcctcgttccatgtcatatctaaaatgaagatatcattaattgagaaaaaactaataccctcgcctccactagaagagaatacgcatgttttaatgcattctccgttagtgtttgattcttggttaaactcagccaccgccttgattctagtatcttttgttctagatgagaactctatattagagataccaaagactttgaaatatagtaataagatttctattcctgactgattaacaaatggttcaaagactagacatttaccatgggatgctaatattcccaaacatacatctataaatttgacgcttttctcttttaattcagtaaatagagagatatcagccgcactagcatcccctttcaatagttctccctttttaaaggtatttaatgcggatttagaaaactctctatctcttaatgaatttttaaaatcattatatagtgttgctatctcttgcgcgtattcgccgggatcacgattttgtctttcaggaaagctatcgaacgtaaacgtagtagccatacgtctcagaattctaaatgatgatataccagtttttatttctgcgagtttagccttttgataaatctcttcttgcttttttgacatattaacgtatcgcattaatactgttttcttagcgaatgatgcagacccttctacgttatcaaaaatagaaaactcgttattaactatgtacgaacataggcctcctagtttggagactaattctttttcatcgactagacgtttattctcaaatagtgattggtgttgtaaggatcctggtcgtagtaagttaaccaacatggtgaattcttgcacactattgacgataggtgtagccgataaacaaatcatcttatggttttttaatgcgatggtcttggataaaaaattatatactgaacgagtaggacggatcttaccatcttctttgattaatgatttagaaatgaagttatgacattcatcaataatgacgcatattctactcttggaattaatagttttgatattagtaaaaaatttatttctaaaattttgatcatcgtaattaataaaaatacaatccttcgttatctctggagcgtatctgagtatagtgttcatccaaggatcttctatcaaagcctttttcaccaataagataatagcccaattcgtataaatatccttaagatgtttgagaatatatacagtagtcattgttttaccgacacccgtttcatggaacaataaaagagaatgcatactgtctaatcctaagaaaactcttgctacaaaatgttgataatccttgaggcgtactacgtccgaccccatcatttcaacgggcatattagtagttctgcgtaaggcataatcgatataggccgcgtgtgatttactcatttatgagtgataagtaataactatgttttaaaaatcacagcagtagtttaactagtcttctctgatgtttgttttcgatactttttgaatcagaagtcatactagaataaagcaacgagtgaacgtaatagagagcttcgtatactctattcgaaaactctaagaacttattaatgaattccgtatccactggattgtttaaaatactaaattgaacactgttcacatccttccaagaagaagacttagtgacggacttaacatgagacataaataaatccaaattttttttacaaacatcactagccaccataatggcgctatctttcaaccagctatcgcttacgcattttagcagtctaacatttttaaagagactacaatatattctcatagtatcgattacacctctaccgaataaagttggaagtttaataatacaatatttttcgtttacaaaatcaaataatggtcgaaacacgtcgaaggttaacatcttataatcgctaatgtatagattgttttcagtgagatgattattagatttaatagcatctcgttcacgtttgaacagtttattgcgtgcgctgaggtcggcaactacggcgtccgctttagtactcctcccataatactttacgctattaatctttaaaatttcatagactttatctagatcgctttctggtaacatgatatcatgtgtaaaaagttttaacatgtcggtcggcattctatttagatcattaactctagaaatctgaagaaagtaattagctccgtattccagactaggtaatgggcttttacctagagacagattaagttctggcaatgtttcataaaatggaagaaggacatgcgttccctcccggatattttttacaatttcatccatttacaactctatagtttgttttcattattattagttattatctcccataatcttggtaatacttaccccttgatcgtaagataccttatacaggtcattacatacaactaccaattgtttttgtacataatagattggatggttgacatccatggtggaataaactactcgaacagatagtttatctttccccctagatacattggccgtaatagttgtcggcctaaagaatatctttggtgtaaagttaaaagttagggttcttgttccattattgctttttgtcagtagttcattataaattctcgagatgggtccgttctctgaatatagaacatcatttccaaatctaacttctagtctagaaataatatcggtcttattcttaaaatctattcccttgatgaagggatcgttaatgaacaaatccttggcctttgattcggctgatctattatctccgttatagacgttacgttgactagtccaaagacttacaggaatagatgtatcgatgatgttgatactatgtgatatgtgagcaaagattgttctcttagtggcatcactatatgttccagtaatggcggaaaactttttagaaatgttatatataaaagaattttttcgtgttccaaacattagcagattagtatgaagataaacactcatattatcaggaacattatcaatttttacatacacatcagcatcttgaatagaaacgataccatcttctggaacctcaacaatctcggcagactccggataaccagtcggtggaccatcgctaacaataactagatcatccaacaatctactcacatatgcatctatataatctttttcatcttgtgagtaccctggatacgaaataaatttattatccgtatttccataataaggtttagtataaacagagagcgatgttgccgcatgaacttcagttacagtcgccgttggttggtttatttgacctattactctcctaggtttctctataaacgatggtttaatttgtacattcttaaccatatatccaataaagctcaattcaggaacataaacaaattctttgttgaacgtttcaaagtcgaacgaagagtcacgaataacgatatcggatactggattgaaggttaccgttacggtaatttttgaatcggatagtttaagactgctgaatgtatcttccacatcaaacggagttttaatataaacgtatactgtagatggttctttaatagtgtcattaggagttaggccaatagaaatatcattaagttcactagaatatccagagtgtttcaaagcaattgtattattgatacaattattatataattcttcgccctcaatttcccaaataacaccgttacacgaagagatagatacgtgattaatacatttatatccaacatatggtacgtaaccgaatcttcccatacctttaacttctggaagttccaaactcagaaccaaatgattaagcgcagtaatatactgatccctaatttcgaagctagcgatagcctgattgtctggaccatcgtttgtcataactccggatagagaaatatattgcggcatatataaagttggaatttgactatcgactgcgaagacattagaccgtttaatagagtcatccccaccgatcaaagaattaatgatagtattattcattttctatttaaaatggaaaaagcttacaataaactccgtagagaaatatctataatttgtgagttttccttaaagtaacagcttccgtaaacgccgtctttatctcttagtaagtttattgtatttataaccttttccttatcttcatagaatactaaaggcaacaaagaaatttttggttcttctctaagagctacgtgagacttaaccatagaagccaacgaatccctacatattttagaacagaaataccctacttcaccacccttgtatgtctcaatactaataggtctaaaaaccaaatcttgattacaaaaccaacacttatcaattacactatttgtcttaatagacacatctgccatagatttataatactttggtagtatacaagcgagtgcttcttctttagcgggcttaaagactgctttaggtgctgaaataaccacatctggaaggcttactcgcttagccatttaattacggaactatttttttatacttctaatgagcaagtagaaaacctctcatctacaaaaacatactcgtgtccataatcctctaccatagttacacgttttttagatctcatatgtgctaaaaagttttcccatactaattggttactattatttttcgtataatttttaacagtttgaggttttagatttttagttacagaagtgatatcgaatattttatccaaaaagaatgaataattaattgtcttagaaggagtgttttcttggcaaaagaataccaagtgcttaaatatttctactacttcattaatcttttctgtactcagattcagtttctcatcttttacttgattgattatttcaaagactaacttataatcctttttatttattctctcgttagccttaagaaaactagatacaaaatttgcatctacatcatccgtggatatttgatttttttccatgatatccaagagttccgagataatttctccagaacattgatgagacaataatctccgcaatacatttctcaaatgaataagtttattagacacgtggaagtttgactttttttgtacctttgtacatttttgaaataccgactcgcaaaaaatacaatattcatatccttgttcagatactataccgttgtgtctacaaccgctacataatcgtagattcatgttaacactctacgtatctcgtcgtccaatattttatataaaaacattttatttctagacgttgccagaaaatcctgtaatacttttagttttttgggctgtgaataaagtatcgccctaatatggttaccgtcctccgccaatatagtagttaaattatccgcacatgcaaaagaacaccgcttaggcggattcagtacaatgttatatttttcgtaccaactcatttaaatatcataatctaaaatagttctgtaatatgtctagcgctaatatattgatcataatcctgtgcataaattaagatacaacaatgtctcgaaatcatcgacatggcttcttccatagttagaagatcgtcgtcaaagttagcaacgtgattcatcaacatttgctgttttgaggcagcaaatactgaaccgtcgccattcaaccattcataaaaaccatcgtctgaatccattgataatttcttgtactggtttttgagagctcgcatcaatctagcatttctagctcccggattgaaaacagaaagaggatcgtacatccagggtccattttctgtaaatagaatcgtataatgtcccttcaagaagatatcagacgatccacaatcaaagaattggtctccgagtttgtaacaaactgcggactttaacctatacatgataccgtttagcataatttctggtgatacgtcaatcggagtatcatctattagagatctaaagccggtgtaacattctccaccaaacatattcttattctgacgtcgttctacataaaacatcattgctccattaacgataacaggggaatgaacagcactacccatcacattagttcccaatggatcaatgtgtgtaactccagaacatcttccatagcctatgttaggaggagcgaacaccactcttccactattgccatcgaatgccatagaataaatatccttggaattgatagaaatcggactgtcggatgttgtgatcatcttcataggattaacaacgatgtatggtgccgcctgaagtttcatatcgtaactgatgccgttcataggtctagccacagaaaccaacgtaggtctaaatccaactatagacaaaatagaagccaatatctgttcctcatctgtcataacttgagagcatccagtatgaataatcttcattagatggggatctaccgcatcatcatcgttacaataaaaaattcccattctaatgttcataattgcttttctaatcatggtatgcatgtttgctctctgaatctctgtggaaattagatctgatacacctgtaatcactatcggattatcctccgtaagacgattaaccaacaacatataattataagactttacttttctaaattcataaagttgctggattaggctataggtgtctccatgtacatacgcgttctcgagcgcaggaagtttaataccgaatagtgccatcagaataggatgaatatagtaattagtttctggttttctataaataaaagacaaatcttgtgaactagacatatcggtaaaatgcatggattggaatcgtgtagtcgacagaagaatatgatgattagatggagagtatattttatctaactctttgagttggtcaccgattctaggactagctcgagaatgaataagtactaaaggatgagtacatttcacagaaacactagcattgttcaatgtgctctttacatgggtaaggagttgaaatagctcgtttctatttgttctgacaatatttagtttattcataatgttaagcatatcctgaatagtaaagttagatgtgtcatacttgttagtagttagatatttagcaattgcattcccatcatttctcaatctcgtactccaatcatgcgtggatgctacttcgtcgatggaaaccatacaatcctttttgataggctgttgagattgattatttcctgcacgtttaggtttggtacgttgatttctagcccctgcggatataaagtcatcgtctacaatttgggacaatgaattgcatacactacaagacaaagatttatcagaagtgtgaatatgatcttcatctaccaaagaaagagtttgattagtataactagattttagtcctgcgttagatgttaaaaaaacatcgctattgaccacggcttccattatttatattcgtagtttttactcgaaagcgtgattttaatatccaatcttattacttttggaatcgttcaaaacctttgactagttgtagaatttgatctattgccctacgcgtatactcccttgcatcatatacgttcgtcaccagatcgtttgtttcggcctgaagttggtgcatatctttttcaacactcgacatgagatccttaagggccatatcgtctagattttgttgagatgctgctcctggatttggattttgttgtgctgttgtacatactgtaccaccagtaggtgtaggagtacatacagtggccacaataggaggttgaggaggtgtaaccgttggagtagtacaagaaatatttccatccgattgttgtgtacatgtagttgttggtaacgtctgagaaggttgggtagatggcggtgtcgtcgtcttttgatctttattaaatttagagataatatcctgaacagcattgctcggcgtcaacgctggaaggagtgaactcgccggcgcatcagtatctgcagacagccaatcaaaaagattagacatatcagatgatgtattagtttgttgtcgtggttttggtgtaggagcagtactactaggtagaagaataggagccgatgtaggtgtcggaaccggctgtggagttatatgaatagttggttgtagcggttggataggctgtctgctggcggccatcatattatctctagctagttgttctcgcaactgtctttgataatacgactcttgagactttagtcctatttcaatcgcttcatcctttttcgtatccggatccttttcttcagaataatagattgacgactttggtgtagaggattctgccagcccctgtgagaacttgttaaagaagtccatttaaggctttaaaattgaattgcgattataagattaaatggcagacacagacgatattatcgactatgaatccgatgatctcactgaatacgaggatgatgaagaagaggaagaagatggagagtcactagaaactagtgatatagatcccaaatcttcttataagattgtagaatcagcatccactcatatagaagatgcgcattccaatcttaaacatatagggaatcatatatctgctcttaaacgacgctatactagacgtataagtctatttgaaatagcgggtataatagcagaaagctataacttgcttcaacgaggaagattacctctagtttcagaattttctgacgaaacgatgaagcaaaatatgctacatgtaattatacaagagatagaggagggttcttgtcctatagtcatcgaaaagaacggagaattgttgtcggtaaacgattttgacaaagatggtctaaaattccatctagactatattatcaaaatttggaaacttcaaaaacgatattagaatttatacgaatatcgttctctaaatgtcacaatcaagtctcgcatgttcagcaatttattgtcgtactttatatcgtgttcattaacgatatcttgcaaaatagtaatgattctatcttccttcgatagatattcttcagagattattgtcttatattctttcttgttatcagatatgaatttgataagactttgaacattattgatacccgtctgtttaattttttctacagatattttagttttggcagattctatcgtatctgtcaatagacatccaacatcgacattcgacgtcaattgtctataaatcaacgtataaattttagaaataacattagcgaattgttgtgcattgatgtcgttattctgaaacagtatgattttaggtagcattttcttaacaaagagaacgtatttattgttactcagttgaacagatgatatatccagattactaacgcatctgattccgtataccaaactttcagaagaaatggtatacaattgtttgtattcattcaatgtctctttttcagaaattagtttagagtcgaatactgcaataattttcaagagatagttttcatcagataagattttatttagtgtagatatgataaaactattgttttgttggagaacttgatacgccgcgttctctgtagtcgacgctctcaaatgggaaacgatctccattatttttttggaatcggatactatatcttcggtatcttgacgcagtctagtatacatagagttaagagagattagagtttgtacattaagcaacatgtctctaaatgtggctacaaacttttccttttccacatcatctagtttattatataccgatttcacaacggcaccagatttaaggaaccagaatgaaaaactctgataactacaatatttcatcatagttacgattttatcatcttctatagttggtgtaatagcgcatacctttttctccaagactggaaccaacgtcataaaaatgtttaaatcaaaatccatatcaacatctgatgcgctaagaccagtctcgcgttcaagattatctttactaatggtgacgaactcatcgtatagaactctaagtttgtccattatttatttacagatttagttgtttaatttatttgtgctcttccagagttgggatagtatttttctaacgtcggtattatattattaggatctacgttcatatgtatcataatattaatcatccacgttttgataaatctatctttagcttctgaaataacgtatttaaacaaaggagaaaaatatttagctacggcatcagacgcaataacattttttgtaaatgtaacgtatttagacgacagatcttcgttaaaaagttttccatctatgtagaatccatcagttgttaacaccattcccgcgtcagattgaataggagtttgaatagtttgttttggaaatagatccttcaataacttatagttgggtgggaaaaaatcgattttatcactagactctttcttttttactatcattacctcatgaactatttcttgaatgagtatatgtattttctttcctatatcggacgcgttcattggaaaatataccatgtcgttaactataagaatatttttatcctcgtttacaaactgaataatatcagatgtagttcgtaaacgaactatatcatcaccagcacaacatctaactatatgatatccactagtttcctttagtcgtttattatcttgttccatattagcagtcattccatcatttaagaaggcgtcaaagataatagggagaaatgacattttggattctgttacaactttaccaaaattaaggatatacggacttactatctttttctcaacgtcaatttgatgaacacacgatgaaaatgtacttcgatgagattgatcatgtagaaaacaacaagggatacaatatttccgcatatcatgaaatatattaagaaatcccaccttattatatttccccaaaggatccatgcacgtaaacattatgccgttatcattaataaagacttctttctcatcggatctgtaaaagttgttactgatttttttcattccaggatctagataattaataatgatgggttttctattcttattctttgtattttggcatatcctagaccagtaaacagtttccactttggtaaaatcagcagacttttgaacgctattaaacatggcattaatggcaataactaaaaatgtaaaatatttttctatgttaggaatatggtttttcactttaatagatatatggtttttggccaaaatgatagatatttttttatccgaggatagtaaaatattattagtcgccgtctctataaaaatgaagctagtctcgatatccaattttattctagaattgataggagtcgccaaatgtaccttatacgttatatctcccttgatgcgttccatttgtgtatctatatcggacacaagatctgtaaatagttttacgttattaatcatcacggtatcgccgtcgctagataatgctaatgtaccatccaagtcccaaatggagagatttaactgttcatcgtttagaataaaatgattaccggtcatattaataaagtgttcatcgtatctagataacaacgacttataattaatgtccaagtcttgaactcgctgaatgatcttttttaacccagttagttttagattggtacgaaatatattgttaaactttgattctacagtaatgtccaaatctagttgtggaaatacttccatcaacattgtttcaaacttgataatattattatctacatcttcatacgatccaaattccggaatagatgtatcacatgctcttgccacccagataaccaaaaagtcacacgctccaggatatacattgtataaaaagctatcgtttttaagtagggtttttttctgcgtgtatacgaagggattaaaaatagtattatcaacgtaactatattccaaattattcttatgagaatagataataatatcgtccttaatatctaacaaatttcctaaatatccctttaattgagtcattcgaagcgtcaatagaatatgtctcttaactatttccggctgttgtatatttaaatgacttcgtaaaaaataatatatgggcgacttctcatctatgtaatcatatggagtgagatatagggctcgttctacctcctgccccttacccacctgtaataccaattgcggacttactatatatcgcatatttatatcgtggggtaaagtgaaaatctactaccgatgatgtaagtcttacaatgttcgaaccagtaccagatcttaatttggaggcctccgtagaactaggggaggtaaatatagatcaaacaacacctatgataaaggaaaatagcggttttatatcccgtagtagacgtctattcgcccatagatctaaggatgatgagagaaaactagcactacgattctttttacaaagactttattttttagatcatagagagattcattatttgttcagatgcgttgacgctgtaaaagacgtcactattaccaaaaaaaataacattatcgtggcgccttatatagcacttttaactatcgcatcaaaaggatgcaaacttacagaaacaatgattgaagcattctttccagaactatataatgaacatagtaagaaatttaaattcaactctcaagtatccatcatccaagaaaaactcggataccagtttggaaactatcacgtttatgattttgaaccgtattactctacagtagctctggctattcgagatgaacattcatctggcatttttaatatccgtcaagagagttatctggtaagttcattatctgaaataacatatagattttatctaattaatctaaaatctgatcttgttcaatggagtgctagtacgggcgctgtaattaatcaaatggtaaatactgtattgattacagtgtatgaaaagttacaactggtcatagaaaatgattcacaatttacatgttcattggctgtggaatcagaacttccaataaaattacttaaagatagaaatgaattatttacaaaattcatcaacgagttaaaaaagaccagttcattcaagataagcaaacgcgataaggatacgctactaaaatattttacttaggactggagttagaatttatagacgactcatttcgtttatcattattactaccatcattattagtattcttcttgttatcttgttcagaaatatacagcaatgctatgcctaatactaaatacattatcatgcttgcaatggctctaacaacgacgaaccaaaatgaatttggtcgtagcttttgttcacaaaaatacataaagaaatgtctacataaatctatggcgccattggctacttgaaatagcgccagtcctcctacagattttaatatagctgtataacatgacatttattcatcatcaaaagagacagagtcaccatctgtcatatttagattttttttcatgtgttcaaagtatcctctactcatttcattataatagtttatcatacttagaattttaggacggatcaatgagtaagacttgactagatcgtcagtagtaatttgtgcatcgtctattctgcatccgcttcgtcgaataatgtatagcatcgctttgagattctccatagctatcaagtctttatacaatgacatggaaatatctgtgaatactttatacttctccaacatcgatgccttaacatcatcgcctactttagcattgaaaatacgttctattgtgtagatggatgtagcaagatttttaaacaacaatgccatcttacacgatgattgcctcaagtctccaatcgtttgtttagaacgattagctacagagttcaacgcttggctgactagcatattattatctttagaaattgtattcttcaatgaagcgtttatcatatctgtgatttcgttagtcatattacagtctgactgggttgtaatgttatccaacatatcacctatggatacggtacacgtaccagcatttgtaataatcctatctaagatgttgtatggcattgcgcagaaaatatcttctcctgtaatatctccactctcgataaatctactcagattattcttaaatgccttattctctggagaaaagatatcagtgtccatcatttcattaatagtatacgcagaaaagataccacgagtatcaattctatccaagatacttatcggttccgagtcacagataatggtttcctctccttcgggagatcctgcatagaaatatctaggacaatagtttctatactgtctgtaactctgataatctctaaagtcactaactgataccatgaaattgagaagatcaaacgctgaagtaatcaatttttctgcctcgtttttactacaactagttttcatcaatgtagtgacgatgtattgtttagttactcttggtctaatactgatgatagagatattattacttcccataatggatcttctagtagtcaccttaaagcccattgatgcaaatagcagatagataaagtcttggtatgactcctttctaatatagtacggactacctttgtcacccaactttatacccacataagccataacaacctctttaatagccgtttcatgaggtttatcagccatgagcctgagtagttggaagaatctcatgaatcccgtctcagaaagtcctatatgcatgatagatttatctttcctgggaaactctcgtatagtcatagatgaaatactcttcaaagtttctgaaataagattagtaacagtcttacctccgactactctgggtaacaaacatactctaataggtgttttctctgcggagataatatcagaaaggatagagcaataagtagtattattgtgattataaagaccgaatacataacaggtagaatttataaacatcatgtcctgaaggtttttagacttgtattcctcgtaatccataccgtcccaaaacatggatttggtaactttgatagccgtagatctttgttccttcgccaacaggttaaagaaattaataaagaatttgttgtttctatttatgtccacaaattgcacgtttggaagcgtaactgttacgttcactgcagcattttgaggatcgcgagtatgaagtacgatgttattgtttactggtatatctggaaagaaatctaccagtctaggaataagagattgatatcgcatagaaatagtaaagtttataatctcatcatcgaagagcattttgttaccattgtaataaatatccactctgtcatatgtataaatgaagtactgttcaaacatgatgagatgtttatatgttggcatagtagtgagatcgacgtttggtaatggcaatgtattaagattaactccataatgtctagcagcatctgcgatgttataagtgtcgtcaaagcggggtcgatcttgtgctgttatatattgtctaacacctataagattatcaaaatcttgtctgcttaatacaccgttaacaatttttgccttgaattcttttattggtgcattaataacatccttatagaggatgttaaacaaataagtgttatcaaagttaagatctggatatttcttttctgctagaacatccattgagtcggagccatctggtttaatataaccaccgataaatctagctctgtattctgtatccgtcaatctaatattaagaaggtgttgagtgaaaggtggaagatcgtaaaagctgtgagtattaatgataggattagtttccgaactaatgttaattggggtattaataatatctatatttccagcgttaagtgtaacattaaacagttttaattcacgtgacgtggtatcaattaaataattaatgcccaatttggatatagcagcctgaagctcatcttgtttagttacggatcctaatgagttattaagcaatatatcgaacggatgaacgaaggttgttttaagttggtcacatactttgtaatctagacatagatgcggaagaacggtagaaactatacgaaataaatattcagagtcctctaattgatcaagagtaactattgacttaataggcatcatttatttagtattaaatgacgaccgtaccagtgacggatatacaaaacgatttaattacagagttttcagaagataattatccatctaacaaaaattatgaaataactcttcgtcaaatgtctattctaactcacgttaacaacgtggtagatagagaacataatgccgccgtagtgtcatctccagaggaaatatcctcacaacttaatgaagatctatttccagatgatgattcaccggccactattatcgaacgagtacaacctcatactactattattgacgatactccacctcctacttttcgtagagagttattaatatcggaacaacgtcaacaacgagaaaaaagatttaatattacagtatcgaaaaatgctgaagcaataatggaatctagatctatgataacttctatgccaacacaaacaccatccttgggagtagtttatgataaagataaaagaattcagatgttagaggatgaagtggttaatcttagaaatcaacgatctaatacaaaatcatctgataatttagataattttaccaaaatactatttggtaagactccgtataaatcaacagaagttaataagcgtatagccatcgttaattatgcaaatttgaacgggtcccccttatcagttgaggacttggatgtttgttcggaggatgaaatagatagaatctataaaacgattaaacaatatcacgaaagtagaaaacgaaaaattatcgtcactaacgtgattattattgtcataaacattatcgagcaggcattgctaaaactcggatttgaagaaatcaaaggactgagtaccgatatcacttcagaaattatcgatgtggagatcggagatgactgcgatgctgtagcatctaaactaggaatcggtaacagtccggttcttaatattgtattgtttatactcaagatattcgttaaacgaattaaaattatttaatttaatacattcccatatccagacaacaatcgtctggattaatctgttcctgtcgtctcataccggacgacatattaatctttttattagtaggcatctttttagatggtttctttttcccagcattaactgagtcgatacctagaagatcgtgattgatctctccgaccattccacgaacttctaattggccgtctctgacggtaccataaactattttaccagcattagtaacagcttggacaatctgaccatccattgcgttgaatgatgtagttgctgttgttctacgtttaggagcaccagaagtatttttggagcccttggaggctgatgtagaagaagacgaggattttgatttacatgtaatacattttgtactctttgattttgtatcacatgcgccggcagtcacatttgtttgagaattaagattattgttgcctcctttgacggctgcatctccaccgatttgcgctagtagatttttaagctgtggtgtaatcttattaactgtttcgatataatcatcgtaactgcttctaacggctaaattttttttatccgccatttagaagctaaaaatatttttatttatgcagaagatttaactagattatacaatgaactaatatgatccttttccagattatttacaaacttggtattttttggttctggaggaggcgaatttaaattcggacttggattcggattttgtgagttcttgatcttattatacatcgagtataggatggcgacggtaactgctacgcaaataccgatcaacaaaagaataccaatcatttattgacaataacttcactattgatcaagtatgcaatatatcatcttttcactaaataagtagtaataatgattcaacaatgtcgagatatatggacgataataatttagttcatggaaatatcgctatgattggtatgaatgactccgctaactctgtggggtgcgcagtgctttccccacatagaataaattagcattccgactgtgataataataccaagtataaacgccataatactcaatactttccatgtacgagtgggactggtagacttactaaagtcaataaaggcgaagatacacgaaagaatcaaaagaatgattccagcgattagcacgccggaaaaataatttccaatcataagcatcatgtccatttaactaataaaaattttaaatcgccgaatgaacaaagtggaatataaaccatataaaaacaatagtttgtactgcaaaaataatatctatttttgttttcgaagatatggtaaaattaaatagtagtacacagcatgttataactaacagcagcaacggctcgtaattacttatcatttactagacgaaaaggtggtgggatattttcttgctcaaataatacgaatatatcacccatccattttatgcgatgtttatatactctaatctttaatagatctatagacgacgggtttaccaacaatatagattttatcgattcatctaatttaaacccttccttaaacgtgaatgatctattatctggcataacgatgactctacctgatgaatcggacaatgtactgggccatgtagaataaattatcaacgaattatcgtctacgaacatttatatcatttgttttaattttaggacgcgaataaatggatataaaatagaaaataacagatattacaaccaatgttatggccgcgcccaaccaggtaggcagttttattttatcttttactacaggttctcctggatgtacgtcaccaacggcggacgtagttctagtacaattagacgtaagttctgcttgggaattttttaacgctaaagagttaacgttaatcgtgcacccaacgtatttacatctagttctttgaacatcttgattataatataaccattttctatctctagattcgtcggtgcactcatgtaaccaacataccctaggtcctaaatatttatctccggaattagattttggataattcgcgcaccaacaatttctatttcctttatgatcgttacaaaagacgtataatgccgtatccccaaaagtaaaataatcaggacgaataattctaataaactcagaacaatatctcgcatccatatgtttggagcaaatatcggaataagtagacatagccggtttccgttttgcacgtaaccattctaaacaattggggtttccaggatcgtttctacaaaatccagtcatgaaatcatcacaatgttctgtcttgtaattattattaaatatttttggacagtgtttggtatttgtcttagaacaacattttgccacgctatcactatcgcccaggagataatccttttttataaaatgacatcgttgcccggatgctatataatcagtggcgtgttttaaatccttaatatattcaggagttacctcgttctgataatagattaatgatccaggacgaaatttgaaagaactacatggttctccatgaattaatacatattgtttagcaaattcaggaactataaaactactacaatgatctatcgacataccatctatcaaacaaaacttgggtttaatttctcccggagatgtttcataatagtacgtataactttcttctgcaaacttaacagctctattatattcaggataattaaaacctaattccatatatttgtctcgtatatctgctattcctggtgctattttaattctattaagagtaacggctgcccccattcttaataatcgtcagtatttaaactgttaaatgttggtatatcaacatctaccttatttcccgcagtataaggtttgttgcaggtatactgttcaggaatggttacatttatacttcttctatagtcctgtctttcgatgttcatcacatatgcaaagaacagaataaacaaaataatgtaagaaataatattaaatatctgtgaattcgtaaatacattgattgccataataattacagcagctacaatacatacaatagacattcccacagtgttgccattacctccacgatacatttgagttactaagcaataggtaataactaagctagtaagaggcaatagaaaagatgagataaatatcatcaatatagagattagaggagggctatatagagccaagacgaacaaaatcaaaccgagtaacgttctaacatcattatttttgaagattcccaaataatcattcattcctccataatcgttttgcattatacctccatctttaggcataaacgattgctgctgttcctctgtaaataaatctttatcaagcactccagcacccgcagagaagtcgtcaagcatattgtaatatcttaaataactcatttatatattaaaaaatgtcactattaaagatggagtataatctttatgccgaactaaaaaaaatgacttgtggtcaacccctaagtctttttaacgaagacggggatttcgtagaagttgaaccgggatcatcctttaagtttctgatacctaagggattttacgcctctccttccgtaaagacgagtctagtattcgagacattaacaacgaccgataataaaatcactagtatcaatccaacaaatgcgccaaagttatatcctcttcaacgcaaagtcgtatctgaagtagtttctaatatgaggaaaatgatcgaatcaaaacgtcctctatacattactcttcacttggcgtgtggatttggtaagactattaccacgtgttatcttatggctacacacggtagaaaaaccgtcatttgcgtacccaataaaatgttaatacatcaatggaagacacaggtagaggcagtcggattggaacataagatatctatagatggagtaagtagtctattaaaggaactaaagactcaaagtccggatgtattaatagtagtcagtagacatctgacaaacgatgccttttgtaaatatatcaataagcattatgatttgttcatcttggatgaatcacatacgtataatctgatgaacaatacagcagttacaagatttttagcgtattatcctccgatgatgtgttattttttaactgctacacctagaccagctaaccgaatttattgtaacagtattattaatattgccaagttatccgatctaaaaaaaactatctatgcggtagatagtttttttgagccatattccacagacaatattagacatatggtaaaacgactagatggaccatctaataaatatcatatatatactgagaagttattatctgtagacgagcctagaaatcaacttattcttgataccctggtagaagaattcaagtcaggaactattaatcgaattttagttattactaaactacgtgaacatatggtattcttctacaaacgattattagattttttcggatcagaggttgtatttataggagacgcccaaaatagacgtactccagatatggtcaaatcaatcaaggaactaaatagatttatattcgtatccaccttattttattccggtactggtttagatattcctagtttggattcgttgttcatttgctcggcagtaatcaacaatatgcaaatagagcaattactagggagggtatgtcgagaaacagaactattagataggacggtatatgtatttcctaacacatccatcaaagaaataaagtacatgataggaaatttcatgcaacgaattattagtctgtctgtagataaactaggatttaaacaaaaaagttatcggaaacatcaagaatccgatcccacttctgtatgtacaacatcctccagagaagaacgtgtattaaatagaatatttaactcgcaaaatcgttaagaagtttaagcgacgatccgcatgctgcgcaggccagtgtattacccctcatagtattaatataatccaatgatacttttgtgatgtcggaaatcttaaccaatttagactgacaggcagaacacgtcatgcaatcatcatcgtcatcgataactgtagtcttgggcttctttttgcggctcttcattccggaacgcacattggtgctatccatttaggtagtaaaaaataagtcagaatatgccctatagcacgatcgtgcaaaacctggtatatcgtctctatctttatcacaatatagtgtatcgacatttttattattattgacctcgtttatcttggaacatggaatgggaacatttttgttatcaacggccatctttgccttaattccagatgttgtaaaattataactaaacagtctatcatcgacacaaatgaaattcttgtttagacgtttgtagtttacgtatgcggctcgttcgcgtctcattttttcagatattgcaggtactataatattaaaaataagaatgaaataacataggattaaaaataaagttatcatgacttctagcgctgatttaactaacttaaaagaattacttagtctgtacaaaagtttgaaattttcagattctgcggctatagaaaagtataattctttggtagaatggggaacatctacttactggaaaataggcgtgcaaaaggtagctaatgtcgagacgtcaatatctgattattatgatgaggtaaaaaataaaccgtttaatattgatccgggatattacattttcttaccggtatattttggaagcgtctttatttattcgaagggtaaaaatatggtagaacttggatctggaaactcttttcaaataccagatgatatgcgaagtgcgtgtaacaaagtattagacagcgataacggaatagactttctgagatttgttttgttaaacaatagatggataatggaagatgctatatcaaaatatcagtctccagttaatatatttaaactagctagtgagtacggattaaacatacccaaatatttagaaattgaaatagaggaagacacattatttgacgacgagttatactctattatagaacgctctttcgatgataaatttccaaaaatatccatatcgtatattaagttgggagaacttagacggcaagttgtagactttttcaaattctcgttcatgtatattgagtccatcaaggtagatcgtataggagataatatttttattcctagcgttataacaaaatcaggaaaaaagatattagtaaaagatgtagaccatttaatacgatccaaggttagagaacatacatttgtaaaagtaaaaaagaaaaacacattttccattttatacgactatgatggaaacggaacagaaactagaggagaagtaataaaacgaattatagacactataggacgagactattatgttaacggaaagtatttctctaaggttggtagtgcaggcttaaagcaattgactaataaattagatattaatgagtgcgcaactgtcgatgagttagttgatgagattaataaatccggaactgtaaaacgaaaaataaaaaaccaatcagcatttgatttaagcagagaatgtttgggatatccagaagcggattttataacgttagttaataacatgcggttcaaaatagaaaattgtaaggttgtaaatttcaatattgaaaatactaattgtttaaataacccgagtattgaaactatatatggaaactttaaccagttcgtctcaatctttaatatcgtcaccgatgtcaaaaaaagattattcgagtgaaataatatgcgcctttgatataggtgcaaaaaatcctgccagaactgttttagaagtcaaggataactccgttagggtattggatatatcaaaattagactggagttctgattgggaaaggcgcatagctaaagatttgtcacaatatgaatacactacagttcttctagaacgtcagcctagaaggtcgccgtacgtcaaatttatctattttattaaaggctttttatatcatacatcggctgccaaagttatttgcgtctcgcctgtcatgtctggtaattcatatagagatcgaaaaaagagatcggtcgaagcatttcttgattggatggacacattcggattgcgagactccgttccggatagacgcaaattagacgatgtagcggatagtttcaatttggctatgagatacgtattagataaatggaatactaattatacaccttataataggtgtaaatctagaaattacataaaaaaaatgtaataacgttagtaacgccattatggataatctatttacctttctacatgaaatagaagatagatatgccagaactatttttaactttcatctaataagttgcgatgaaataggagatatatatggtcttatgaaagaacgcatttcctcagaggatatgtttgataatatagtgtataataaagatatacatcatgccattaagaaactagtgtattgcgacatccaacttactaaacacattattaatcagaatacgtatccggtatttaacgattcttcacaagtgaaatgttgtcattatttcgacataaactcagataatagcaatattagctctcgtacagtagagatatttgagagggaaaagtcatctcttgtatcatatattaaaactaccaataagaagagaaaggtcaattacggcgaaataaagaaaactgttcatggaggcactaatgcaaattacttttccggtaaaaagtctgacgagtatctgagtactacagttagatccaacattaatcaaccttggatcaaaaccatctctaagaggatgagagttgatatcattaatcactctatagtaacgcgtggaaaaagctctatattacaaactatagaaattatttttactaatagaacatgtgtgaaaatattcaaggattctactatgcacattattctatccaaggacaaggatgaaaaggggtgtatacacatgattgacaaattattctatgtctattataatttatttctgttgttcgaggatatcatccaaaacgagtactttaaagaagtagctaatgttgtaaaccacgtacttacggctacggcattagatgagaaattattcctaattaagaaaatggctgaacacgatgtttatggagttagcaatttcaaaatagggatgtttaacctgacatttattaagtcgttggatcataccgttttcccctctctgttagatgaggatagcaaaataaagttttttaaggggaaaaagctcaatattgtagcattacgatctctggaggattgtataaattacgtgactaaatccgagaatatgatagaaatgatgaaggaaagatcgactattttaaatagcatagatatagaaacggaatcggtagatcgtctaaaagaattgcttctaaaatgaaaaaaaacactgattcagaaatggatcaacgactcggatataagtttttggtgcctgatcctaaagccggagttttttatagaccgttacatttccaatatgtatcgtattctaattttatattgcatcgattgcatgaaatcttgaccgtcaagcggccactcttatcgtttaagaataatacagaacgaattatgatagaaattagcaatgttaaagtgactcctccagattactcacctataatcgcgagtattaaaggtaagagttatgacgcattagccacgttcactgtaaatatctttaaagaggtaatgaccaaagagggtatatccatcactaaaataagtagttatgagggaaaagattctcatttgataaaaattccgctactaataggatacgggaataaaaatccacttgatacagccaagtatcttgttcctaatgtcataggtggagtctttatcaataaacaatctgtcgaaaaagtaggaattaatctagtagaaaagattacaacatggccaaaatttagggttgttaagccaaactcattcactttctcgttttcctccgtatcccctcctaatgtattaccgacaagatatcgccattacaagatatctctggatatatcacaattggaagcgtcgaatatatcatcgacaaagacatttataacggtcaatattgttttgctgtctcaatatttatctagagtgagtctagaattcattagacgtagcttatcatacgatatgcctccagaagttgtctatctagtaaacgcgataatagatagtgctaaacgaattactgaatctattactgactttaatattgatacatacattaatgacctggtggaagctgaacacattaaacaaaaatctcagttaacgatcaacgagttcaaatatgaaatgctgcataactttttacctcatatgaactatacacccgatcaactaaagggattttatatgatatctttactaagaaagtttctctactgtatctaccacacttctagatatccagatagagattcgatggtttgtcatcgtatactaacatacggcaaatattttgagacgttggcacatgatgaattagagaattacataggcaacatccgaaacgatatcatgaacaatcacaagaacagaggcacttacgcggtaaacattcatgtactaacaactcctggacttaatcatgcattttctagtctattgagtggaaagttcaaaaagtcagacggtagttatcgaacacatcctcactattcatggatgcagaatatttctattcctaggagtgttggattttatccggatcaagtaaagatttcaaagatgttttctgtcagaaaataccatccaagtcaatatctttacttttgttcatcagacgttccggaaagaggtcctcaggtaggtttagtatctcaattgtctgtcttgagttccattacaaatatactaacgtctgagtatttggatttggaaaagaaaatttgtgagtatatcagatcatattataaagatgatataagttactttgaaacaggatttccaatcactatagaaaatgctctagtcgcatctcttaatccaaatatgatatgtgattttgtaactgactttagacgtagaaaacggatgggattcttcggtaacttggaggtaggtattactttagttagggatcacatgaatgaaattcgcattaatattggagcgggaagattagtcagaccattcttggttgtggataacggagagctcatgatggatgtgtgtccggagttagaaagcagattagacgacatgacattctctgacattcagaaagagtttccgcatgtcatcgaaatggtagatatagaacaatttacttttagtaacgtatgtgaatcggttcaaaaatttagaatgatgtcaaaggatgaaagaaagcaatacgatttatgtgactttcctgccgaatttagagatggatatgtggcatcttcattagtgggaatcaatcacaattctggacccagagctattcttggatgtgctcaagctaaacaagctatctcttgtctgagctcggatatacgaaataaaatagacaatggaattcatttgatgtatccagagaggccaatcgtgattagtaaggctttagaaacttcaaagattgcggctaattgcttcggccaacatgttactatagcattaatgtcgtacaaaggtatcaatcaagaggatggaattatcatcaaaaaacaatttattcagagaggcggtctcgatattgttacagccaagaaacatcaagtagaaattccattggaaaactttaataacaaagaaagagataggtctaacgcctattcaaaattagaaagtaatggattagttagactgaatgctttcttggaatccggagacgctatggcacgaaatatctcatcaagaactcttgaagatgattttgctagagataatcagattagcttcgatgtttccgagaaatataccgatatgtacaaatctcgcgttgaacgagtacaagtagaacttactgacaaagttaaggtacgagtattaaccatgaaagaaagaagacccattctaggagacaaatttaccactagaacgagtcaaaagggaacagtcgcgtatgtcgcggatgaaacggaacttccatacgacgaaaatggtatcacaccagatgtcattattaattctacatccatcttctctagaaaaactatatctatgttgatagaggttattttaacagccgcatattctgctaagccgtacaacaataagggagaaaaccgacctgtctgttttcctagtagtaacgaaacatccatcgatacatatatgcaattcgctaaacaatgttatgagcattcaaatccgaaattgtctgatgaagaattatcggataaaatcttttgtgaaaagattctctatgatcctgaaacggataagccttatgcatccaaagtattttttggaccaatttattacttgcgtctgagacatttaactcaggacaaggcaaccgttagatgtagaggtaaaaagacgaagctcattagacaggcgaatgagggacgaaaacgtggaggaggtatcaagttcggagaaatggagagagactgtttaatagcgcatggtgcagccaatactattacagaagttttgaaagattcggaagaagattatcaagatgtgtatgtttgtgaaaattgtggagacatagcagcacaaatcaagggtattaatacatgtcttagatgttcaaaacttaatctctctcctctcttaacaaaaattgataccacacacgtatctaaagtatttcttactcaaatgaacgccagaggcgtaaaagtcaaattagatttcgaacgaagacctccttcgttttataaaccattagataaagttgatctcaaaccgtcttttctggtctaatattgtttagtagatacttatcaacatcatcaagattatcaagattatcaagattatcaagataagctaattcactaaacacattatcgatttcggtatcgttactcgcagaataaagttcgttatgatcctgatattcggaaatctgtggagtttcaggttttggtggatgtgtaacagctacttgagataccgaagtctgatattcagaaagctgtggatgttctggttcggcatccaccgatggtgttacaccactactaattggttcagtaacgtctgtggacgatggaggcaccacttctacaggttctggttctttatcctcagtcatcaacggagctacttcaatgcgaggaaatgtataatttggtaatggtttctcatgtggatctgaagaagaggtaagatatctactagaaagataccgatcacgttctagttctcttttgtagaacttaactttttctttctcagcatctagttgatattccaacctcttcacgttactacgttcagatttcaattcacgttcgcatgggttacctccgcagtttttacgagcgatttcacgttcagccttcatgcgtctctccctctctctatcgagtttatcagagcagtctttctgaaggcgatcgaactccataaatttctccaacgctttgattgtttccatagatttccgaagttcagcttttaggactgtgattctttttctttcgaattcacagctggatgtacaaccgtttccattaccgccatctctaagtttcttttctagatcggcaacatttcatccccatgccttttacattcctcgagtctactgtcgtcgaaatatcgttccagctccttttcgacatcaataactttagcacgttgtctctcaagctctcttttgtagttatctgattccctggcacgtttaagatcttcatgcaattgagtcagctcttaacacaatctcttgcttcttcgtcatagtacgcgcaatcactgtgagatccattgttaccacgtctacactcggcgagctcgcgtttaagagattcaatttcccgtttgtattggtccatgtttccattgctaccaccattagatttacaggctgctagttgtcgttcgagatcagaaatacgggttttcttggaattgatttcgtcgatgtacttggcatcgaaacacttattaagttctttttccaattctacgattttatttctttcgcgagtcaattccctcctgtagtaactatctgttttgtcagattcacgctctctacgtagactttcttgcaagttactaatttgttccctagcacgtccgagtttagttttatatgctgaatagagttctgattcatcctttgagcagatctctagcgatcgtttaagattcctgattctagtctttagcctatttacctcctcagaagatgttccgttaccgttgcgtttacactcgttaagctgtctatcaagatccatgattctatctctaagacgttgcatctctctttccatatcagcattgctttcattattacgtctgcagtcactcaactgtctttcaatatctgagattctatctctaagacgtcgcatctctctctgtttcggcattggtttcattattacgtctacagtcgttcaactgtctttcaagatctgatattctagattggagtctgctaatctctgtagcattttcacggcattcactcagttgtctttcaagatctgaaattttagattggagtctgctaatctctgtaagatttcctcctccgctctcgatgcagtcggtcaacttattctctagttctctaatacgcgaacgcagtgcatcaacttcttgcgtgtcttcctggttgcgtgtacattcatcgagtctagattcgagatctctaacgcgtcgtcgttcttcctcaagttctctgcgtactacagaaagcgtgtccctatcttgttgatatttagcaatttctgattctagagtactgattttgcttacgtagttactaatatttgtcttggccttatcaagatcctccttgtatttgtcgcattccttgatatccctacgaagtctggacagttcccattcgacattacgacgtttatcgatttcagctcggagatcgtcatcgcgttgttttagccacatacgactgagttcaagttctcgttgacaagatccatctacttttccattcctaatagtatccagttccttttctagttctgaacgcatttctcgttccctatcaagcgattctctcaattctcggatagtcttcttatcaatttctaataaatctgaaccatcatctgtcccattttgaatatccctgtgttctttgatctcttttgtaagtcggtcgattctttcggttttataaacagaatccctttccaaagtcctaatcttactgagtttatcactaagttctgcattcaattcggtgagttttctcttggcttcttccaactctgttttaaactctccactatttccgcattcttcctcgcatttatctaaccattcaattagtttattaataactagttggtaatcagcgattcctatagccgttcttgtaattgtgggaacataattaggatcttctaatggattgtatggcttgatagcatcatctttatcattattagggggatggacaaccttaattggttggtcctcatctcctccagtagcgtgtggttcttcaatagccgtgttagtaataggcttaggcaaatgcttgtcgtacgcgggcacttcctcatccatcaagtatttataatcgggttctacgtctgaatattcttttctaagagacgcaacttctggagttagtagaagaactctgtttctatatctatcaacgctggaatcaatactcaagttaaggatagcgaatacctcatcgtcatcatccgtatcctctgaaacgccatcatatgacatttcatgaagtctaacgtattgataaacagaatcagatttagtattaaacagatccttaacctttttagtaaatgcatatgtatattttagatctccagatttcataatatggtcgcatgccttaaatgtcagtgcttccataatatagtctggaacactaattggtgatgaaaaagataccggaccatatgctacgttgataaataactctgagccactaactagataatgattaatgttaaggaagaggaaatattcagtgtataggtatgtcttggcgtcatatcttgtactaaacacgctaaacagtttgttaatgtgatcaatttccaatagattaattagagcagcaggaataccaacaaacatattaccacatccgtattttctatgaatatcacatatcatgttaaaaaatcttgatagaagagcgaatatctcgtctgacttaatgagtcgtagttcagcagcaacataagtcataactgtaaatagaacatactttcctgtagtgttgattctagactccacatcaacaccattattaaaaatagttttatatacatctttaatctgctctccgttaatcgtcgaacgttctagtatacggaaacactttgatttcttatctgtagttaatgacttagtgatatcacgaagaatattacgaattacatttcttgtttttcttgagagacctgattcagaactcaactcatcgttccatagtttttttacctcagtggcgaaatctttggagtgcttggtacatttttcaataaggttcgtgacctccatttattataaaaaaattttattcaaaacttaactacaatcgggtaattataaaatcgtagatctcccatgtggtggaatactaccatctatcgcatgtggatggacagtaggtaatggccatgggaacagtaatgtttgcatatttatctttcttgccagtattactgcatattgtcccaatgtttcgatgtgatgttctaacctatcaactgccgctgtatcacaacaatagtgtccgatgaaattaagattatgatccaatgtgtttaatatatgattatcaagtcttatacgatccgcgtcttttttgacaggatcaggttcttctacaggaagaagtttcggcctcttatgatattcatgtctgggaaacggtggtctagggtgaggctccggtatcggagtgggttttggattataatcatcatcgtctatgacatcatcttcgacttcgatatttattttgctatcttgatgatgtcctgtatcagttgcattttcagcactcgactgaatattagcgcattcattgtttattattaccatatttctaaacccaaaatgtatatgttgaacatcagtactatcgttgatgagtcttatagcatgaattcgcttatcgttatcgggtttagcttctgtcaccttagcaattccttttttattaaactctacataatcatatccatttctattgtttgttctaatataaacgagtatagcatcattgctaaatttttcaatagtatcgaaaacagaatatcctaaaccatataatatatattcaggaacactcaaactaaatgtccaggattctcctaaatacgtaaactttaatagtgcgaaatcattcaaaaatctaccacttatagatagatagtacataaatgcgtatagtagtctacctatctctttattatgaaaaccggcattacgatcatatatgtcgtgatatacctgtgatccgtttacgttaaaccataaatacatgggtgatcctataaacatgaatttatttctaattctcagagctatagttaattgaccgtgtaatatttgcttacatgcatacttgatacgctcattaataagatttttatcattgctcgttatctcagaatcgtatatataaggagtaccatcgtgattcttaccagatattatacaaaatactatatataaaatatattgaccaacgttagtaatcatataaatgtttaacgttttaaattttgtattcaatgatccattatcatacgctagcatggtcttatgatattcattctttaaaatataatattgtgttagccattgcattggggctcctaatggagattttttattctcatccattttaggataggctttcataaagtccctaataacttcgtgaataatgtttctatgttttctactgatgcatgtatttgcttcgatttttttatcccatgtttcatctatcatagatttaaacgcagtaatgctcgcaacattaacatcttgaaccgttggtacaattccgttccataaatttataatgttcgccatttatataactcattttttgaatatacttttaattaacaaaagagttaagttactcatatggacgccgtccagtctgaacatcaatctttttagccagagatatcatagccgctcttagagtttcagcgtgattttccaacctaaatagaacttcatcgttgcgtttacaacacttttctatttgttcaaactttgttgttacattagtaatctttttttccaaattagttagccgttgtttgagagtttcctcattgtcgtcttcatcggctttaacaattgcttcgcgtttagcctctggctttttagcagcctttgtagaaaaaaattcagttgctggaattgcaagatcgtcatctccggggaaaagagttccgtccatttaaagtacagattttagaaactgacactctgcgttatttatatttggtacaacacatggattataaatattgatgttaataacatcagaaaatgtaaagtctatacattgttgcatcgtgttaaattttctaatggatctagtattattgggtccaacttctgcctgaaatccaaatatggaagcggatacaaaaccgtttcctggataaaccacacatctccacttttgctttacatcagaaattgtgtcattgacatcttgaactctcctatctaatgccggtgttccacctatagattttgaatattcgaatgctgcatgagtagcattaaattccttaatattgccataattttcatatattgagtaaccctggataaaaagtaaacacaccgcagccgtcgctaccacaataaaaaaaattgatagagagttcatttataatctattagaagctgacaaaatttttttacacgcatcagacaatgctttaataaatagttcaacatctacttttgtcatatcgaaccgatggtatgattctaacctagaattacatccgaaaaagttgactatgttcatagtcattaagtcattaacaaacaacattccagactctggattataagacgatactgtttcgtcacaattacctaccttaatcatgtgattatgaatattggctattagagcaccttctaagaaatctataatatctttgaaacacgatttaaaatcaaaccacgaatatacttctacgaagaaagttagtttacccataggagaaataactataaatggagatctaaatacaaaatccggatctatgatagttttaacattattatattctctattaaatacctccacatctaaaaatgttaattttgaaactatgtcttcgtttattaccgtacctgaactaaacgctataagctctattgtttgagaactctttaaacgatattcttgaaatacatgtaacaaagtttcctttaactcggtcggtttatctaccatagttacagaatttgtatccttatctataatataataatcaaaatcgtataaagttatataattatcgcgttcagattgtgatcttttcaaatagactaaaaaccccatttctctagtaagtatcttatgtatatgtttgtaaaatatcttcatggtgggaatatgctctaccgcagttagccattcctcattgacagcggtagatgtattagacaaaactattccaatgtttaacaagggccattttacgagattattaaatccttgtttgataaatgtagccaatgagggttcgagttcaacgacgattgaattctcttcccgcggatgctgcatgatgaacgacgggatgttgttcgattgatttggaattctttttcgactttttgtttatattaaatattttaaaatttatagctgatagcaattcatgtactacggataatgtagacgcgtattgcgcatcgatatctttattattagataaatttatcaataaatgtgagaagtttgcctcgttaaggtcttccatttaaatattatataaacatttgtgtttgtatcttattcgtcttttatggaatagttttttactagtaaagctgcaattacacactttgtccgtaaaacataaatataaacaccagcttttatcaatcgttccaaaaagtcgacggcggacatttttaacatggcatctattttaaatacacttaggtttttggaaaaaacatcattttataattgtaacgattcaataactaaagaaaagattaagattaaacataagggaatgtcatttgtattttataagccaaagcattctaccgttgttaaatacttgtctggaggaggtatatatcatgatgatttggttgtattggggaaggtaacaattaatgatctaaagatgatgctattttacatggatttatcatatcatggagtgacaagtagtggagcaatttacaaattgggatcgtctatcgatagactttctctaaataggactattgttacaaaagttaataattatgatgatacattttttgacgacgatgattgatcgctattgcacaattttgtttttttactttctaatatagcgtttagattctttttcatgtgcgaatattgatttactaaaatatcgatgtttaacttttgttctatgacgtccttatcagcggtatcggtacatatacgtaattcaccttcacaaaatacggagtcttcgataataatagccaatcgattattggatctagcggtctgtatcatattcaacatgtttaatatatcctttcgtttcccctttacaggcatcgatcgtagcatattttccgcgtctgagatggaaatgttaaaactacaaaaatgcgtaatgttagcccgtcctaatattggtacgtgtctataagtttggcatagtagaataatagacgtgtttaaatgccttccaaagtttaagaattctattagagtattgcattttgatagtttatcgcctacatcatcaaaaataagtaaaaagtgtgctgattttttatgattttgtgcgacagcaatacatttttctatgttacttttagttcgtatcagattatattctagagattcctgactactaacgaaattaatatgatttggccaaatgtatccatcataatctggattataaacgggtgtaaacaagaatatatgtttatattttttaactagtgtagaaaacagagatagtaaatagatagtttttccagatccagatcctcccgttaaaaccattctaaacggcatttttaataaattttctcttgaaaattgtttttcttggaaacaattcataattatatttacagttactaaattaatttgataataaatcaaaatatggaaaactaaggtcgttagtagggaggagaacaaagaaggcatatcgtgatataaataacatttattatcatgatgacaccagaaaacgacgaagagcagacatctgtgttctccgctactgtttacggagacaaaattcagggaaagaataaacgcaaacgcgtgattggtctatgtattagaatatctatggttatttcactactatctatgattaccatgtccgcgtttctcatagtgcgcctaaatcaatgcatgtctgctaacgaggctgctattactgacgccgctgttgccgttgctgctgcatcatctactcatagaaaggttgcgtctagcactacgcaatatgatcacaaagaaagctgtaatggtttatattaccagggttcttgttatatattacattcagactaccagttattctcggatgctaaagcaaattgcactgcggaatcatcaacactacccaataaatccgatgtcttgattacctggctcattgattatgttgaggatacatggggatctgatggtaatccaattacaaaaactacatccgattatcaagattctgatatatcacaagaagttagaaagtatttttgtgttaaaacaatgaactaatatttatttttgtacattaataaatgaaatcgcttaatagacaaactgtaagtaggtttaagaagttgtcggtgccggccgctataatgatgatactctcaaccattattagtggcataggaacatttctgcattacaaagaagaactgatgcctagtgcttgcgccaatggatggatacaatacgataaacattgttatctagataccaacattaaaatgtctacagataatgcggtttatcagtgtcgtaaattacgagctagattgcctagacctgatactagacatctgagagtattgtttagtattttttataaagattattgggtaagtttaaaaaagaccaataataaatggttagatattaataatgataaagatatagatattagtaaattaacaaattttaaacaactaaacagtacgacggatgctgaagcgtgttatatatacaagtctggaaaactggttgaaacagtatgtaaaagtactcaatctgtactatgtgttaaaaaattctacaagtgacaacaaaaactgcagcggccgctcgagagctcagacggcaatggatggatcataattgatgggaaatgcaatagtaattttttatcataaaagttgtaaagtaaataataaaacaataaatattgaactagtagtacgtatattgagcaatcagaaatgatgctggtacctcttatcacggtgaccgtagttgcgggaacaatattagtatgttatatattatatatttgtaggaaaaagatacgtactgtctataatgacaataaaattatcatgacaaaattaaaaaagataaagagttctaattccagcaaatctagtaaatcaactgatagcgaatcagactgggaggatcactgtagtgctatggaacaaaacaatgacgtagataatatttctaggaatgagatattggacgatgatagcttcgctggtagtttaatatgggataacgaatccaatgttatggcgcctagcacagaacacatttacgatagtgttgctggaagcacgctgctaataaataatgatcgtaatgaacagactatttatcagaacactacagtagtaattaatgaaacggagactgttaaagtacttaatgaagataccaaacagaatcctaactattcatccaatcctttcgtaaattataataaaaccagtatttgtagcaagtcaaatccgtttattacagaacttaacaataaatttagtgagaataatccgtttagacgagcacatagcgatgattatcttaataagcaagaacaagatcatgaacacgatgatatagaatcatcggtcgtatcattggtgtgattagtttcctttttataaaattgaagtaatatttagtattattgctgccgtcacgttgtacaaatggagatattccctgtattcggcatttctaaaattagcaattttattgctaataatgactgtagatattatatagatacagaacatcaaaaaattatatctgatgagatcaatagacagatggatgaaacggtacttcttaccaacatcttaagcgtagaagttgtaaatgacaatgagatgtaccatcttattcctcatagattatcgacgattatactctgtattagttctgtcggaggatgtgttatctctatagataatgacgtcaatggcaaaaatattctaacctttcccattgatcatgctgtaatcatatccccactgagtaaatgtgtcgtagttagcaagggccctacaaccatactggttgctaaagcggatatacccagcaaacgattggtaacatcgtttacaaacgacatactgtatgtaaacaatctatcactgattaattatttgccgttgtctgtattcattattagacgagtcaccgactatttggatagacacatatgcgatcagatatttgctaataataagtggtattcccttataaccatcgacgataagcaatatcctattccatcaaattgtataggtatgtcttctgccaagtacataaattctagcatcgagcaagatactttaatacatgtttgtaacctcgagcatccattcgacttagtatacaaaaaaatgcagtcgtacaattctgtacctatcaaggaacaaatattgtacggtagaattgataatataaatatgagcattagtatttctgtggattaatagatttctagtatggggatcattaatcatctctaatctctaaatacctcataaaacgaaaaaaaagctattatcaaatactgtacggaatagattcattctcttctctttttatgaaactctgttgtatatctactgataaaactggaagcaaaaaatctgataaaaagaataagatcaagatcaaggattatatggaacacgattattataaaataacaatagttcctggttcctcttccacgtctactagctcgtggtattatacacatgcctagtaatagtctctttgcgttgatggaaagcagactagaaataacaggctaaaatgttcagacaccataatagttcccaacccagataataacagagtaccatcaacacattcctttaaactcaatcccaaacccaaaaccgttaaaatgtatccggccaattgatagtagataatgaggtgtacagcgcatgataatttacacagtaaccaaaatgaaaatactttagtaattataagaaatatagatggtaacgtcatcatcaacaatccaataatatgccggagagtaaacattgacggataaaacaaaaatgctccgcataactctatcatggcaataacacaaccaaatacttgtaagattcctaaattagtagaaaatacaacggatatcgatgtataagtgatctcgagaaataataagaataaagtaatgcccgtaaagataaacatcaacattgtttggtaatcattaaaccaattagtatgacgttgaactaatttcacagtaaattttattccagtattatccccgcatgtataagtacctggtaagatatctttatattccataatcaatgagacatcactatctgataacgaatgaagtctagcactagtatgccatttacttaatattgtcgtcttggaagttttattataagttaaaatatcatggttatccaatttccatctaatatactttgtcggattatctatagtacacggaataatgatggtatcattacatgctgtatactctatggtctttgtagttgttataacaaccaacgtatagaggtatatcaacgatattctaactcttgacattttttatttatttaaaatgatacctttgttatttattttattctattttgctaacggtattgaatggcataagtttgaaacgagtgaagaaataatttctacttacttattagacgacgtattatacacgggtgttaatggggcggtatacacattttcaaataataaactaaacaaaactggtttaactaataataattatataacaacatctataaaagtagaggatgcggataaggatacattagtatgcggaaccaataacggaaatcccaaatgttggaaaatagacggttcagacgacccaaaacatagaggtagaggatacgctccttatcaaaatagcaaagtaacgataatcagtcacaacggatgtgtactatctgacataaacatatcaaaagaaggaattaaacgatggagaagatttgacggaccatgtggttatgatttattcacggcggataacgtaattccaaaagatggtttacgaggagcattcgtcgataaagacggtacttatgacaaagtttacattcttttcactgatactatcggctcaaagagaattgttaaaattccgtatatagcacaaatgtgcctaaacgacgaaggtggtccatcatcgttgtctagtcatagatggtcgacgtttctcaaagtcgaattagaatgtgatatcgacggaagaagttatagataaattattcattctaaaactataaaaacagataatgatacgatactatatgtattcttcgatagtccgcattatgtacctattctatgaataccattaaacaatctttttctacgtcaaaattggaaggatatacaaagcaattgccgtctccagctcctggtatatgtctaccagctggaaaagttgttccacataccacgtttgaagtcatagaaaaatataatgtactagatgatattataaagcctttatctaaccaacctatcttcgaaggaccgtctggtgttaaatggttcgatataaaggagaaggaaaatgaacatcgggaatatagaatatacttcataaaagaaaattctatatattcgttcgatacaaaatctaaacaaactcgtagctcgcaagtcgatgcgcgactattttcagtaatggtaacttcgaaaccgttatttatagcagatatagggataggagtaggaatgccacaaatgaaaaaaatacttaaaatgtaatcttaatcgagtacaccacacgacaatgaacaaacataagacagattatgctggttatgcttgctgcgtaatatgcggtctaattgttggaattatttttacagcgacactattaaaagttgtagaacgtaaattagttcatacaccatcaatagataaaacgataaaagatgcatatattagagaagattgtcctactgactggataagctataataataaatgtatccatttatctactgatcgaaaaaacctgggaggaaggacgtaatgcatgcaaagctctaaatccaaattcggatctaattaagatagagactccaaacgagttaagttttttaagaagccttagacgaggctattgggtaggagaatccgaaatattaaaccagacaaccccatataattttatagctaaaaatgccacgaagaatggaactaaaaaacggaaatatatttgtagtacaacgaatactcccaaactgcattcgtgttacactatataacaattacactacatttttatcataacactacttcggttagatgttttagaaaaaaataaatatcgccgtaccgttcttgtttttataaaaataacaattaacaattatcaaattttttctttaatattttacgtggttgaccattcttggtggtaaaataatctcttagtgttggaatggaatgctgtttaatgtttccgcactcatcgtatattttgacgtatgcagtcacatcgtttacgcaatagtcagactgtagttctatcatgcttcctacatcagaaggaggaacagttttaaagtctcttggttttaatctattgccattagttttcatgaaatcctttgttttatccacttcacattttaaataaatgtccactatacattcttctgttaattttactagatcgtcatgggtcatagaatttataggttccgtagtccatggatccaaactagcaaacttcgcgtatacggtatcgcgattagtgtatacaccaactgtatgaaaattaagaaaacagtttaataaatcaacagaaatatttaatcctccgtttgatacagatgcgccatatttatggatttcggattcacacgttgtttgtctgaggtgttcgtctagtgttgcttctacgtaaacttcgattcccatatattctttattgtcagaatcgcataccgatttatcatcatacactgtttgaaaactaaatggtatacacatcaaaataataaataataacgagtacattctgcaatattgttatcgtaattggaaaattagtgttcgagtgagtcggattatgtgagtactggattgtatattttattttatattttgtaataagaataaaatgctaatgtcaagtttattccaatagatgtcttattaaaaaacatatataataaataacaatggctgaatggcataaaattatcgaggatatctcaaaaaataataagttcgaggatgccgccatcgttgattacaagactacaaagaatgttctagctgctattcctaacagaacatttgccaagattaatccgggtgaaattattcctctcatcactaatcgtaatattctaaaacctcttattggtcagaaatattgtattgtatatactaactctctaatggatgagaacacgtatgctatggagttgcttactgggtacgcccctgtatctccgatcgttatagcgagaactcataccgcacttatatttttgatgggtaagccaacaacatccagacgtgatgtgtatagaacgtgtagagatcacgctacccgtgtacgcgcaactggtaattaaaataaaaagtaatattcatatgtagtgtcaattttaaatgatgatgatgaaatggataatatccatattgacgatgtcaataatgccggtattggcatacagctcatcgatttttagatttcattcagaggatgtggaattatgttatgggcatttgtattttgataggatctataatgtagtaaatataaaatataatccgcatattccatatagatataattttattaatcgcacgttaaccgtagatgaactagacgataatgtcttttttacacatggttattttttaaaacacaaatatggttcacttaatcctagtttgattgtctcattatcaggaaacttaaaatataatgatatacaatgctcagtaaatgtatcgtgtctcattaaaaatttggcaacgagtacatctactatattaacatctaaacataagacttattctctacatcggtccacgtgtattactataataggatacgattctattatatggtataaagatataaatgacaagtataatgacatctatgattttactgcaatatgtatgctaatagcgtctacattgatagtgaccatatacgtgtttaaaaaaataaaaatgaactcttaattatgctatgctattagaaatggataaaatcaaaattacggttgattcaaaaattggtaatgttgttaccatatcgtataacttggaaaagataactattgatgttacacctaaaaagaaaaaagaaaaggatgtattattagcgcaatcagttgctgtcgaagaggcaaaagatgtcaaggtagaagaaaaaaatattatcgatattgaagatgacgatgatatggatgtagaaagcgcataatacgatctataaaaataagtatataataaatactttttatttacggtactcttgtagtggtgataccctactcaattatttttttaaaaaaatacttattctgattcttctagccatttccgtgttcgttcgaatgccacatcgacgttaaagataggggagtagttgaaatctagttctgcattgttggtacgcacctcaaatgtagtgttggatatcttcaacgtatagttgttgagtagtgatggttttctaaatagaattctcttcatatcattcttgcacgcgtacatttttagcatccatcttggaattctagatccttgttctattcccaatggtttcatcaatagaagattaaacatatcgtacgaacacgatggagagtaatcgtagcaaaagtaagcatttcctttaatcttagatcccggatactggatatattttgcagccaacacgtgcatccatgcagcatttcctacatatacccggctatgcaccgcgtcatcatcgactgtacgatacataatgttaccgtgttgcttacattgctcgtaaaagactttcgtcaatttgtctccttctccgtaaattccagtgggtcttaggcaacaagtatacaattttgctccattcatgattacggaattattggctttcataaccagttgctcggccatacgtttactttttgcgtatacatgtcctggtgatatatcataaagggtatgctcatggccgatgaatggatcaccgtgtttattgggtcctattgcttccatgctactagtatagatcaaatacttgattcctaggtccacacaagctgccaatatagtctgtgttccataatagtttactttcatgatttcattatcggtgtattttccaaatacatccactagagcagccgtatgaataatcagatttaccccatctagcgcttctctcaccttatcaaagtcgtttatatcacattgtatatagtttataaccttaactttcgaggttattggttgtggatcttctacaatatctatgactctgatttcttgaacatcatctgcactaattaacagttttactatatacctgcctagaaatccggcaccaccagtaaccgcgtacacggccattgctgccactcataatatcagactacttattctattttactaaataatggctgtttgtataatagaccacgataatatcagaggagttatttactttgaaccagtccatggaaaagataaagttttaggatcagttattggattaaaatccggaacgtatagtttgataattcatcgttacggagatattagtcaaggatgtgattccataggcagtccagaaatatttatcggtaacatctttgtaaacagatatggtgtagcatatgtttatttagatacagatgtaaatatatttacaattattggaaaggcgttatctatttcaaaaaatgatcagagattagcgtgtggagttattggtatttcttacataaatgaaaagataatacattttcttacaattaacgagaatggcgtttgatatatcagttaatgcgtctaaaacaataaatgcattagtttacttttctactcagcaaaataaattagtcatacgtaatgaagttaatgatacacactacactgtcgaatttgatagggacaaagtagttgacacgtttatttcatataatagacataatgacaccatagagataagaggggtgcttccagaggaaactaatattggttgcgcggttaatacgccggttagtatgacttacttgtataataagtatagttttaaactgattttagcagaatatataagacacagaaatactatatccggcaatatttattcggcattgatgacactagatgatttggctattaaacagtatggagacattgatctattatttaatgagaaacttaaagtagactccgattcgggactatttgactttgtcaactttgtaaaggatatgatatgttgtgattctagaatagtagtagctctatctagtctagtatctaaacattgggaattgacaaataaaaagtataggtgtatggcattagccgaacatatatctgatagtattccaatatctgagctatctagactacgatacaatctatgtaagtatctacgcggacacactgagagcatagaggatgaatttgattattttgaagacgatgattcgtctacatgttctgccgtaaccgacagggaaacggatgtataattttttttatagcgtgaaggatatgataaaaaatataattgttgtatttatcccattccaatcaccttatatgattctgtaaaaaaattatactgtaacacaataaaggagtcttatagatgtatagaggtcagatactggtttgataaactgtttattccacataagtatgtttgactttatggttagacccgcatactttaacaaatcactgaaaattggagttaggtattgacctctcagaatcagttgccgttctggaacattaaatgtattttttatgatatactccaacgcatttatgtgggcatacaacaagtcattactaatggagtattccaagagttttagttgtctagtatttaacaagagaagagatttcaacagactgtttatgaactcgaacgccgcctcattgtcgcttatattgatgatgtcgaattctcccaatatcatcactgatgagtagctcatcttgttatcgggatccaagttttctaaagatgtcattaaaccctcgatcatgaatggatttatcatcatcgtttttatgttggacatgagcttagtccgtttgtccacatctatagacgacgatttctgaattatttcatatatccctctctttaactccaggaacttgtcaggatggtctactttaatatgttctcgtctaagagatgaaaatctttggatggttgcacgcgacttttctttaaaggatgacgttgcccaagatcctctcttaaatgaatccatcttatccttggacaagatggacagtctattttccttagatggtttaatatttttgttacccatgatctataaaggtagacctaatcgtctcggatgaccatatatttattttcagttttattatacgcataaattgtaaaaaatatgttaggtttacaaaaatgtctcgtggggcattaatcgtttttgaaggattggacaaatctggaaaaacaacacaatgtatgaacatcatggaatctataccggcaaacacgataaaatatcttaactttcctcagagatccactgtcactggaaagatgatagatgactatctaactcgtaaaaaaacctataatgatcatatagttaatctattattttgtgcaaatagatgggagtttgcatcttttatacaagaacaactagaacagggaattactttaatagttgatagatacgcattttctggagtagcgtatgccgccgctaaaggcgcgtcaatgactctcagtaagagttatgaatctggattgcctaaacccgacttagttatattcttggaatctggtagcaaagaaattaatagaaacgtcggcgaggaaatttatgaagatgttacattccaacaaaaggtattacaagaatataaaaaaatgattgaagaaggagatattcattggcaaattatttcttctgaattcgaggaagatgtaaagaaggagttgattaagaatatagttatagaggctatacacacggttactggaccagtggggcaactgtggatgtaatagtgaaattacattttttataaatagatgttagtacagtgttataaatggatgaagcatattactctggcaacttggaatcagtactcggatacgtgtccgatatgcataccgaactcgcatcaatatctcaattagttattgccaagatagaaactatagataatgatatattaaacaaggacattgtaaattttatcatgtgtagatcaaacttggataatccatttatctctttcctagatactgtatatactattatagatcaagagatctatcagaccgaattgattaattcattagacgacaatgaaattatcgattgtatagttaacaagtttatgagcttttataaggataacctagaaaatatagtagatgctatcattactctaaaatatataatgaataatccagattttaaaactacgtatgccgaagtactcggttccagaatagccgatatagatattaaacaagtgatacgtaagaatatactacaattgtctaatgatatccgcgaacgatatttgtgaaaaatattaaaaaaaaatactttttttattaaatgacgtcgcttcgcgaatttagaaaattatgctgtgatatatatcacgcatcaggatataaagaaaaatctaaattaattagagactttataacagatagggatgataaatatttgatcattaagctattgcttcccggattagacgatagaatttataacatgaacgataaacaaattataaaattatatagtataatatttaaacaatctcaggaagatatgctacaagatttaggatacggatatataggagacactattaggactttcttcaaagagaacacagaaatccgtccacgagataaaagcattttaactttagaagaagtggatagttttttaactacgttatcatccgtaactaaagaatcgcatcaaataaaattattgactgatgtagcatctgtttgtacatgtaatgatttaaaatgtgtagtcatgcttattgataaagatctaaaaattaaagcgggccctcggtacgtacttaacgctattagtcctcatgcctatgatgtgtttagaaaatctaataacttgaaagagataatagaaaatgcatctaaacaaaatctagactctatatctatttctgttatgactccaattaatcccatgttagcggaatcgtgtgattctgtcaataaggcgtttaaaaaatttccatcaggaatgtttgcggaagtcaaatacgatggtgaaagagtacaagttcataaaaataataacgagtttgccttctttagtagaaacatgaaaccagtactctctcataaagtggattatctcaaagaatacataccgaaagcatttaaaaaagctacgtctatcgtattggattctgaaattgttcttgtagacgaacataatgtaccgctaccgtttggaagtttaggaatacacaaaaagaaagaatataaaaactctaacatgtgtttgttcgtgtttgactgtttgtactttgatggattcgatatgacggacattccattgtacgaacgaagatcttttctcaaagatgttatggttgaaatacccaatagaatagtattctcagagttgacgaatattagtaacgagtctcagttaactgacgtattggatgatgcactaacgagaaaattagaaggattggtcttaaaagatattaatggagtatacgaaccgggaaagagaagatggttaaaaataaagcgagactatttgaacgagggttccatggcagattctgccgatttagtagtactaggtgcctactatggtaaaggagcaaagggtggtatcatggcagtctttctaatgggttgttacgacgatgaatccggtaaatggaagacggttaccaagtgttcaggacacgatgataatacgttaagggagttgcaagaccaattaaagatgattaaaattaacaaggatcccaaaaaaattccagagtggttagtagttaataaaatctatattcccgattttgtagtagaggatccgaaacaatctcagatatgggaaatttcaggagcagagtttacatcttccaagtcccataccgcaaatggaatatccattagatttcctagatttactaggataagagaggataaaacgtggaaagaatctactcatctaaacgatttagtaaacttgactaaatcttaatagttacatacaaactgaaaattaaaataacaccatttagttggtggtcgccatggatggtgttattgtatactgtctaaacgcgttagtaaaacatggcgaggaaataaatcatataaaaaatgatttcatgattaaaccatgttgtgaaagagtttgtgaaaaagtcaagaacgttcacattggcggacaatctaaaaacaatacagtgattgcagatttgccatatatggataatgcggtatccgatgtatgcaattcactgtataaaaagaatgtatcaagaatatccagatttgctaatttgataaagatagatgacgatgacaagactcctactggtgtatataattattttaaacctaaagatgttattcctgttatcatatctataggaaaggataaagatgtctgtgaactattaatctcatcagacatatcgtgtgcatgcgtggagttaaattcatatcacgtagccattcttcccatgaatgtttccttttttaccaaaggaaatgcctcgttgattattctcctgtttgatttctctatcgatgcagcacctctcttaagaagtgtaaccgataataatgttattatatctagacaccagcgtctacatgacgagcttccgagttccaattggttcaagttttacataagtataaagtccgactattgttctatattatatatggttgttgatggatctgtgatgcatgcgatagctgataatagaactcacgcaattattagcaaaaatatattagacaatactacaattaacgatgagtgtagatgctgttattttgaaccacagattaggattcttgatagagatgagatgctcaatggatcatcgtgtgatatgaacagacattgtattatgatgaatttacctgatgtaggcgaatttggatctagtatgttggggaaatatgaacctgacatgattaagattgctctttcggtggctggtaatttaataagaaatcgagactacattcccgggagacgaggctatagctactacgtttacggtatagcctctagataatttttttaagcacgaaataaaaaacataattttaaaccaatctatttcatactattttgtgtgatcaccatggacataaagatagatattagtatttctggtgataaatttacggtgactactaggagggaaaatgaagaaagaaaaaaatatctacctctccaaaaagaaaaaactactgatgttatcaaacctgattatcttgagtacgatgacttgttagatagagatgagatgtttactattctagaggaatattttatgtacagaggtctattaggcctcagaataaaatatggacgactctttaacgaaattaaaaaattcgacaatgatgcggaagaacaattcggtactatagaagaactcaagcagaaacttagattaaattctgaagagggagcagataactttatagattatataaaggtacaaaaacaggatatcgtcaaacttactgtatacgattgcatatctatgataggattgtgtgcatgcgtggtagatgtttggagaaatgagaaactgttttctagatggaaatattgtttacgagcgattaaactgtttattaatgatcacatgcttgataagataaaatctatactgcagaatagactagtatatgtggaaatgtcatagaaagttaatgagagcaaaaatatataaggttgtattccatatttgttattttttctgtaatagttaaaaaaatacattcgatggtctatctatcagattattatgtgttataaggtactttttctcataataaactagagtatgagtaagatagtgtttttcaaaacatataaatctaaaattgatggatgagatatacagctattaatttcgaaaatatataaatctaaaattgatggataagatatacagctattaatttcgaaaatatattttaatctgataactttaaacatggatttttgatggtggtttaacgttttaaaaaaagattttgttattgtagtatatgataatattaaaagatggatataaagaatttgctgactgcatgtactattttttacattactacattggctacggcagatatacctactccgccaccaacgggtcatgtgacaagggagaatatcttgataagaggcataatcaatgttgtaatcggtgtccacctggagaatttgccaaggttagatgtaatggtaacgataacacaaaatgtgaacgctgcccacctcatacatataccacaatccccaattattctaatggatgtcatcaatgtagaaaatgcccaaccggatcatttgataaggtaaagtgtaccggaacacagaacagtaaatgttcgtgtcttcctggttggtattgcgctactgattcttcacagactgaagattgttgaaattgtgtaccaaaaaggagatgtccatgcggatactttggtggaatagatgaacaaggaaatcctatttgtaaatcgtgctgtattggtgaatattgcaactacctacgtaattatagacttgatccattttctccatgcaaactatctaaatgtaattaattatgattttgatgataatgttaccatacattatatcgctacttggttagtgtattattcagtatgaagacctattaataattacttatcttttgacgatcttgttataattataatataaaaacttatggcatagtaactcataattgctgacgcgataaattcgtaataatctgttttgttcaaatttttataaggaatctacaggcataaaaataaaaatataatttataatatactcttacagcgcgccatcatgaatagcagcagtaaattaattgctgttattaatggatttagaaatagtggacgattttgtgatattaatatagttattaatgatgaaaggataaacgctcacagactcatcctatctggagcctccgaatatttttccattctgttttccaataattttatcgattctaatgaatacgaagttaatctaagtcatttagattatcaaagtgttaacgatttgatcgattacatttatgggatacctttgagcctaactaacgataacgtgaaatatattctttcaaccgctgattttttacaaattggatctgccattactgagtgcgaaaaatacatacttaaaaatctttgttctagaaactgtatcgatttctacatatacgctgataaatataataacaagaaaatagaatcagcgtcgtttaacacaatattacgaaatattttgagactcatcaacgatgaaaactttaaatacttaacagaggaatcaatgataaaaattttaagcgatgatatgttaaatataaaaaatgaggattttgcaccactaattctcattaaatggttagagagtactcaacaatcatgcaccgtcgagttacttagatgcctcagaatatcattgctttccccacaagttataaaatcactttatagtcatcaactggttagttcaatctacgaatgtataacattcttaaacaatatagcattcttggatgaatcatttcctagataccatagcatcgagttgatatctatcggtataagtaattcgcatgataagatttccataaactgctacaatcataaaaaaaatacatgggaaatgatatcttcacgtagatataggtgtagtttcgcagtggccgtcctggataatattatctatatgatgggtggatatgatcagtccccgtatagaagttcaaaggttatagcgtacaatacatgtacaaattcttggatatatgatataccagagctaaaatatcctcgttctaattgtgggggactggctgatgacgaatacatttattgtataggcggcatacgcgatcaggattcatcgttgacatctagtattgatagatggaagccatcaaaaccatattggcagaagtatgctaaaatgcgcgaaccaaaatgtgatatgggggttgcgatgttaaacggattaatatatgtcatgggtggaatcgttaaaggtgacacgtgtaccgacgcactagagagtttatcagaagatggatggatgaagcatcaacgtcttccaataaaaatgtccaatatgtcgacgattgttcatgatggcaagatttatatatctggaggttacaacaatagtagtgtagttaatgtaatatcgaatctagtccttagctataatccgatatatgatgaatggaccaaattatcatcattaaacattcctagaattaatcccgctctatggtcagcgcataataaattatatgtaggaggaggaatatctgatgatgttcgaactaatacatctgaaacatacgataaagaaaaagattgttggacattggataatggtcacgtgttaccacgcaattatataatgtataaatgcgaaccgattaaacataaatatccattggaaaaaacacagtacacgaatgattttctaaagtatttggaaagttttataggtagttgatagaacaaaatacataattttgtaaaaataaatcactttttatactaatatgacacgattaccaatacttttgttactaatatcattagtatacgctacaccttttcctcagacatctaaaaaaataggtgatgatgcaactctatcatgtaatcgaaataatacaaatgactacgttgttatgagtgcttggtataaggagcccaattccattattcttttagctgctaaaagcgacgtcttgtattttgataattataccaaggataaaatatcttacgactctccatacgatgatctagttacaactatcacaattaaatcattgactgctagagatgccggtacttatgtatgtgcattctttatgacatcaactacaaatgacactgataaagtagattatgaagaatactccacagagttgattgtaaatacagatagtgaatcgactatagacataatactatctggatctacacattcaccagaaactagttctgagaaaccagaggatatagataattttaattgctcgtcggtattcgaaatcgcgactccggaaccaattactgataatgtagaagatcatacagacaccgtcacatacactagtgatagcattaatacagtaagtgcatcatctggagaatccacaacagacgagactccggaaccaattactgataaagaagaagatcatacagtcacagacactgtctcatacactacagtaagtacatcatctggaattgtcactactaaatcaaccaccgatgatgcggatctttatgatacgtacaatgataatgatacagtaccaccaactactgtaggcggtagtacaacctctattagcaattataaaaccaaggactttgtagaaatatttggtattaccgcattaattatattgtcggccgtggcaatattctgtattacatattatatatataataaacgttcacgtaaatacaaaacagagaacaaagtctagatttttgacttacataaatgtctgggatagtaaaatctatcatattgagcggaccatctggttcaggaaagacagccatagccaaaagactatgggaatatatttggatttgtggtgtcccataccactagatttcctcgtcctatggaacgagaaggtgtcgattaccattacgttaacagagaggccatctggaagggaatagccgccggaaactttctagaacatactgagtttttaggaaatatttacggaacttctaaaactgctgtgaatacagcggctattaataatcgtatttgtgtgatggatctaaacatcgatggcgttagaagtcttaaaaatacgtacctaatgccttactcggtgtatataagacctacctctcttaaaatggttgagaccaagcttcgttgtagaaacactgaagcggatgatgagattcatcgtcgtgtgatgttggcaaaaactgacatggatgaggcaggtgaagccggtctattcgacactattatcattgaagatgatgtgaatttagcatatagtaagttaattcagatactacaggaccgtattagaatgtattttaacactaattagagacttaagacttaaaacttgataattaataatataactcgtttttatatgtggctatttcaacgtctaatgtattagttaaatattaaaacttaccacgtaaaacttaaaatttaaaatgatatttcattgacagatagatcacacattatgaactttcaaggacttgtgttaactgacaattgcaaaaatcaatgggtcgttggaccattaataggaaaaggtggattcggtagtatttatactactaatgacaataattatgtagtaaaaatagagcccaaagctaacggatcattatttaccgaacaggcattttatactagagtacttaaaccatccgttatcgaagaatggaaaaaatctcacaatataaagcacgtaggtcttatcacgtgcaaggcatttggtctatacaaatccattaatgtggaatatcgattcttggtaattaatagattaggtgcagatctagatgcggtgatcagagccaataataatagattaccaaaaaggtcggtgatgttgatcggaatcgaaatcttaaataccatacaatttatgcacgagcaaggatattctcacggagatattaaagcgagtaatatagtcttggatcaaatagataagaataaattatatctagtggattacggattggtttctaaattcatgtctaatggcgaacatgttccatttataagaaatccaaataaaatggataacggtactctagaatttacacctatagattcgcataaaggatacgttgtatctagacgtggagatctagaaacacttggatattgtatgattagatggttgggaggtatcttgccatggactaagatatctgaaacaaagaattgtgcattagtaagtgccacaaaacagaaatatgttaacaatactgcgactttgttaatgaccagtttgcaatatgcacctagagaattgctgcaatatattaccatggtaaactctttgacatattttgaggaacccaattacgacgagtttcggcacatattaatgcagggtgtatattattaagtgtggtgtttggtcgatgtaaaatttttgtcgataaaaattaaaaaataacttaatttattattgatctcgtgtgtacaaccgaaatcatggcgatgttttacgcacacgctctcggtgggtacgacgagaatcttcatgcctttcctggaatatcatcgactgttgccaatgatgtcaggaaatattctgttgtgtcagtttataataacaagtatgacattgtaaaagacaaatatatgtggtgttacagtcaggtgaacaagagatatattggagcactgctgcctatgtttgagtgcaatgaatatctacaaattggagatccgatccatgatcaagaaggaaatcaaatctctatcatcacatatcgccacaaaaactactatgctctaagcggaatcgggtacgagagtctagacttgtgtttggaaggagtagggattcatcatcacgtacttgaaacaggaaacgctgtatatggaaaagttcaacatgattattctactatcaaagagaaggccaaagaaatgaatgcactcagttcaggacctatcatcgattaccacgtctggataggagattgtatctgtcaagttactgctgtggacgtacatggaaaggaaattatgagaatgagattcaaaaagggtgcggtgctacagatcccaaatctggtaaaagttaaacttggggagaatgatacagaaaatctttcttctactatatcggcggcaccatcgaggtaaccacctctcaagaagaccgcgtgaataatgtactcatgaaacgtttggaaactatacgccatatgtggtctgttgtatatgatcattttgatattgtgaatggtaaagaatgctgttatgtgcatacgcattcatctaatcaaaatcctataccgagtactgtaaaaacaaatttgtacatgaagactatgggatcatgcattcaaatggattccatggaagctctagagtatcttagcgaactgaaggaatcaggtggatggagtcccagaccagaaatgcaggaatttgaatatccagatggagtggaagacactgaatcaattgagagattggtagaggagttcttcaatagatcagaacttcaggctggtaaattagtcaaatttggtaattctattaattgttaaacatacatctgtttcagctaagcaactaagaacacgtatacggcagcagcttccttttatactctcatcttttaccaacacaaagggtggatatttgttcattggagttgataataatacacacaaagtatttggattcacggtgggttacgactacctcagactgatagagaatgatatagaaaagcatatcaaaagactttgtgttgtgcatttctgtgagaagaaagaggacatcaagtacacgtgtcgattcatcaaggtatataaacctggggatgaggctacctcgacatacgtgtgcgctatcaaagtggaaagatgctgttgtgctgtgtttgcagattggccagaatcatggtatatggatactaatggtatcaagaagtattctccagatgaatgggtgtcacatataaaattttaattaatgtaactatagagaacaaataataggttgtaatatcatatagacaataactaacaattaattagtaactgttatctcttttttaactaaccaactaactatatacctattaatacatcgtaattatagttcttaacatctattaatcattgattcgcttctttaattttttataaactaacattgttaattgaaaagggataacatgttacagaatataaattatatatggatttttttaaaaaggaaatacttgactggagtgtatatttatctcttcattatatagcacgcgtgtgttccaattcttccacatcccatataatacaggattataatctcgttcgaacatacgagaaagtggataaaacaatagttgattttttatctaggttgccaaatttattccatattttagaatatggggaaaatattctacatatttattctatggatgatgctaatacgaatattataattttttttctagatagagtattaaatattaataagaacgggtcatttatacacaatctcaggttatcatcatccattaatataaaagaatatgtatatcaattagttaataatgatcatccagataataggataagactaatgcttgaaaatggacgtagaacaagacattttttgtcctatatatcagatacagttaatatctatatatgtattttaataaatcatggattttatatagatgcagaagacagttacggttgtacattattacatagatgtatatatcactataagaaatcagaatcagaatcatacaatgaattaattaagatattgttaaataatggatccgatgtagataaaaaagatacgtacggaaacacaccttttatcctattatgtaaacacgatatcaacaacgtggaattgtttgagatatgtttagagaatgctaatatagactctgtagactttaatagatatacacctcttcattatgtctcatgtcgtaataaatatgattttgtaaagttattaatttctaaaggagcaaatgttaatgcgcgtaataaattcggaactactccattttattgtggaattatacacggtatctcgcttataaaactatatttggaatcagacacagagttagaaatagataatgaacatatagttcgtcatttaataatttttgatgctgttgaatctttagattatctattatccagaggagttattgatattaactatcgtactatatacaacgaaacatctatttacgacgctgtcagttataatgcgtataatacgttggtctatctattaaacagaaatggtgattttgagacgattactactagtggatgtacatgtatttcggaagcagtcgcaaacaacaacaaaataataatggaagtactattgtctaaacgaccatctttgaaaattatgatacagtctatgatagcaattactaaaaataaacaacataatgcagatttattgaaaatgtgtataaaatatactgcgtgtatgaccgattatgatactcttatagatgtacagtcgctacagcaatataaatggtatattttaaaatgtttcgatgaaatagatatcatgaagagatgttatataaaaaataaaactgtattccaattagttttttgtatcaaagacattaatactttaatgagatatggtaaacatccttctttcgtgaagtgcactagtctcgacgtatacggaagtcgtgtacgtaatatcatagcatctattagatatcgtcagagattaattagtctattatccaagaagctggatgcgggagataaatggtcgtgttttcctaacgaaataaaatataaaatattggaaaactttaacgataacgaactatccacatatctaaaaatcttataaacactattaaaatataaaatctaagtaggataaaatcacactacatcattgtttccttttagtgctcgacagtgtatactatttttaacactcataaataaaaatgaaaacgatttccgttgttacgttgttatgcgtactacctgctgttgtttattcaacatgtactgtacccactatgaataacgctaaattaacgtctaccgaaacatcgtttaatgataaacagaaagttacatttacatgtgatcagggatatcattctttggatccaaatgctgtctgcgaaacagataaatggaaatacgaaaatccatgcaagaaaatgtgcacagtttctgattatgtctctgaattatatgataagccattatacgaagtgaattccaccatgacactaagttgcaacggcgaaacaaaatattttcgttgcgaagaaaaaaatggaaatacttcttggaatgatactgttacgtgtcctaatgcggaatgtcaacctcttcaattagaacacggatcgtgtcaaccagttaaagaaaaatactcatttggggaatatatgactatcaactgtgatgttggatatgaggttattggtgcttcgtacataagttgtacagctaattcttggaatgttattccatcatgtcaacaaaaatgtgatataccgtctctatctaatggattaatttccggatctacattttctatcggtggcgttatacatcttagttgtaaaagtggttttatactaacgggatctccatcatccacatgtatcgacggtaaatggaatcccatactcccaacatgtgtacgatctaacgaaaaatttgatccagtggatgatggtcccgacgatgagacagatttgagcaaactctcgaaagacgttgtacaatatgaacaagaaatagaatcgttagaagcaacttatcatataatcatagtggcgttaacaattatgggcgtcatatttttaatctccgttatagtattagtttgttcctgtgacaaaaataatgaccaatataagttccataaattgctaccgtaaatataaatccgttaaaataattaataatttaataacaaacaagtatcaaaagattaaagacttatagctagaatcaattgagatgtcttcttcagtggatgttgatatctacgatgccgttagagcatttttactcaggcactattataacaagagatttattgtgtatggaagaagtaacgccatattacataatatatacaggctatttacaagatgcgccgttataccgttcgatgatatagtacgtactatgccaaatgaatcacgtgttaaacaatgggtgatggatacacttaatggtataatgatgaatgaacgcgatgtttctgtaagcgttggcaccggaatactattcatggaaatgtttttcgattacaataaaaatagtatcaacaatcaactaatgtatgatataattaatagcgtatctataattctagctaatgagagatatagaagcgcttttaacgacgatggtatatacatccgtagaaatatgattaacaagttgtacggatacgcatctctaactactattggcacgatcgctggaggtgtttgttattatctgttgatgcatctagttagtttgtataaataattatttcaatatactagttaaaattttaagattttaaatgtataaaaaactaataacgtttttatttgtaataggtgcattagcatcctattcgaataatgagtacactccgtttaataaactgagtgtaaaactctatatagatggagtagataatatagaaaattcatatactgatgataataatgaattggtgttaaattttaaagagtacacaatttctattattacagagtcatgcgacgtcggatttgattccatagatatagatgttataaacgactataaaattattgatatgtataccattgactcgtctactattcaacgcagaggtcacacgtgtagaatatctaccaaattatcatgccattatgataagtacccttatattcacaaatatgatggtgatgagcaacaatattctattactgcagagggaaaatgctataaaggaataaaatatgaaataagtatgatcaacgatgatactctattgagaaaacatactcttaaaattggatctacttatatatttgatcgtcatggacatagtaatacatattattcaaaatatgatttttaaaaatttaaaatatattatcacttcagtgacagtagtcaaataacaaacaacaccatgagatatattataattctcgcagttttgttcattaatagtatacacgctaaaataactagttataagtttgaatccgtcaattttgattccaaaattgaatggactggggatggtctatacaatatatcccttaaaaattatggcatcaagacgtggcaaacaatgtatacaaatgtaccagaaggaacatacgacatatccgcatttccaaagaatgatttcgtatctttctgggttaaatttgaacaaggcgattataaagtggaagagtattgtacgggactatgcgtcgaagtaaaaattggaccaccgactgtaacattgactgaatacgacgaccatatcaatttgtacatcgagcatccgtatgctactagaggtagcaaaaagattcctatttacaaacgcggtgacatgtgtgatatctacttgttgtatacggctaacttcacattcggagattctaaagaaccagtaccatatgatatcgatgactacgattgcacgtctacaggttgcagcatagactttgtcacaacagaaaaagtgtgcgtgacagcacagggagccacagaagggtttctcgaaaaaattactccatggagttcgaaagtatgtctgacacctaaaaagagtgtatatacatgcgcaattagatccaaagaagatgttcccaatttcaaggacaaaatggccagagttatcaagagaaaatttaataaacagtctcaatcttatttaactaaatttctcggtagcacatcaaatgatgttaccacttttcttagcatgcttaacttgactaaatattcataactaatttttattaatgatacaaaaacgaaataaaactgcatattatacactggttaacgcccttataggctctaaccattttcaagatgaggtccctgattatagtccttctgttcccctctatcatctactccatgtctattagacgatgtgagaagactgaagaggaaacatggggattgaaaatagggttgtgtataattgccaaagatttctatcccgaaagaactgattgcagtgttcatctcccaactgcaagtgaaggattgataactgaaggcaatggattcagggatatacgaaacaccgataaattataaaaaaagcaatgtgtccgctgtttccgttaataatactattttcgtaactggcggattattcataaataactctaatagcacgatcgtggttaacaatatggaaaaacttgacatttataaagacaaacaatggtcgattatagaaatgcctatggctagggtatatcacggcatcgactcgacatttggaatgttatattttgccggaggtctatccgttaccgaacaatatggtaatttagagaaaaacaacgagatatcttgttacaatcctagaacgaataagtggtttgatatttcatatactatttataagatatccatatcatcattgtgtaaactaaataacgtcttctatgtatttagtaaggacattggatatgtggaaaagtatgatggtgcatggaagttagtacatgatcgtctccccgctataaaggcattatcaacttctccttattgattgaaaatgaaaatataaatagtttttatgtatagcagtattaccctatagttttattgcttactactaacatggatacagatgttacaaatgtagaagatatcataaatgaaatagatagagagaaagaagaaatactaaaaaatgtagaaattgaaaataataaaaacattaacaagaatcatccaagtggatatattagagaagcactcgttattaatacaagtagtaatagtgattccattgataaagaagttatagaatgtatcagtcacgatgtaggaatatagatcatatctactaatttttataatcgatacaaaacataaaaaacaactcgttattacatagcaggcatggaatccttcaagtattgttttgataacgatggcaagaaatggattatcggaaatactttatattctggtaattcaatactatataaggtcagaaaaaatttcactagttcgttctacaattacgtaatgaaaatagatcacaaatcacacaagccattgttgtctgaaatacgattctatatatctgtattggatcctttgactatcgacaactggacacgggaacgtggtataaagtatttggctattccagatctgtatggaattggagaaaccgatgattatatgttcttcgttataaagaattcgggaagagtattcgccccaaaggatactgaatcagtcttcgaagcatgcgtcactatgataaacacgttagagtttatacactctcgaggatttacccatggaaaaatagaaccgaggaatatactgattagaaataaacgtctttcactaattgactattctagaactaacaaactatacaagagtggaaactcacatatagattacaacgaggacatgataacttcaggaaatatcaattatatgtgtgtagacaatcatcttggagcaacagtttcaaaacgaggagatttagaaatgttgggatattgcatgatagaatggttcggtggcaaacttccatggaaaaacgaaagtagtataaaagtaataaaacaaaaaaaagaatataaaaaatttatagctactttctttgaggactgttttcctgaaggaaatgaacctctggaattagttagatatatagaattagtatacacgttagattattctcaaactcctaattatgacagactacgtaaactgtttatacaagattgaaattatattctttttttatagagtgtggtagtgttacggatatctaatattaatattagactatctctatcgcgctacacgaccaatatcgattactatggatatcttcagggaaatcgcatcttctatgaaaggagagaatgtattcatttctccagcgtcaatctcgtcagtattgacaatactgtattatggagctaatggatccactgctgaacagctatcaaaatatgtagaaacggaggagaacacggataaggttagcgctcagaatatctcattcaaatccatgaataaagtatatgggcgatattctgccgtgtttaaagattcctttttgagaaaaattggcgataagtttcaaactgttgacttcactgattgtcgcactatagatgcaatcaacaagtgtgtagatatctttactgaggggaaaatcaatccactattggatgaaccattgtctcctgatacctgtctcctagcaattagtgccgtatactttaaagcaaaatggttgatgccattcgaaaaggaatttaccagtgattatcccttttacgtatctccgacggaaatggtagatgtaagtatgatgtctatgtacggcaaggcatttaatcacgcatctgtaaaggaatcattcggcaacttttcaatcatagaactgccatatgttggagatactagtatgatggtcattcttccagacaagattgatggattagaatccatagaacaaaatctaacagatacaaattttaagaaatggtgtaactctctggaagctacgtttatcgatgttcacattcccaagtttaaggtaacaggttcgtataatcttgtggatactctagtaaagtcaggactgacagaggtgttcggttcaactggagattatagcaatatgtgtaattcagatgtgagtgtcgacgctatgattcacaaaacgtatatagatgtcaatgaagagtatacagaagcagctgcagcaacttgtgcactggtgtcagactgtgcatcaacaattacaaatgagttctgtgtagatcatccgttcatctatgtgattaggcatgttgatggaaaaattcttttcgttggtagatattgctctccgacaactaattgttaaccattttttttaaaaaaatagaaaaaacatgtggtattagtgcaggtcgttgttcttccaattgcaattggtaagatgacggccaactttagtacccacgtcttttcaccacagcactgtggatgtgacagactgaccagtattgatgacgtcagacaatgtttgactgaatatatttattggtcgtcctatgcataccgcaacaggcaatgcgctggacagttgtattccacactcctctcttttagagatgatgcggaatcagtgttcatcgacattcgcgagctggtaaaaaatatgccgtgggatgatgtcaaagattgtacagaaatcatccgttgttatataccggatgagcaaaaaaccatcagagagatttcggccatcatcggactttgtgcatatgctgctacttactggggaggtgaagaccatcccactagtaacagtctgaacgcattgtttgtgatgcttgagatgctcaattacgtggattataacatcatattccggcgtatgaattgatgagttgtacatcttgacattttctttcttctcttctccctttcttctcttctcccttcctccctcttctccctttcccagaaacaaacttttttacccactataaaataaaatgagtatactacctattatatttcttcctatatttttttattcttcattcgttcagacttttaacgcgcctgaatgtatcgacaaagggcaatattttgcatcattcatggagttagaaaacgagccagtaatcttaccatgtcctcaaataaatacgctatcatccggatataatatattagatattttatgggaaaaacgaggagcggataatgatagaattataccgatagataatggtagcaatatgctaattctgaacccgacacaatcagactctggtatttatatatgcattaccacgaacgaaacctactgtgacatgatgtcgttaaatttgacaatcgtgtctgtctcagaatcaaatatagatcttatctcgtatccacaaatagtaaatgagagatctactggcgaaatggtatgtcccaatattaatgcatttattgctagtaacgtaaacgcagatattatatggagcggacatcgacgccttagaaataagagacttaaacaacggacacctggaattattaccatagaagatgttagaaaaaatgatgctggttattatacatgtgttttagaatatatatacagaggtaaaacatataacgtaaccagaattgtaaaattagaggtacgggataaaataataccttctactatgcaattaccagatggcattgtaacttcaataggtagtaatttgactattgcgtgtagagtatcgttgagacctcccacaacggatgcagacgtcttttggataagtaatggtatgtattacgaagaagatgatggggacggagacggtagaataagtgtagcaaataaaatctatatgaccgataagagacgtgttattacatcccggttaaacattaatcctgtcaaggaagaagatgctacaacgtttacgtgtatggcgtttactattcctagcatcagcaaaacagttactgttagtataacgtgaatgtatgttgttacatttccatgtcaattgagtttataagaatttttatacattatcttccaacaaacaattgacgaacgtattgctatgattaactcccacgatactatgcatattattaatcattaacttgcagactatacctagtgctattttgacatactcatgttcttgtgtaattgcggtatctatattattaaagtacgtaaatctagctatagttttattatttaattttagataatataccgtctccttatttttaaaaattgccacatcctttattaaatcatgaatgggaatttctatgtcatcgttagtatattgtgaacaacaagagcagatatctataggaaagggtggaatgcgatacattgatctatgtagttttaaaacacacgcgaactttgaagaatttatataaatcattccatcgatacatccttctatgttgacatgtatatatccaggaattcttttattaatgtcaggaaatgtataaactaaaacattgcccgaaagcggtgcctctatctgcgttatatccgttcttaacttacaaaatgtaaccaatacctttgcatgacttgttttgttcggcaacgttagtttaaacttgacgaatggattaattacaatagcatgatccgcgcatctattaagtttttttactttaacgcccttgtatgtttttacagagactttatctaaatttctagtacttgtatgtgttataaatataacgggatatagaactgaatcacctaccttagatacccaattacattttatcagatccagataataaacaaattttgtcgccctaactaattctatattgttatatattttacaattggttatgatatcatgtaataacttggagtctaacgcgcatcgtcgtacgtttatacaattgtgatttagtgtagtatatctacacatgtatttttccgcactatagtattctggactagtgataaaactatcgttatatctgtcttcaatgaactcatcgagatattgctctctgtcatattcatacacctgcataaactttctagacatcttacaatccgtgttattttaggatcatatttacatatttacgggtatatcaaagatgttagattagttaatgggaatcgtctataataatgaatattaaacaattatatgaggacttttaccacaaagcatcataaaaatgagtcgtcgtctgatttatgttttaaatatcaaccgcaaatcaactcataaaatacaagagaatgaaatatatacatattttagtcattgcaatatagaccatacttctacagaacttgattttgtagttaaaaactatgatctaaacagacgacaacatgtaactgggtatactgcactacactgctatttgtataataattactttacaaacgatgtactgaagatattattaaatcatgacgtaaatgtaacgatgaaaaccagtagcggacgtatgcctgtttatatattgcttactagatgttgcaatatttcacatgatgtagtgatagatatgatagacaaagataaaaaccacttattacatagagactattccaacctattactagagtatataaaatctcgttacatgttattaaaggaagaggatatcgatgagaacatagtatccactttattagataagggaatcgatcctaactttaaacaagacggatatacagcgttacattattattatttgtgtctcgcacacgtttataaaccaggtgagtgtagaaaaccgataacgataaaaaaggccaagcgaattatttctttgtttatacaacatggagctaatctaaacgcgttagataattgtggtaatacaccattccatttgtatcttagtattgaaatgtgtaataatattcatatgactaaaatgctgttgacttttaatccgaatttcaaaatatgtaataatcatggattaacgcctatactatgttatataacttccgactacatacaacacgatattcttgttatgttaatacatcactatgaaacaaatgttggagaaatgccgatagatgagcgtcgtatgatcgtattcgagtttatcaaaacatattctacacgtccggcagattcgataacttatttgatgaataggtttaaaaatataaatatttatacccgctatgaaggaaagacattattacacgtagcatgtgaatataataatacacacgtaatagattatcttatacgtatcaacggagatataaatgcgttaaccgacaataacaaacacgctacacaactcattatagataacaaagaaaattccccgtataccatcgattgtttactgtatatacttagatatattgtagataagaatgtgataagatcgttggtggatcaacttccatctctacctatcttcgatataaaatcatttgagaaattcatatcctactgtatacttttagatgacacattttacgataggcacgttaagaatcgcgattctaaaacgtatcgatacgcattttcaaaatacatgtcgtttgataaatacgatggtataataactaaatgtcacgacgaaacaatgttactcaaactgtccactgttctagacactacactatatgcagttttaagatgccataattcgaaaaagttaagaagatacctcaacgagttaaaaaaatataataacgataagtcctttaaaatatattctaatattatgaatgagagataccttaatgtatattataaagatatgtacgtgtcaaaggtatatgataaactatttcctgttttcacagataaaaattgtctactaacattactaccttcagaaattatatacgaaatattatacatgctgacaattaacgatctttataatatatcgtatccacctaccaaagtatagttgtatttttctcatgcgatgtgtgtaaaaaaactgatattatataaatattttagtgccgtataataaagatgacgatgaaaatgatggtacatatatatttcgtatcattattgttattgctattccacagttacgccatagacatcgaaaatgaaatcacagaattcttcaataaaatgagagatactctaccagctaaagactctaaatggttgaatccagcatgtatgttcggaggcacaatgaatgatatagccgctctaggagagccattcagcgcaaagtgtcctcctattgaagacagtcttttatcgcacagatataaagactatgtggttaaatgggagaggctagaaaagaatagacggcgacaggtttctaataaacgtgttaaacatggtgatttatggatagccaactatacatctaaattcagtaaccgtaggtatttgtgtaccgtaactacaaagaatggtgactgtgttcagggtatagttagatctcatattaaaaaacctccttcatgcattccaaaaacatatgaactaggtactcatgataagtatggcatagacttatactgtggaattctttacgcaaaacattataataatataacttggtataaagataataaggaaattaatatcgacgacattaagtattcacaaacgggaaagaaattaattattcataatccagagttagaagatagtggaagatacaactgttacgttcattacgacgacgttagaatcaagaatgatatcgtagtatcaagatgtaaaatacttacggttataccgtcgcaagaccacaggtttaaactaatactagatccaaaaatcaacgtaacgataggagaacctgccaatataacatgcactgctgtgtcaacgtcattattgattgacgatgtactgattgaatgggaaaatccatccggatggcttataggattcgattttgatgtatactctgttttaactagtagaggcggtattaccgaggcgaccttgtactttgaaaatgttactgaagaatatataggtaatacatataaatgtcgtggacacaactattattttgaaaaaacccttacaactacagtagtattggagtaaatacacaatgcatttttatatacattactgaataattattattattatttatatcgtatttgtgctataacgcgactatctaggtatttgtatctcactgatagagaacatataaatatagactctattaaacagttgtgtaaaatatcaaatcctaatagatgtggatgtacggctttacatgagtacttttataattatagatcagtcaacggaaaatacaagtatagatacaacggttactatcaatattatttatctagcgattatgaaaattataatgaatattattatgatgattatgatagaactggtatgaacagtgagagtgataatatatcaatcaaaacagaatatgaattctatgatgaaacacaagatcaaagtacacaactagtaggttacgacattaaactcaaaaccaatgaggatgattttatggctatgatagatcagtgggtgtccatgattatatagatgaatcaattaataaagtagtatatggaagagagtctcacgtaagatggcgggatatatggcaagaacataatgatggcgtatacagtataggaaaggagtgcatagataatatatacgaagacaaccataccgtagacgaattctacaagatagacagcgtatcagatgtagatgacgcggaacacatatctccgataactaatgatgtatctacacaaacatgggaaaagaaatcagagttagatagatacatggaaatgtatcctcgtcatagatatagtaagcattctgtctttaagggattttctgacaaagttagaaaaaatgatttagacatgaatgtggtaaaagaattactttctaacggtgcatctctaacaattaaggatagcagtaataaggatccaataaccgtttattttcgaagaacgataatgaatttagaaatgattgatattattaacaaacatacaactattgatgaacgaaagtatatagtacactcctatctaaaaaattataaaaatttcgattatccatttttcaggaagttagttttgactaataaacattgtctcaacaattattataatataagcgacagcaaatatggaacaccgctacatatattggcgtctaataaaaaattaataactcctaattacatgaagttattagtgtataacggaaatgatataaacgcacgaggtgaagatacacaaatgcgaactccattacacaaatatttgtgtaaatttgtatatcataatattgaatatggtatccgatactataatgaaaagattatagacgcatttatagagttaggagccgatctaactattccaaataacgatggaatgataccagtagtttactgtatacactcaaatgcagaatatggttataacaatattactaacataaagataatacgtaaactacttaatcttagtagacgtgcgtcacataatctatttagagatcgagtcatgcacgattatataagtaatacatatattgatcttgagtgtttagatattattagatcgttggatggattcgatatcaatggttactttgaaggacgtacaccacttcattgcgctatacaacataacttcactcagattgctaagtacttattagatcgaggagctgatatagtcgtacccaacacattgattatacatcagtacatacagtaaatagcatagatatggaggaggatacaaatatttcaaataaagttataaggtacaacactgtcaataatatatggaagacattacctaacttctggactggaactataaatccaggcgtggtctcgcataaagatgatatatatgttgtatgcgacatcaaagatgaaaaaaatgttaagacttgtatatttagatataacacgaatacgtataacggatgggaattggttacgacgacagaaagcagattatcagctctgcatactattcttcatgacaataccataatgatgttacattgttatgaatcgtatatgttacaagatacatttaatgtgtacactcgcgaatggaatcatatgtgtcatcaacattcgaatagttatatcatgtacaatatactacccatctactaaatataatagaataaaataaatgagtatgatcattttagataacgattgattttatcattaccgcttcattcttatattctttgcttacggaacctatatttagaaacatctactaacgattttttatgcttgcattattaatggtatgtaatatgattgattgtgtacgcaataccaatttgttaagtatgaatacggggtacaaacataaactgaaatttaacattatttatttatgatatatatcgttatcgttattgtttggtctataccatggatatctttaaagaactaatcttaaaacaccctgatgaaaatgttttgatttctccagtttctattttatctactttatctattctaaatcatggagcagctggttctacagctgaacaactatcaaaatatatagagaatatgaatgagaatacacccgatgataagaaggatgacaataatgacatggacgtagatattccgtattgtgcgacactagctaccgcaaataaaatatacggtagcgatagtatcgagttccacgcctccttcctacaaaaaataaaagacgattttcaaactgtaaactttaataatgctaaccaaacaaaggaactaatcaacgaatgggttaagacgatgacaaatggtaaaattaattccttattgactagtccgctatccattaatactcgtatgacagttgttagcgccgtccattttaaagcaatgtggaaatatccattttctaaacatcttacatatacagacaagttttatatttctaagaatatagttaccagtgttgatatgatggtgggtaccgagaataacttgcaatatgtacatattaatgaattattcggaggattctctattatcgatattccatacgagggaaactctagtatggtaattatactaccggacgacatagaaggtatatataacatagaaaaaaatataacagatgaaaaatttaaaaaatggtgtggtatgttatctactaaaagtatagacttgtatatgccaaagtttaaagtggaaatgacagaaccgtataatctggtaccgattttagaaaatttaggacttactaatatattcggatattatgcagattttagcaagatgtgtaatgaaactatcactgtagaaaaatttctacatacgacgtttatagatgttaatgaggagtatacagaagcatcggccgttacaggagtatttatgactaacttttcgatggtatatcgtacgaaggtctacataaaccatccattcatgtacatgattaaagacaacacaggacgtatactttttatagggaaatactgctatccgcaataaatataaacaaatagacttttatcacgtttatctatgtctaaatattacaaatagtaatagtataaactaaagctgataatacttaaaaaaataataatatcatttacaattaatagtataaactaaaaattaaacaaatcgttattataagtaatatcaaaatgatgatatacggattaatagcgtgtcttatattcgtgacttcatccatcgctagtccactttatattcccgttattccacccattacggaagataaatcgttcaatagtgtagaggtattagtttccttgtttagagatgaccaaaaagactatacggtaacttctcagttcaataactacactatcgataccaaagactggactatcggcgtactatccacacctgatggtttggatataccattgactaatataacttattggtcacggtttactataggtcgtgcattgttcaaatcagagtctgaggatattttccaaaagaaaatgagtattctaggtgtttctatagaatgtaagaagtcgtcgacattacttacttttttgaccgtgcgtaaaatgactcgagtatttaataaatttccagatatggcttattatcgaggagactgtttaaaagccgtttatgtaacaatgacttataaaaatactaaaactggagagactgattacacgtacctctctaatggggggttgcctgcatactatcgtaatggggtcgatggttgattattgattagtatattccttattcacacaaaaagaacatttttataaacatgaaaccactgtctaaatgtaattatgatcttgatttatagatgaagatcagcctttagaggattttaaccagtatgtttaatatgaaaaaaataaacataacatattttgagattaagcgctattgtgcttaattattttgctctataaactgaatatatagccacaattattgacgggcttgtttatgaccggcaatcatgaatttacagaaattatctctggctatatatcttactgcgacatgttcgtggtgttatgaaacatgcataagaaaaactgcgttgtatcatgacattcaattggagcatgtagaagacaataaagatagtgtagcgtcgctaccgtacaagtagtcaatcaaagagaacgtagtagattgttggctacatttaattggacagatatagctgagggtgttagaaatgagttcattaaaatatgtgatatcaacggaacatatttatataattatactattgctgttagtataattattgattccacggaagaactaccaacagttactccaattacaacaacatatgaaccttctacatataattatactatcgatgatagcactgttattactactgaagaactacaagtgactcctcatatggatctccatcgatgatacatgtattaaaatactttccgaataagtcttttaaatattgtattaattatgaaaaactatgctatgcgagtatgatgcaaagatgtttaatgatacgatactagattttatctctagcgagagatgtcgttagaatcatttatcataactacgtttaataataattcatcaacgaatatcgataacatgtgtcatttatacgttaaagtctgtccgtcttctctattgtttagactgtttgtagaatgctgtgatataaacaaactagtagaaggtacgactccgttacactgttatctaatgaatgaaggatttgaatcatctgttttaaaaaacctattaaaggagtatgtcatgaatacgtttaatgttcatgacatccattacacaaatatttaactcatgatgaagttgagaatgatatgctttctgatagtatagatagctttagctaatataaaaatatattaatccactatatattctagacttgatttaaaaccgataaactactactacgtactgtataagttgttaaaaaaaggagcagaccctaattatgtagatgatagaggtaatacttttcttcattacttctgcatctatatgtccacttatgagaaaacgtcatttaataagatgcatcgtgaaaagaaatttattaaagagttggtaaaatatgaaaccgaaagtaaataatataggaaatacacctctacataactacgtatctcaatatgatatcactctcattcctcatccacaacccattaaaaaaatggaaattaaagccctctattagcataaacggctacaggtctacctttacaatggcctctccttgtgcccagttcagaccctgtcattgccacgctactaaggactccctgaataccgtggccgacgtcagacattgtctgactgaatacatcctgtgggtttctcatagatggacccatagagaaagcgcagggtctctctacaggcttctcatctctttcagaactgatgcaacggagctctttggtggtgagttgaaggattcacttccgtgggacaatatcgacaattgcgtggagatcattaaatgtttcatcagaaatgactccatgaaaaccgccgaagaacttcgtgcaatcattggactttgtactcaatcagctatcgtctctggaagagtcttcaacgataagtatatcgacatactacttatgctgcgaaagattctgaacgagaacgactatctcaccctcttggatcatatccgcactgctaaatactaaatctccttcatgctctctcactacactttttatcatcttatgaggaatgattgccttcatcatttttcgtgaaataggaataattagcaccagaatagctatggattgcacatgtattctatgtcgtctactggatgaagatgtgacgtacaaaaaaataaaactagaaattgaaacgtgtcacaacttatcaaaacatatagatagacgaggaaacaatgcgctacattgttacgtcttcaataaatgcgatacagacattaagattgttcgactgttactctctcgcggagtcgagagactttgtagaaacaacgaaggattaactccgctaggagcatacagtaagcatagatacgtaaaatctcaaattgtgcatctactgatatccagctattcgaattcctctaacgaactcaagtcgaatataaatgatttcgatctgtattcgtatatgtcttcggataatatcgacttacgtctgctaaaatacctaattgtggataaacggatacgtccgtccaagaatacgaattatgcaatcaatggtctcggattggtggatatatacgtaacgacgcctaatccgagaccagaagtattgctatggcttcttaaatcagaatgttacagcaccggttacgtatttcgtacctgtatgtacgacagtgatatgtgtaagaactctcttcattactatatatcgtctcatagagaatctcaatctctatccaaggatgtaattaaatgtttgatcaataacaatgtttccatccatggcagagacgaaggaggatctttacccatccaatactactggtcttgctcaaccatagatatagagattgttaaattattaataaaggatgtggacacgtgtagagtatacgacgtcagccctatattagaggcggattatctaaacaagcgatttagagtaaccccatataatgtagacatggaaatcgttaatcttcttattgagagacgtcatactcttgtcgacgtaatgcgtagtattacttcttacgattccagagactataaccactacatcatcgataacattctaaagagatttagacaacaggatgaatccatcgtacaagccatgttgataaactacttacattacggcgatatggtcgttcgatgcatgttagataacggacaacaactatcctctgcacgactactttgttaataataatctcgtcgatgtaaacgtcgtaaggtttatcgtggaaaataatggacacatggctgtaaatcacgtatcgaacaatggccgtctatgtatgtacggtctgatattatcgagatttaataattgcgggtatcactgttatgaaaccatactaatagatgtatttgatatactaagcaagtacatggataatatagatatgatcgataatgagaataaaactctactatattacgcggtcgatgtcaataatatacaatttgcaaagcggttattggaatatggagcgagtgttacaacatcacgctcgataatcaatacggccatccagaaaagtagttacagaagagaaaacaaaacgaggatagttgatttattacttagctaccatcccactctagagactatgattgacgcatttaatagagatatacgctatctatatcctgaaccattattcgcctgtatcagatacgccttaatcctagatgatgattttccttctaaagtaagtatgatatctccggtcgtcataaggaactaaagcgctatagagtagacattaatagaatgaagaatgcctacatatcaggcgtctccatgtttgatatattatttaaacgaagcaaacgccacagattgagatacgcaaagaatccgacatcaaatggtacaaaaaagaactaacgtccatcattacagaaactgtaaagaacaatgagaggatcgactccatagtggacaacattaatacagacgataacttgatttcgaaattacccatggagatactttattactccattaaataatttatcatggagcgataatgtcctgtttcatttgtttccatgacatattacaaaatcgattccgtccaagatgataaaaacatttaccggcatcataaacacggagtttattttatatgtctcgcataaacattactaaaaaaatatattgttcggttttctttcacatctttaattatgaaaaagtaaatcattatgagatggacgagattgtacgcatcgttcgcgacagtatgtggtacatacctaacgtatttatggacgacggtaagaatgaaggtcacgtttctgtcaacaatgtttgtcatatgtattttacgttctttgatgtggatacatcgtctcatctgtttaagctagttattaaacactgcgatctgaataaacgaggtaactctccattacattgctatacgatgaatacacgatttaatccatctgtattaaagatattgttacaccacggcatgcgtaactttgatagcaaggatgaaaaaggacatattcctctacaccactatctgattcattcactatcaatcgataacaagatctttgatatactaacggacaccattgatgactttagtaaatcatccgatctattgctgtgttatcttagatataaattcaatgggagcttaaactattacgttctgtacaaaggatccgaccctaattgcgtcgacgaggatggactcacttctcttcattactactgtaaacacatatccacgttctacaaaagcaattattacaagttaagtcacactaagatgcgagccgagaagcgattcatctacgcgataatagattatggagcaaacattaacgcggttacacacttaccttcaacagtataccaaacatagtcctcgtgtggtgtatgctcttttatctcgaggagccgatacgaggatacgtaataatcttgattgtacacccatcatggaacgattgtgcaacaggtcatattctcataatgttactcaattggcacgaacaaaaggaagaaggacaacatctactttatctattcataaaacataatcaaggatacactctcaatatactacggtatctactagataggttcgacattcagaaagacgaatactataataccgcctttcaaaattgtaacaacaatgttgcctcatacatcggatacgacatcaaccttccgactaaagacggtattcgacttggtgtttgaaaacagaaacatcatatacaaggcggatgttgtgaatgacatcatccaccacagactgaaagtatctctacctatgattaaatcgttgttctacaagatgtcagaattctctccctacgacgattactacgtaaaaaagatactagcctactgcctattaagggacgagtcattcgcggaactacatagtaaattctgtttaaacgaggactataaaagtgtatttatgaaaaatatatcattcgataagatagattccatcatcgtgacataagtcgccttaaagagattcgaatctccgacaccgacctgtatacggtatcacagctatcttaaagccatacattcggacagacacatttcatttcccatgtacgacgatctcatagaacagtgccatctatcgatggagcataaaagtaaactcgtcgacaaagcactcaataaattagagtctaccatcggtcaatctagactatcgtatttgcctccggaaattatgcgcaatatcatctaaacagtatgttgtacggaaagaaccattacaaatattatccatgatagaaagaaaatatctatatgattggagaagtaggaaacaggaacaagacgacgattactacattattaaatcatgaagtccgtattatactcgtatatattgtttctctcatgtataataataaacggaagagatatagcaccgcatgcaccatccgatggaaagtgtaaagacaacgaatacaaacgccataatttgtgtccgggaacatacgcttccagattatgcgatagcaagactaacacacgatgtacaccctgtggttcgggtaccttcacatctcgcaataatcatttacccgcttgtctaagttgtaacggaagacgcgatcgtgtaacacgactcacaatagaatctgtgaatgctctcccggatattattgtcttctcaaaggatcatccggatgcaaggcatgtgtttcccaaacaaaatgtggaataggatacggagtatccggagacgtcatctgttctccgtgtggtctcggaacatattctcacaccgtctcttccgcagataaatgcgaacccgtacccagtaatacctttaactatatcgatgtggaaattaatctgtatcccgtcaacgacacgtcgtgtactcggacgaccactaccggtctcagtgaatccatctcaacgtcggaactaactattactatgaatcataaagactgtaatcccgtatttcgtgaggaatacttctctgtccttaataaggtagcaacttcaggtttctttacaggagaaaggtgtgcactctgaatttcgagattaaatgcaataacaaagattcttcctccaaacagttaacgaaagcaaagaatgatgacggtatcatgccgcattcggagacagtaactctagtgggcgactgtatatctagcgtcgacatctatatactatatagtaataccaatactcaagactacgaaactgatacaatctcttatcatgtgggtaatgttctcgatgtcgatagccatatgcccggtagttgcgatatacataaactgatcactaattccaaacccacccgctttttatagtaagtttttcacccataaataataaatacaataattaatttctcgtaaaagtagaaaatatattctaatttattgcatggtaaggaagtagaatcataaagaacagtactcaatcaatagcaattatgaaacaatatatcgtcctggcatgcatgtgcctgccagtcttcagcaatcatcctcatcctcatcctcgtgtacggaagaagaaaacaaacatcatatgggaatcgatgttattatcaaagtcacaaagcaagaccaaacaccgaccaatgataagatttgccaatccgtaacggaaattacagagtccgagtcagatccaaatcccgaggtggaatcagaagatgattccacatcagtcgaggatgtagatcctcctaccacttattactccatcatcggtggaggtctgagaatgaactttggattcaccaaatgtcctcagattaaatccatctcagaatccgctgatggaaacacagtgaatgctagattgtccagcgtgtccccaggacaaggtaaggactctcccgcgatcactcatgaagaagctcttgctatgatcaaagactgtgaggtgtctatcgacatcagatgtagcgaagaagagaaagacagcgacatcaagacccatccagtactcgggtctaacatctctcataagaaagtgagttacgaagatatcatcggttcaacgatcgtcgatacaaaatgtgtcaagaatctagagtttagcgttcgtatcggagacatgtgcaaggaatcatctgaacttgaggtcaaggatggattcaagtatgtcgacggatcggcatctgaaggtgcaaccgatgatacttcactcatcgattcaacaaaactcaaagcgtgtgtctgaatcgataactctattcatctgaaattggatgagtagggttaatcgaacgattcaggcacaccacgaattaaaaaagtgtaccggacactatattccggtttgcaaaacaaaaatgttcttaactacattcacaaaaagttacctctcgcgacttcttctttttctgtctcaatagtgtgatacgattatgacactattcctattcctattcctatttcctttcagggtatcacaaaaatattaaacctctttctgatggtctcataaaaaaagttttacaaaaatatttttattctctttctctctttgatggtctcataaaaaaagttttacaaaaatatttttattctctttctctctttgat

SEQ ID NO: 14 - DNA, 33 bp, synthetic construct
  source 1..33: mol_type = other DNA
  misc_feature 1..33: note = Left flanking sequence of B2R FW Primer
gctgaattcgagatattaaagcgagtaatatag

SEQ ID NO: 15 - DNA, 55 bp, synthetic construct
  source 1..55: mol_type = other DNA
  misc_difference 1..55: note = Left flanking sequence of B2R RV Primer
aggagctctcgagcggccgctgcaggtaccaggaaaggcatgaagattctcgtcg

SEQ ID NO: 16 - DNA, 56 bp, synthetic construct
  source 1..56: mol_type = other DNA
  misc_feature 1..56: note = Right flanking sequence of B2R FW Primer
ggtacctgcagcggccgctcgagagctcctggtaaaagttaaacttggggagaatg

SEQ ID NO: 17 - DNA, 38 bp, synthetic construct
  source 1..38: mol_type = other DNA
  misc_feature 1..38: note = Right flanking sequence of B2R RV Primer
acgaagcttggaagctgctgccgtatacgtgttcttag

SEQ ID NO: 18 - protein, 240 aa, Borrelia burgdorferi
  REGION 1..240: note = CRASP-2 [Borrelia burgdorferi] POLYPEPTIDE
MKKSFLSIYMLISISLLSCDVSRLNQRNIDELKIFVEKAKYYSIKLDAIYSEYTGAYNDIMTYIMTYSEGTSSDKSKVNQAISILKKDNKIVNKFKELEKIIEEYKPMFLSKLIDDFAIELDQAVDNDVSNARHVADSYEKLRKSVALAYIESFDVISSKFVDSKFVEASKKFVNKAKEFVEENDLIALKCIVKTIGDMVNDREINSRSRYNNFYKKEADFLGAAVELEGAYKAIKQTLL

SEQ ID NO: 19 - protein, 499 aa, synthetic construct
  REGION 1..499: note = miniFH POLYPEPTIDE
EDCNELPPRRNTEILTGSWSDQTYPEGTQAIYKCRPGYRSLGNVIMVCRKGEWVALNPLRKCQKRPCGHPGDTPFGTFTLTGGNVFEYGVKAVYTCNEGYQLLGEINYRECDTDGWTNDIPICEVVKCLPVTAPENGKIVSSAMEPDREYHFGQAVRFVCNSGYKIEGDEEMHCSDDGFWSKEKPKCVEISCKSPDVINGSPISQKIIYKENERFQYKCNMGYEYSERGDAVCTESGWRPLPSCEEKSCDNPYIPNGDYSPLRIKHRTGDEITYQCRNGFYPATRGNTAKCTSTGWIPAPRCTSGSGGGGVDTTSCVNPPTVQNAYIVSRQMSKYPSGERVRYQCRSPYEMFGDEEVMCLNGNWTEPPQCKDSTGKCGPPPPIDNGDITSFPLSVYAPASSVEYQCQNLYQLEGNKRITCRNGQWSEPPKCLHPCVISREIMENYNIALRWTAKQKLYSRTGESVEFVCKRGYRLSSRSHTLRTTCWDGKLEYPTCAKR

SEQ ID NO: 20 - protein, 69 aa, synthetic construct
  REGION 1..69: note = CPXV012 POLYPEPTIDE
MFIMRESIYRVMIVILYLSLISSFLVICSMEHGYFQEGISRFKICPYHWYKQHMSLLFRRYYHKLDSII

SEQ ID NO: 21 - protein, 225 aa, synthetic construct
  REGION 1..225: note = CPXV203 POLYPEPTIDE
MRSLVIVLLFPSIIYSMVIRRCEKMEEETWKLKIGMCIQAKDFYSKRTDCSVHRPDVGGGLITEGNGYRVVVHDQCEEPNPFIIATTKQTHFGVTHSYIEFSNSNTGAPENIPDCSKHILISVYCDQEASGLDFHTLKYVESNYLHITVKYDTSCINHLGVNYSFMNECERKLTSIYETDTLTCGAKDIQTRDKYLKTCTNTKFDRSVYKTHMQKSKILHVKTEL

SEQ ID NO: 22 - protein, 171 aa, synthetic construct
  REGION 1..171: note = CPXV018 POLYPEPTIDE
MHLQYYAISLVSLVSLIDCHKLAFNFNLEINGSDTHSTVDVYLDDSQIITFDGKDIRPTIPFMIGDEIFLPFYKNVFSEFFSLFRRVPTSTPYEDLTYFYECDYTDNKSTFDQFYLYNGEEYTVKTQEATNKNMWLTTSEFRLKKWFDGEDCIMHLRSLVRKMEDSKRNTG

SEQ ID NO: 23 - protein, 533 aa, synthetic construct
  REGION 1..533: note = anti-VEGF-Ang-2 single chain antibody POLYPEPTIDE
METDTLLLWVLLLWVPGSTGDEVQLVESGGGLVQPGGSLRLSCAASGFTISDYWIHWVRQAPGKGLEWVAGITPAGGYTYYADSVKGRFTISADTSKNTAYLQMNSLRAEDTAVYYCARFVFFLPYAMDYWGQGTLVTVSSGGGGSGGGGSGGGGSDIQMTQSPSSLSASVGDRVTITCRASQDVSTAVAWYQQKPGKAPKLLIYSASFLYSGVPSRFSGSGSGTDFTLTISSLQPEDFATYYCQQGYGNPFTFGQGTKVEIKRGGGGSGGGGSGGGGSQVQLVESGAEVKKPGASVKVSCKASGYTFTGYYMHWVRQAPGQGLEWMGWINPNSGGTNYAQKFQGRVTMTRDTSISTAYMELSRLRSDDTAVYYCARSPNPYYYDSSGYYYPGAFDIWGQGTMVTVSSGGGGSGGGGSGGGGSQPGLTQPPSVSVAPGQTARITCGGNNIGSKSVHWYQQKPGQAPVLVVYDDSDRPSGIPERFSGSNSGNTATLTISRVEAGDEADYYCQVWDSSSDHYVFGTGTKVTVLGQ

SEQ ID NO: 24 - protein, 441 aa, Homo sapiens
  REGION 1..441: note = Versikine, human POLYPEPTIDE
MFINIKSILWMCSTLIVTHALHKVKVGKSPPVRGSLSGKVSLPCHFSTMPTLPPSYNTSEFLRIKWSKIEVDKNGKDLKETTVLVAQNGNIKIGQDYKGRVSVPTHPEAVGDASLTVVKLLASDAGLYRCDVMYGIEDTQDTVSLTVDGVVFHYRAATSRYTLNFEAAQKACLDVGAVIATPEQLFAAYEDGFEQCDAGWLADQTVRYPIRAPRVGCYGDKMGKAGVRTYGFRSPQETYDVYCYVDHLDGDVFHLTVPSKFTFEEAAKECENQDARLATVGELQAAWRNGFDQCDYGWLSDASVRHPVTVARAQCGGGLLGVRTLYRFENQTGFPPPDSRFDAYCFKRRMSDLSVIGHPIDSESKEDEPCSEETDPVHDLMAEILPEFPDIIEIDLYHSEENEEEEEECANATDVTTTPSVQYINGKHLVTTVPKDPEAAE

SEQ ID NO: 25 - protein, 240 aa, Homo sapiens
  REGION 1..240: note = Full-length hmLIGHT POLYPEPTIDE
MEESVVRPSVFVVDGQTDIPFTRLGRSHRRQSCSVARVGLGLLLLLMGAGLAVQGWFLLQLHWRLGEMVTRLPDGPAGSWEQLIQERRSHEVNPAAHLTGANSSLTGSGGPLLWETQLGLAFLRGLSYHDGALVVTKTGYYYIYSKVQLGGVGCPLGLAGTITHGLYKRTPRYPEELELLVSQQSPCGRATSSSRVWWDSSFLGGVVHLEAGEKVVVRVLGKRLVRLRDGTRSYFGAFMV

SEQ ID NO: 26 - protein, 400 aa, synthetic construct
  REGION 1..400: note = iCasp9 POLYPEPTIDE
MLEGVQVETISPGDGRTFPKRGQTCVVHYTGMLEDGKKVDSSRDRNKPFKFMLGKQEVIRGWEEGVAQMSVGQRAKLTISPDYAYGATGHPGIIPPHATLVFDVELLKLESGGGSGVDGFGDVGALESLRGNADLAYILSMEPCGHCLIINNVNFCRESGLRTRTGSNIDCEKLRRRFSSLHFMVEVKGDLTAKKMVLALLELARQDHGALDCCVVVILSHGCQASHLQFPGAVYGTDGCPVSVEKIVNIFNGTSCPSLGGKPKLFFIQACGGEQKDHGFEVASTSPEDESPGSNPEPDATPFQEGLRTFDQLDAISSLPTPSDIFVSYSTFPGFVSWRDPKSGSWYVETLDDIFEQWAHSEDLQSLLLRVANAVSVKGIYKQMPGCFNFLRKKLFFKTS

SEQ ID NO: 27 - protein, 335 aa, synthetic construct
  REGION 1..335: note = iDED POLYPEPTIDE
MGSSKSKPKDPSQRGVQVETISPGDGRTFPKRGQTCVVHYTGMLEDGKKVDSSRDRNKPFKFMLGKQEVIRGWEEGVAQMSVGQRAKLTISPDYAYGATGHPGIIPPHATLVFDVELLKLEGVQVETISPGDGRTFPKRGQTCVVHYTGMLEDGKKVDSSRDRNKPFKFMLGKQEVIRGWEEGVAQMSVGQRAKLTISPDYAYGATGHPGIIPPHATLVFDVELLKLESGSGGGSMDPFLVLLHSVSSSLSSSELTELKFLCLGRVGKRKLERVQSGLDLFSMLLEQNDLEPGHTELLRELLASLRRHDLLRRVDDFEAGAAAGAAPGEEDLCAA

SEQ ID NO: 28 - protein, 380 aa, synthetic construct
  REGION 1..380: note = iFAS POLYPEPTIDE
MGSSKSKPKDPSQRGVQVETISPGDGRTFPKRGQTCVVHYTGMLEDGKKVDSSRDRNKPFKFMLGKQEVIRGWEEGVAQMSVGQRAKLTISPDYAYGATGHPGIIPPHATLVFDVELLKLEGVQVETISPGDGRTFPKRGQTCVVHYTGMLEDGKKVDSSRDRNKPFKFMLGKQEVIRGWEEGVAQMSVGQRAKLTISPDYAYGATGHPGIIPPHATLVFDVELLKLESGSGGGSGWLCLLLLPIPLIVWVKRKEVQKTCRKHRKENQGSHESPTLNPETVAINLSDVDLSKYITTIAGVMTLSQVKGFVRKNGVNEAKIDEIKNDNVQDTAEQKVQLLRNWHQLHGKKEAYDTLIKDLKKANLCTLAEKIQTIILKDIT

SEQ ID NO: 29 - DNA, 34 bp, Vaccinia virus
  source 1..34: mol_type = other DNA
  misc_feature 1..34: note = VACV synthetic strong early promoter (SSE)
aaaaattgaaaaactagcgtctttttttgctcga

SEQ ID NO: 30 - protein, 240 aa, Homo sapiens
  REGION 1..240: note = Recombinant human LIGHT (wild-type)
MEESVVRPSVFVVDGQTDIPFTRLGRSHRRQSCSVARVGLGLLLLLMGAGLAVQGWFLLQLHWRLGEMVTRLPDGPAGSWEQLIQERRSHEVNPAAHLTGANSSLTGSGGPLLWETQLGLAFLRGLSYHDGALVVTKAGYYYIYSKVQLGGVGCPLGLASTITHGLYKRTPRYPEELELLVSQQSPCGRATSSSRVWWDSSFLGGVVHLEAGEKVVVRVLDERLVRLRDGTRSYFGAFMV

SEQ ID NO: 31 - DNA, 44 bp, synthetic construct
  source 1..44: mol_type = other DNA
  misc_feature 1..44: note = FW primer left flanking sequence of the F14.5L gene
gctcaattgctagctcgatgctttgttaaaatagatactcctag

SEQ ID NO: 32 - DNA, 29 bp, synthetic construct
  source 1..29: mol_type = other DNA
  misc_structure 1..29: note = RV primer left flanking sequence of the F14.5L gene
caacagtagttcttgctcctccttgattc

SEQ ID NO: 33 - DNA, 44 bp, synthetic construct; identical to SEQ ID NO: 31
  source 1..44: mol_type = other DNA
  misc_feature 1..44: note = FW primer gene splicing

SEQ ID NO: 34 - DNA, 38 bp, synthetic construct
  source 1..38: mol_type = other DNA
  misc_feature 1..38: note = RV primer gene splicing
gcgaagcttgactttgtagctctcccagatttcttttc

SEQ ID NO: 35 - DNA, 39 bp, synthetic construct
  source 1..39: mol_type = other DNA
  misc_feature 1..39: note = FW primer left flanking sequence of the TK gene
gctgaattcttttgcgatcaataaatggatcacaaccag

SEQ ID NO: 36 - DNA, 32 bp, synthetic construct
  source 1..32: mol_type = other DNA
  misc_feature 1..32: note = RV primer left flanking sequence of the TK gene
aactcgtctaattaattctgtacttttacctg

SEQ ID NO: 37 - DNA, 101 bp, synthetic construct
  source 1..101: mol_type = other DNA
  misc_feature 1..101: note = FW primer right flanking sequence of the TK gene
ccatgttttcaggtaaaagtacagaattaattagacgagttggtacctgcagcggccgctcgagagctcggaggtaatgatatgtatcaatcggtgtgtag

SEQ ID NO: 38 - DNA, 40 bp, synthetic construct
  source 1..40: mol_type = other DNA
  misc_feature 1..40: note = RV primer right flanking sequence of the TK gene
gcgaagcttcgtaattacttagtaaatccgccgtactagg

SEQ ID NO: 39 - DNA, 28 bp, synthetic construct
  source 1..28: mol_type = other DNA
  misc_feature 1..28: note = FW primer VEGF-anti-Ang2
cgactgcagaccatggaaaccgacacac

SEQ ID NO: 40 - DNA, 32 bp, synthetic construct
  source 1..32: mol_type = other DNA
  misc_feature 1..32: note = RV primer VEGF-anti-Ang2
caatttttataaaaattaattaatcattgtcc

SEQ ID NO: 41 - DNA, 94 bp, synthetic construct
  source 1..94: mol_type = other DNA
  misc_feature 1..94: note = FW primer VK1
ggacaatgattaattaatttttataaaaattgaaattttattttttttttttggaatataaatactcgagaccatgttcataaacataaaatcc

SEQ ID NO: 42 - DNA, 33 bp, synthetic construct
  source 1..33: mol_type = other DNA
  misc_feature 1..33: note = RV primer VK2
gctgagctcataaaaattaattaatcattcagc

SEQ ID NO: 43 - DNA, 33 bp, synthetic construct
  source 1..33: mol_type = other DNA
  misc_feature 1..33: note = FW primer left flanking A35R
gctgaattcgtaggtttaagaagttgtcggtgc

SEQ ID NO: 44 - DNA, 39 bp, synthetic construct
  source 1..39: mol_type = other DNA
  misc_feature 1..39: note = RV primer left flanking A35R
tttttgttgtcacttgtagaattttttaacacatagtac

SEQ ID NO: 45 - DNA, 90 bp, synthetic construct
  source 1..90: mol_type = other DNA
  misc_feature 1..90: note = FW primer right flanking A35R
tactatgtgttaaaaaattctacaagtgacaacaaaaactgcagcggccgctcgagagctcagacggcaatggatggatcataattgatg

SEQ ID NO: 46 - DNA, 34 bp, synthetic construct
  source 1..34: mol_type = other DNA
  misc_feature 1..34: note = RV primer right flanking A35R
gcgaagcttatcttcattaagtactttaacagtc

(The sequence listing continues in the following parts.)

What is claimed is:

1. A recombinant oncolytic vaccinia virus, comprising:
an inactivating mutation of B2R;
a heterologous nucleic acid encoding interferon regulatory factor 3 (IRF3); and
at least one heterologous nucleic acid encoding one or more cytokine and/or chemokine.

2. The recombinant oncolytic vaccinia virus of claim 1, wherein the at least one heterologous nucleic acid encoding one or more cytokine and/or chemokine comprises:
a heterologous nucleic acid encoding chemokine ligand 9 (CXCL9) and/or IL-12; or
a heterologous nucleic acid encoding CXCL9 and a heterologous nucleic acid encoding IL-12.

3-6. (canceled)

7. The recombinant oncolytic vaccinia virus of claim 1, wherein the at least one heterologous nucleic acid encoding one or more cytokine and/or chemokine comprises a heterologous nucleic acid encoding IL-2.

8. (canceled)

9. The recombinant oncolytic vaccinia virus of claim 7, wherein the IL-2 is an IL-2 superkine.

10. (canceled)

11. (canceled)

12. The recombinant oncolytic vaccinia virus of claim 1, further comprising one or more heterologous gene product selected from the group consisting of a complement inhibitor, a T cell or NK cell evader, an immune stimulating protein, an anti-angiogenic protein, an interferon regulatory factor, an apoptosis inducible protein or a combination of any of the foregoing.

13. (canceled)

14. (canceled)

15. The recombinant oncolytic virus of claim 1, wherein the inactivating mutation of B2R is characterized by insertion of the heterologous nucleic acid encoding IRF3 and/or at least one of the at least one heterologous nucleic acid encoding one or more cytokine and/or chemokine into the B2R gene loci.

16-19. (canceled)

20. The recombinant oncolytic vaccinia virus of claim 1, wherein the nucleic acid genome of the recombinant oncolytic vaccinia virus is modified from a parental vaccinia virus that has a nucleic acid genome that has at least 99% sequence identity to the nucleic acid sequence set forth in SEQ ID NO: 1, and wherein the nucleic acid genome of the parental vaccinia virus is characterized by one or more of:
(i) a guanine (G) at the position corresponding to position 7770 of SEQ ID NO: 1;
(ii) a thymine (T) at the position corresponding to position 15261 of SEQ ID NO: 1;
(iii) a G at the position corresponding to position 32136 of SEQ ID NO: 1;
(iv) a G at the position corresponding to position 49455 of SEQ ID NO: 1;
(v) a cytosine (C) at the position corresponding to position 92969 of SEQ ID NO: 1;
(vi) the nucleic acid sequence CACTTATATAT at the positions corresponding to positions 106870 to 106880 of SEQ ID NO: 1;
(vii) the nucleic acid sequence GTTTTCATTA at the positions corresponding to positions 111267 to 111276 of SEQ ID NO: 1;
(viii) an adenine (A) at the position corresponding to position 162715 of SEQ ID NO: 1;
(ix) the nucleic acid sequence TACAGACACC at the positions corresponding to positions 165844 to 185853 of SEQ ID NO: 1; and
(x) a C at the position corresponding to position 187805 of SEQ ID NO: 1.

21. The recombinant oncolytic vaccinia virus of claim 1, wherein the nucleic acid genome of the recombinant oncolytic vaccinia virus has at least 95% sequence identity to the nucleic acid sequence set forth in SEQ ID NO: 1.

22. The recombinant oncolytic vaccinia virus of claim 1, wherein:
the heterologous nucleic acid encoding IRF3 is inserted into the J2R (thymidine kinase) gene locus in the genome of the virus; and
the at least one heterologous nucleic acid encoding one or more cytokine and/or chemokine comprises a heterologous nucleic acid encoding CXCL9 and IL-12, wherein the heterologous nucleic acid encoding CXCL9 and IL-12 is inserted into the A56R gene locus in the genome of the virus.

23. The recombinant oncolytic vaccinia virus of claim 22, wherein the nucleic acid genome of the recombinant oncolytic vaccinia virus comprises the nucleic acid sequence of SEQ ID NO: 85, or a nucleic acid sequence that has at least 95% sequence identity to the nucleic acid sequence set forth in SEQ ID NO: 85.

24. The recombinant oncolytic vaccinia virus of claim 1, wherein the heterologous nucleic acid encoding IRF3 is inserted into the B2R (viral cGAMP-specific nuclease) gene locus in the genome of the virus; and
the at least one heterologous nucleic acid encoding one or more cytokine and/or chemokine comprises a heterologous nucleic acid encoding CXCL9 and IL-12, wherein the heterologous nucleic acid encoding CXCL9 and IL-12 is inserted into the A56R gene locus in the genome of the virus; and
a heterologous nucleic acid encoding an inducible death effector domain (iDED).

25. The recombinant oncolytic vaccinia virus of claim 1, further comprising a heterologous nucleic acid encoding an apoptosis-inducible protein.

26. The recombinant oncolytic vaccinia virus of claim 25, wherein the apoptosis-inducible protein is an iDED.

27. (canceled)

28. (canceled)

29. The recombinant oncolytic vaccinia virus of claim 24, wherein the nucleic acid genome of the recombinant oncolytic vaccinia virus comprises the nucleic acid sequence of SEQ ID NO: 86, or a nucleic acid sequence that has at least 95% sequence identity to the nucleic acid sequence set forth in SEQ ID NO: 86.

30. The recombinant oncolytic vaccinia virus of claim 1, further comprising a heterologous nucleic acid encoding one or more T cell or NK cell evader proteins.

31. The recombinant oncolytic vaccinia virus of claim 30, wherein the one or more T cell or NK cell evader proteins comprises a set of proteins encoded by Cowpox virus ORFs 012, 203 and 018 (CPXV012-203-018).

32. (canceled)

33. The recombinant oncolytic vaccinia virus of claim 1, further comprising a heterologous nucleic acid encoding a complement inhibitor.

34. The recombinant oncolytic vaccinia virus of claim 33, wherein the complement inhibitor is Borrelia burgdorferi complement regulatory-acquiring surface protein-2 (CRASP-2).

35. The recombinant oncolytic vaccinia virus of claim 34, wherein the heterologous nucleic acid encoding CRASP-2 is fused with a viral membrane gene to produce a fusion gene encoding a fusion protein.

36. The recombinant oncolytic vaccinia virus of claim 1, wherein:
the heterologous nucleic acid encoding IRF3 is inserted into the B2R (viral cGAMP-specific nuclease) gene locus in the genome of the virus; and
the at least one heterologous nucleic acid encoding one or more cytokine and/or chemokine comprises a heterologous nucleic acid encoding CXCL9 and IL-12, wherein the heterologous nucleic acid encoding CXCL9 and IL-12 is inserted into the A56R gene locus in the genome of the virus; and
the recombinant oncolytic vaccinia virus further comprises a heterologous nucleic acid encoding a fusion gene comprising CRASP-2 fused with a viral membrane gene.

37. (canceled)

38. The recombinant oncolytic vaccinia virus of claim 36, wherein the nucleic acid genome of the recombinant oncolytic vaccinia virus comprises the nucleic acid sequence of SEQ ID NO: 90, or a nucleic acid sequence that has at least 95% sequence identity to the nucleic acid sequence set forth in SEQ ID NO: 90.

39. (canceled)

40. The recombinant oncolytic vaccinia virus of claim 1, further comprising a heterologous nucleic acid encoding an immune stimulating protein, and/or a heterologous nucleic acid encoding one or more anti-angiogenic protein.

41. The recombinant oncolytic vaccinia virus of claim 40, wherein the immune stimulating protein is recombinant LIGHT.

42. (canceled)

43. The recombinant oncolytic vaccinia virus of claim 40, wherein the one or more anti-angiogenic protein comprises a VEGF inhibitor, an angiopoietin inhibitor, versikine, or a fusion protein of any two or more of the foregoing.

44. (canceled)

45. The recombinant oncolytic vaccinia virus of claim 43, wherein the one or more anti-angiogenic protein is a bispecific anti-VEGF/anti-Ang2 antibody.

46. (canceled)

47. The recombinant oncolytic vaccinia virus of claim 40, wherein the nucleic acid genome of the recombinant oncolytic vaccinia virus comprises the nucleic acid sequence of SEQ ID NO: 88, or a nucleic acid sequence that has at least 95% sequence identity to the nucleic acid sequence set forth in SEQ ID NO: 88.

48. A recombinant oncolytic virus, comprising:
an inactivating mutation of at least one viral gene; and
at least one heterologous nucleic acid encoding one or more heterologous gene product, wherein the one or more heterologous gene product is or comprises an immune modulating protein, a complement inhibitor, a T cell or NK cell evader, an anti-angiogenic protein, an interferon regulatory factor, or an apoptosis inducible protein, or a combination of any of the foregoing.

49. A recombinant oncolytic virus, comprising at least one heterologous nucleic acid encoding one or more heterologous gene product, wherein the one or more heterologous gene product is or comprises a complement inhibitor, a T cell or NK cell evader, an immune modulating protein, an anti-angiogenic protein, an interferon regulatory factor, an apoptosis inducible protein, or a combination of any of the foregoing.

50-52. (canceled)

53. A recombinant oncolytic virus, comprising a nucleic acid genome that is modified from a parental vaccinia virus genome having at least 99% sequence identity with the nucleic acid sequence set forth in SEQ ID NO: 1, wherein the nucleic acid genome of the recombinant oncolytic virus comprises at least one heterologous nucleic acid encoding one or more heterologous gene product inserted in the genome.

54-123. (canceled)

124. The recombinant oncolytic virus of claim 48, wherein the at least one heterologous nucleic acid encoding one or more heterologous gene product comprises one or more heterologous nucleic acid each encoding an apoptosis-inducible protein.

125-129. (canceled)

130. The recombinant oncolytic virus of claim 124, wherein the apoptosis-inducible protein is an inducible DED (iDED).

131. The recombinant oncolytic virus of claim 130, wherein the heterologous nucleic acid encoding an iDED is inserted into or in place of the J2R gene locus in the genome of the virus.

132. The recombinant oncolytic virus of claim 131, wherein the nucleic acid genome of the recombinant oncolytic virus comprises the nucleic acid sequence set forth in SEQ ID NO: 8, or a nucleic acid sequence that has at least 95% sequence identity to the nucleic acid sequence set forth in SEQ ID NO: 8.

133-193. (canceled)

194. An isolated clonal vaccinia virus (VACV) strain comprising a nucleic acid genome that has at least 95% sequence identity with the nucleic acid sequence set forth in SEQ ID NO: 1 and wherein the nucleic acid genome is characterized by one or more of:
(i) a variant 017 open reading frame (ORF) encoding an amino acid sequence that has at least 95% sequence identity to SEQ ID NO: 57 and comprises a polar uncharged amino acid at position 66;
(ii) a variant 038 (K5L) ORF comprising a nucleotide insertion to effect a frameshift mutation, wherein the 038 (K5L) gene product is altered;
(iii) a variant 059 (E2L) ORF encoding an amino acid sequence that is at least 95% sequence identity to SEQ ID NO:60 and comprises a hydrophobic amino acid other than leucine at position 419;
(iv) a variant 104 (H4L) ORF encoding an amino acid sequence having at least 95% sequence identity to SEQ ID NO:61 and comprises a negatively charged amino acid at position 591; and
(v) a variant 182 (A56R) ORF comprising deletion of two nucleotides to effect a frameshift mutation, wherein the 182 (A56R) ORF gene product is altered.

195-208. (canceled)

209. An isolated clonal vaccinia virus (VACV) strain comprising a nucleic acid genome that has at least 95% sequence identity with the nucleic acid sequence set forth in SEQ ID NO: 1, and wherein the nucleic acid genome is characterized by one or more of:
(i) a guanine (G) at the position corresponding to position 7770 of SEQ ID NO: 1;
(ii) a thymine (T) at the position corresponding to position 15261 of SEQ ID NO: 1;
(iii) a G at the position corresponding to position 32136 of SEQ ID NO: 1;
(iv) a G at the position corresponding to position 49455 of SEQ ID NO: 1;
(v) a cytosine (C) at the position corresponding to position 92969 of SEQ ID NO: 1;
(vi) the nucleic acid sequence CACTTATATAT at the positions corresponding to positions 106870 to 106880 of SEQ ID NO: 1;
(vii) the nucleic acid sequence GTTTTCATTA at the positions corresponding to positions 111267 to 111276 of SEQ ID NO: 1;
(viii) an adenine (A) at the position corresponding to position 162715 of SEQ ID NO: 1;
(ix) the nucleic acid sequence TACAGACACC at the positions corresponding to positions 165844 to 185853 of SEQ ID NO: 1; and
(x) a C at the position corresponding to position 187805 of SEQ ID NO: 1.

210-235. (canceled)

236. A VACV preparation comprising the isolated clonal VACV strain of claim 194.

237. A VACV preparation comprising the recombinant oncolytic virus of claim 48, wherein the recombinant oncolytic virus is a recombinant oncolytic vaccinia virus.

238. A recombinant oncolytic virus preparation comprising the recombinant oncolytic virus of claim 1.

239-244. (canceled)

245. A pharmaceutical composition comprising the isolated VACV clonal strain of 209.

246. A pharmaceutical composition comprising the VACV preparation of claim 194.

247. A pharmaceutical composition comprising the recombinant oncolytic virus of claim 1.

248. A recombinant vaccinia virus (VACV) strain comprising a nucleic acid genome of the VACV clonal strain of claim 19 that comprises an inactivating mutation in at least one viral gene.

249-264. (canceled)

265. A nucleic acid comprising a genome of the recombinant oncolytic virus of claim 1.

266. A recombinant oncolytic virus comprising the nucleic acid of claim 265.

267. (canceled)

268. (canceled)

269. A pharmaceutical composition comprising the recombinant VACV strain of claim 248.

270. A pharmaceutical composition comprising the recombinant oncolytic virus of claim 248.

271-275. (canceled)

276. A method of treating a proliferative disorder in a subject comprising administering to the subject the recombinant oncolytic virus of claim 1.

277-291. (canceled)

292. A method of inhibiting virus replication, the method comprising contacting cells infected with a recombinant oncolytic virus with AP1903 (Rimiducid), wherein the recombinant oncolytic virus comprises a heterologous nucleic acid encoding an apoptosis inducible protein.

293-303. (canceled)

304. A method of treating a proliferative disorder in a subject comprising administering to the subject the recombinant VACV strain of claim 248.

305. A method of treating a proliferative disorder in a subject comprising administering to the subject a recombinant oncolytic vaccinia, wherein the nucleic acid genome of the recombinant oncolytic vaccinia virus comprises:
the nucleic acid sequence of SEQ ID NO: 8, or a nucleic acid sequence that has at least 95% sequence identity to the nucleic acid sequence set forth in SEQ ID NO: 8;
the nucleic acid sequence of SEQ ID NO: 85, or a nucleic acid sequence that has at least 95% sequence identity to the nucleic acid sequence set forth in SEQ ID NO: 85; or
the nucleic acid sequence of SEQ ID NO: 86, or a nucleic acid sequence that has at least 95% sequence identity to the nucleic acid sequence set forth in SEQ ID NO: 86; or
the nucleic acid sequence of SEQ ID NO: 88, or a nucleic acid sequence that has at least 95% sequence identity to the nucleic acid sequence set forth in SEQ ID NO: 88; or
the nucleic acid sequence of SEQ ID NO: 90, or a nucleic acid sequence that has at least 95% sequence identity to the nucleic acid sequence set forth in SEQ ID NO: 90.
